United States Patent Application Publication US 2023/0026259 A1 - sequence listing, part 35

SEQ ID NO: 121427 - DNA, 3873 bp, Homo sapiens
  Payload ID: 3806
  Gene Symbol: COL3A1
  Gene Name: collagen, type III, alpha 1
  Uniprot ID: P02461
  ENST ID: ENST00000317840
  CDS Start-End: 105-3596
gacgggcccggtgctgaagggcagggaacaacttgatggtgctactttgaactgcttttcttttctcctttttgcacaaagagtctcatgtctgatatttagacatgatgagctttgtgcaaaaggggagctggctacttctcgctctgcttcatcccactattattttggcacaacaggaagctgttgaaggaggatgttcccatcttggtcagtcctatgcggatagagatgtctggaagccagaaccatgccaaatatgtgtctgtgactcaggatccgttctctgcgatgacataatatgtgacgatcaagaattagactgccccaacccagaaattccatttggagaatgttgtgcagtttgcccacagcctccaactgctcctactcgccctcctaatggtcaaggacctcaaggccccaagggagatccaggccctcctggtattcctgggagaaatggtgaccctggtattccaggacaaccagggtcccctggttctcctggcccccctggaatctgtgaatcatgccctactggtcctcagaactattctccccagtatgattcatatgatgtcaagtctggagtagcagtaggaggactcgcaggctatcctggaccagctggccccccaggccctcccggtccccctggtacatctggtcatcctggttcccctggatctccaggataccaaggaccccctggtgaacctgggcaagctggtccttcaggccctccaggacctcctggtgctataggtccatctggtcctgctggaaaagatggagaatcaggtagacccggacgacctggagagcgaggattgcctggacctccaggtatcaaaggtccagctgggatacctggattccctggtatgaaaggacacagaggcttcgatggacgaaatggagaaaagggtgaaacaggtgctcctggattaaagggtgaaaatggtcttccaggcgaaaatggagctcctggacccatgggtccaagaggggctcctggtgagcgaggacggccaggacttcctggggctgcaggtgctcggggtaatgacggtgctcgaggcagtgatggtcaaccaggccctcctggtcctcctggaactgccggattccctggatcccctggtgctaagggtgaagttggacctgcagggtctcctggttcaaatggtgcccctggacaaagaggagaacctggacctcagggacacgctggtgctcaaggtcctcctggccctcctgggattaatggtagtcctggtggtaaaggcgaaatgggtcccgctggcattcctggagctcctggactgatgggagcccggggtcctccaggaccagccggtgctaatggtgctcctggactgcgaggtggtgcaggtgagcctggtaagaatggtgccaaaggagagcccggaccacgtggtgaacgcggtgaggctggtattccaggtgttccaggagctaaaggcgaagatggcaaggatggatcacctggagaacctggtgcaaatgggcttccaggagctgcaggagaaaggggtgcccctgggttccgaggacctgctggaccaaatggcatcccaggagaaaagggtcctgctggagagcgtggtgctccaggccctgcagggcccagaggagctgctggagaacctggcagagatggcgtccctggaggtccaggaatgaggggcatgcccggaagtccaggaggaccaggaagtgatgggaaaccagggcctcccggaagtcaaggagaaagtggtcgaccaggtcctcctgggccatctggtccccgaggtcagcctggtgtcatgggcttccccggtcctaaaggaaatgatggtgctcctggtaagaatggagaacgaggtggccctggaggacctggccctcagggtcctcctggaaagaatggtgaaactggacctcagggacccccagggcctactgggcctggtggtgacaaaggagacacaggaccccctggtccacaaggattacaaggcttgcctggtacaggtggtcctccaggagaaaatggaaaacctggggaaccaggtccaaagggtgatgccggtgcacctggagctccaggaggcaagggtgatgctggtgcccctggtgaacgtggacctcctggattggcaggggccccaggacttagaggtggagctggtccccctggtcccgaaggaggaaagggtgctgctggtcctcctgggccacctggtgctgctggtactcctggtctgcaaggaatgcctggagaaagaggaggtcttggaagtcctggtccaaagggtgacaagggtgaaccaggcggtccaggtgctgatggtgtcccagggaaagatggcccaaggggtcctactggtcctattggtcctcctggcccagctggccagcctggagataagggtgaaggtggtgcccccggacttccaggtatagctggacctcgtggtagccctggtgagagaggtgaaactggccctccaggacctgctggtttccctggtgctcctggacagaatggtgaacctggtggtaaaggagaaagaggggctccgggtgagaaaggtgaaggaggccctcctggagttgcaggacctcctggcaaagatggaaccagtggacatccaggtcccattggaccaccagggcctcgaggtaacagaggtgaaagaggatctgagggctccccaggccacccagggcaaccaggccctcctggacctcctggtgcccctggtccttgctgtggtggtgttggagccgctgccattgctgggattggaggtgaaaaagctggcggttttgccccgtattatggagatgaaccaatggatttcaaaatcaacaccgatgagattatgacttcactcaagtctgttaatggacaaatagaaagcctcattagtcctgatggttctcgtaaaaaccccgctagaaactgcagagacctgaaattctgccatcctgaactcaagagtggagaatactgggttgaccctaaccaaggatgcaaattggatgctatcaaggtattctgtaatatggaaactggggaaacatgcataagtgccaatcctttgaatgttccacggaaacactggtggacagattctagtgctgagaagaaacacgtttggtttggagagtccatggatggtggttttcagtttagctacggcaatcctgaacttcctgaagatgtccttgatgtgcatctggcattccttcgacttctctccagccgagcttcccagaacatcacatatcactgcaaaaatagcattgcatacatggatcaggccagtggaaatgtaaagaaggccctgaagctgatggggtcaaatgaaggtgaattcaaggctgaaggaaatagcaaattcacctacacagttctggaggatggttgcacgaaacacactggggaatggagcaaaacagtctttgaatatcgaacacgcaaggctgtgagactacctattgtagatattgcaccctatgacattggtggtcctgatcaagaatttggtgtggacgttggccctgtttgctttttataaaccaaactctatctgaaatcccaacaaaaaaaatttaactccatatgtgttcctcttgttctaatcttgtcaaccagtgcaagtgaccgacaaaattccagttatttatttccaaaatgtttggaaacagtataatttgacaaagaaaaatgatacttctctttttttgctgttccaccaaatacaattcaaatgctttttgttttatttttttaccaattccaatttcaaaatgtctcaatggtgctataataaataaacttcaacactctttatg

SEQ ID NO: 121428 - DNA, 268 bp, Homo sapiens
  Payload ID: 3806
  Gene Symbol: COL3A1
  Gene Name: collagen, type III, alpha 1
  ENST ID: ENST00000450867
  CDS Start-End: 1-268
aagaggggctcctggtgagcgaggacggccaggacttcctggggctgcaggtgctcggggtaatgacggtgctcgaggcagtgatggtcaaccaggccctcctggtcctcctggaactgccggattccctggatcccctggtgctaagggccctcctgggattaatggtagtcctggtggtaaaggcgaaatgggtcccgctggcattcctggagctcctggactgatgggagcccggggtcctccaggaccagccggtgctaatggt

SEQ ID NO: 121429 - DNA, 6532 bp, Homo sapiens
  Payload ID: 3807
  Gene Symbol: COL4A1
  Gene Name: collagen, type IV, alpha 1
  Uniprot ID: P02462
  ENST ID: ENST00000375820
  CDS Start-End: 123-5132
gcttggagccgccgcacccgggacggtgcgtagcgctggaagtccggccttccgagagctagctgtccgccgcggcccccgcacgccgggcagccgtccctcgccgcctcgggcgcgccaccatggggccccggctcagcgtctggctgctgctgctgcccgccgcccttctgctccacgaggagcacagccgggccgctgcgaagggtggctgtgctggctctggctgtggcaaatgtgactgccatggagtgaagggacaaaagggtgaaagaggcctcccggggttacaaggtgtcattgggtttcctggaatgcaaggacctgaggggccacagggaccaccaggacaaaagggtgatactggagaaccaggactacctggaacaaaagggacaagaggacctccgggagcatctggctaccctggaaacccaggacttcccggaattcctggccaagacggcccgccaggccccccaggtattccaggatgcaatggcacaaagggggagagagggccgctcgggcctcctggcttgcctggtttcgctggaaatcccggaccaccaggcttaccagggatgaagggtgatccaggtgagatacttggccatgtgcccgggatgctgttgaaaggtgaaagaggatttcccggaatcccagggactccaggcccaccaggactgccagggcttcaaggtcctgttgggcctccaggatttaccggaccaccaggtcccccaggccctcccggccctccaggtgaaaagggacaaatgggcttaagttttcaaggaccaaaaggtgacaagggtgaccaaggggtcagtgggcctccaggagtaccaggacaagctcaagttcaagaaaaaggagacttcgccaccaagggagaaaagggccaaaaaggtgaacctggatttcaggggatgccaggggtcggagagaaaggtgaacccggaaaaccaggacccagaggcaaacccggaaaagatggtgacaaaggggaaaaagggagtcccggttttcctggtgaacccgggtacccaggactcataggccgccagggcccgcagggagaaaagggtgaagcaggtcctcctggcccacctggaattgttataggcacaggacctttgggagaaaaaggagagaggggctaccctggaactccggggccaagaggagagccaggcccaaaaggtttcccaggactaccaggccaacccggacctccaggcctccctgtacctgggcaggctggtgcccctggcttccctggtgaaagaggagaaaaaggtgaccgaggatttcctggtacatctctgccaggaccaagtggaagagatgggctcccgggtcctcctggttcccctgggccccctgggcagcctggctacacaaatggaattgtggaatgtcagcccggacctccaggtgaccagggtcctcctggaattccagggcagccaggatttataggcgaaattggagagaaaggtcaaaaaggagagagttgcctcatctgtgatatagacggatatcgggggcctcccgggccacagggacccccgggagaaataggtttcccagggcagccaggggccaagggcgacagaggtttgcctggcagagatggtgttgcaggagtgccaggccctcaaggtacaccagggctgataggccagccaggagccaagggggagcctggtgagttttatttcgacttgcggctcaaaggtgacaaaggagacccaggctttccaggacagcccggcatgccagggagagcgggttctcctggaagagatggccatccgggtcttcctggccccaagggctcgccgggttctgtaggattgaaaggagagcgtggcccccctggaggagttggattcccaggcagtcgtggtgacaccggcccccctgggcctccaggatatggtcctgctggtcccattggtgacaaaggacaagcaggctttcctggaggccctggatccccaggcctgccaggtccaaagggtgaaccaggaaaaattgttcctttaccaggcccccctggagcagaaggactgccggggtccccaggcttcccaggtccccaaggagaccgaggctttcccggaaccccaggaaggccaggcctgccaggagagaagggcgctgtgggccagccaggcattggatttccagggccccccggccccaaaggtgttgacggcttacctggagacatggggccaccggggactccaggtcgcccgggatttaatggcttacctgggaacccaggtgtgcagggccagaagggagagcctggagttggtctaccgggactcaaaggtttgccaggtcttcccggcattcctggcacacccggggagaaggggagcattggggtaccaggcgttcctggagaacatggagcgatcggaccccctgggcttcaggggatcagaggtgaaccgggacctcctggattgccaggctccgtggggtctccaggagttccaggaataggcccccctggagctaggggtccccctggaggacagggaccaccggggttgtcaggccctcctggaataaaaggagagaagggtttccccggattccctggactggacatgccgggccctaaaggagataaaggggctcaaggactccctggcataacgggacagtcggggctccctggccttcctggacagcagggggctcctgggattcctgggtttccaggttccaagggagaaatgggcgtcatggggacccccgggcagccgggctcaccaggaccagtgggtgctcctggattaccgggtgaaaaaggggaccatggctttccgggctcctcaggacccaggggagaccctggcttgaaaggtgataagggggatgtcggtctccctggcaagcctggctccatggataaggtggacatgggcagcatgaagggccagaaaggagaccaaggagagaaaggacaaattggaccaattggtgagaagggatcccgaggagaccctgggaccccaggagtgcctggaaaggacgggcaggcaggacagcctgggcagccaggacctaaaggtgatccaggtataagtggaaccccaggtgctccaggacttccgggaccaaaaggatctgttggtggaatgggcttgccaggaacacctggagagaaaggtgtgcctggcatccctggcccacaaggttcacctggcttacctggagacaaaggtgcaaaaggagagaaagggcaggcaggcccacctggcataggcatcccagggctgcgaggtgaaaagggagatcaagggatagcgggtttcccaggaagccctggagagaagggagaaaaaggaagcattgggatcccaggaatgccagggtccccaggccttaaagggtctcccgggagtgttggctatccaggaagtcctgggctacctggagaaaaaggtgacaaaggcctcccaggattggatggcatccctggtgtcaaaggagaagcaggtcttcctgggactcctggccccacaggcccagctggccagaaaggggagccaggcagtgatggaatcccggggtcagcaggagagaagggtgaaccaggtctaccaggaagaggattcccagggtttccaggggccaaaggagacaaaggttcaaagggtgaggtgggtttcccaggattagccgggagcccaggaattcctggatccaaaggagagcaaggattcatgggtcctccggggccccagggacagccggggttaccgggatccccaggccatgccacggaggggcccaaaggagaccgcggacctcagggccagcctggcctgccaggacttccgggacccatggggcctccagggcttcctgggattgatggagttaaaggtgacaaaggaaatccaggctggccaggagcacccggtgtcccagggcccaagggagaccctggattccagggcatgcctggtattggtggctctccaggaatcacaggctctaagggtgatatggggcctccaggagttccaggatttcaaggtccaaaaggtcttcctggcctccagggaattaaaggtgatcaaggcgatcaaggcgtcccgggagctaaaggtctcccgggtcctcctggccccccaggtccttacgacatcatcaaaggggagcccgggctccctggtcctgagggccccccagggctgaaagggcttcagggactgccaggcccgaaaggccagcaaggtgttacaggattggtgggtatacctggacctccaggtattcctgggtttgacggtgcccctggccagaaaggagagatgggacctgccgggcctactggtccaagaggatttccaggtccaccaggccccgatgggttgccaggatccatggggcccccaggcaccccatctgttgatcacggcttccttgtgaccaggcatagtcaaacaatagatgacccacagtgtccttctgggaccaaaattctttaccacgggtactctttgctctacgtgcaaggcaatgaacgggcccatggccaggacttgggcacggccggcagctgcctgcgcaagttcagcacaatgcccttcctgttctgcaatattaacaacgtgtgcaactttgcatcacgaaatgactactcgtactggctgtccacccctgagcccatgcccatgtcaatggcacccatcacgggggaaaacataagaccatttattagtaggtgtgctgtgtgtgaggcgcctgccatggtgatggccgtgcacagccagaccattcagatcccaccgtgccccagcgggtggtcctcgctgtggatcggctactcttttgtgatgcacaccagcgctggtgcagaaggctctggccaagccctggcgtcccccggctcctgcctggaggagtttagaagtgcgccattcatcgagtgtcacggccgtgggacctgcaattactacgcaaacgcttacagcttttggctcgccaccatagagaggagcgagatgttcaagaagcctacgccgtccaccttgaaggcaggggagctgcgcacgcacgtcagccgctgccaagtctgtatgagaagaacataatgaagcctgactcagctaatgtcacaacatggtgctacttcttcttctttttgttaacagcaacgaaccctagaaatatatcctgtgtacctcactgtccaatatgaaaaccgtaaagtgccttataggaatttgcgtaactaacacaccctgcttcattgacctctacttgctgaaggagaaaaagacagcgataagctttcaatagtggcataccaaatggcacttttgatgaaataaaatatcaatattttctgcaatccaatgcactgatgtgtgaagtgagaactccatcagaaaaccaaagggtgctaggaggtgtgggtgccttccatactgtttgcccattttcattcttgtattataattaattttctacccccagagataaatgtttgtttatatcactgtctagctgtttcaaaatttaggtcccttggtctgtacaaataatagcaatgtaaaaatggttttttgaacctccaaatggaattacagactcagtagccatatcttccaaccccccagtataaatttctgtctttctgctatgtgtggtactttgcagctgcttttgcagaaatcacaattttcctgtggaataaagatggtccaaaaatagtcaaaaattaaatatatatatatattagtaatttatatagatgtcagcaattaggcagatcaaggtttagtttaacttccactgttaaaataaagcttacatagttttcttcctttgaaagactgtgctgtcctttaacataggtttttaaagactaggatattgaatgtgaaacatccgttttcattgttcacttctaaaccaaaaattatgtgttgccaaaaccaaacccaggttcatgaatatggtgtctattatagtgaaacatgtactttgagcttattgtttttattctgtattaaatattttcagggttttaaacactaatcacaaactgaatgacttgacttcaaaagcaacaaccttaaaggccgtcatttcattagtattcctcattctgcatcctggcttgaaaaacagctctgttgaatcacagtatcagtattttcacacgtaagcacattcgggccatttccgtggtttctcatgagctgtgttcacagacctcagcagggcatcgcatggaccgcaggagggcagattcggaccactaggcctgaaatgacatttcactaaaagtctccaaaacatttctaagactactaaggccttttatgtaatttctttaaatgtgtatttcttaagaattcaaatttgtaataaaactatttgtataaaaattaagcttttattaatttgttgctagtattgccacagacgcattaaaagaaacttactgcacaagctgctaataaatttgtaagctttgcatacctta

SEQ ID NO: 121430 - DNA, 2547 bp, Homo sapiens
  Payload ID: 3807
  Gene Symbol: COL4A1
  Gene Name: collagen, type IV, alpha 1
  ENST ID: ENST00000543140
  CDS Start-End: 105-1664
cgggacggtgcgtagcgctggaagtccggccttccgagagctagctgtccgccgcggcccccgcacgccgggcagccgtccctcgccgcctcgggcgcgccaccatggggccccggctcagcgtctggctgctgctgctgcccgccgcccttctgctccacgaggagcacagccgggccgctgcgaagggtggctgtgctggctctggctgtggcaaatgtgactgccatggagtgaagggacaaaagggtgaaagaggcctcccggggttacaaggtgtcattgggtttcctggaatgcaaggacctgaggggccacagggaccaccaggacaaaagggtgatactggagaaccaggactacctggaacaaaagggacaagaggacctccgggagcatctggctaccctggaaacccaggacttcccggaattcctggccaagacggcccgccaggccccccaggtattccaggatgcaatggcacaaagggggagagagggccgctcgggcctcctggcttgcctggtttcgctggaaatcccggaccaccaggcttaccagggatgaagggtgatccaggtgagatacttggccatgtgcccgggatgctgttgaaaggtgaaagaggatttcccggaatcccagggactccaggcccaccaggactgccagggcttcaaggtcctgttgggcctccaggatttaccggaccaccaggtcccccaggccctcccggccctccaggtgaaaagggacaaatgggcttaagttttcaaggaccaaaaggtgacaagggtgaccaaggggtcagtgggcctccaggagtaccaggacaagctcaagttcaagaaaaaggagacttcgccaccaagggagaaaagggccaaaaaggtgaacctggatttcaggggatgccaggggtcggagagaaaggtgaacccggaaaaccaggacccagaggcaaacccggaaaagatggtgacaaaggggaaaaagggagtcccggttttcctggtgaacccgggtacccaggactcataggccgccagggcccgcagggagaaaagggtgaagcaggtcctcctggcccacctggaattgttataggcacaggacctttgggagaaaaaggagagaggggctaccctggaactccggggccaagaggagagccaggcccaaaaggtttcccaggactaccaggccaacccggacctccaggcctccctgtacctgggcaggctggtgcccctggcttccctggtgaaagaggagaaaaaggtgaccgaggatttcctggtacatctctgccaggaccaagtggaagagatgggctcccgggtcctcctggttcccctgggccccctgggcagcctggctacacaaatggaattgtggaatgtcagcccggacctccaggtgaccagggtcctcctggaattccagggcagccaggatttataggcgaaattggagagaaaggtcaaaaaggagagagttgcctcatctgtgatatagacggatatcgggggcctcccgggccacagggacccccgggagaaataggtttcccagggcagccaggggccaagggcgacagaggtttgcctggcagagatggtgttgcaggagtgccattgctttttcaaatccataaatgaaatatccggatcacattgacatgaaacctttcaatggaacaaaataccagcttcttagcttttgtagtttgttttaaaagaatccactaaatagaagagcataataataatcttgaattttgaaggacattattttcttgcatataatgacttctgtttctgaagttttgaaatctcaaggcattgttcctctcgtattttctttgttcttctgagctttgcgagcatggactggtttccacaattcctttcattcctttttttctttttgtaagatattgaaagtcaaatttcagaattattcatttctgatgtagcccttcaaattttttaatttttaaagatattgctggaagcttctacaaaagaaaaccagggcaaaagcgagttgaaatagcaatgacccagctggaattcagcaatcattttctgcttttgaagttagatcttgggcttttgctctccagaacttccctggtgcctggggagctgagttagaagttgcaattgtttaagatatatctaaataaattagaagttcaaataactgggtagccctgactgtagtggggatcaaagacagaagaactttgaaggaagcagaaaaggacgtttttaacctctatgcaccgcttcatctcctgggctttcctggtggacttcctgcctcaactctggctgaaactcagtctagacatatctaataaaagacggaaaaagaggaaagaggtgagaaagaaggaatattgaggaaagatcataatatagaagaaaagaaagaaaacatacaaccccaattctactccttatgccttcatcaggagctcctttctttccggagttggaaaaagtctctaaaaataaatttatgggtaaataattc

SEQ ID NO: 121431 - DNA, 1077 bp, Homo sapiens
  Payload ID: 3807
  Gene Symbol: COL4A1
  Gene Name: collagen, type IV, alpha 1
  ENST ID: ENST00000615732
  CDS Start-End: 408-1077
tctcccctcttcgggagcctggcgtgggtgtctcagaactgatctgctttcagtctgagttttgccatcctctgcggcgagcctgcgagcttgcacacttgggcaggatgcgctcagcgccctagctcagaggccgacccagggcagagccagtcagcgggcgctgggacgcaggactctgaacatgggtcctctgcctccctcccacctcctccaggcccggccactcggcttcctggtgaggaattcttaacgaccgccaaatccggtttctagagataaaagacggttgaagggtggctgtgctggctctggctgtggcaaatgtgactgccatggagtgaagggacaaaaggtgaggtgaaagaggcctcccggggttacaaggtgtcattgggtttcctggaatgcaaggacctgaggggccacagggaccaccaggacaaaagggtgatactggagaaccaggactacctggaacaaaagggacaagaggacctccgggagcatctggctaccctggaaacccaggacttcccggaattcctggccaagacggcccgccaggccccccaggtattccaggatgcaatggcacaaagggggagagagggccgctcgggcctcctggcttgcctggtttcgctggaaatcccggaccaccaggcttaccagggatgaagggtgatccaggtgagatacttggccatgtgcccgggatgctgttgaaaggtgaaagaggatttcccggaatcccagggactccaggcccaccaggactgccagggcttcaaggtcctgttgggcctccaggatttaccggaccaccaggtcccccaggccctcccggccctccaggtgaaaagggacaaatgggcttaagttttcaaggaccaaaaggtgacaagggtgaccaaggggtcagtgggcctccaggagtaccaggacaagctcaagttcaagaaaaaggagacttcgccaccaagggagaaaagggccaaaaaggtgaacctggatttcaggggatgccaggggtcggagagaaaggtgaacccggaaaaccaggacccagagtaa

SEQ ID NO: 121432 - DNA, 6281 bp, Homo sapiens
  Payload ID: 3808
  Gene Symbol: COL4A2
  Gene Name: collagen, type IV, alpha 2
  Uniprot ID: P08572
  ENST ID: ENST00000360467
  CDS Start-End: 307-5445
gggagcgcgcggcccgggagtgtggctgcagtgcgccgggacaccagggctccgcgctccgcactcaagaggctcccgcgtcccaacccctcgcgcccgcgcgttcgcggatccaggccgaggaccgaaaggggccgcccgagcccccggggccggcgcccagagagcccagcaaggccggccgccctgccggtgtgccgccggcgggtgcttctggaagggccaatgcgttcgggcagcagcccctgaagccgagcccgaggctaagtgggactgaccggggcccagagtggacgaaccgccagcatggggagagaccagcgcgcggtggccggccctgccctacggcggtggctgctgctggggacagtgaccgtggggttcctcgcccagagcgtcttggcgggtgtgaagaagtttgatgtgccgtgtggaggaagagattgcagtgggggctgccagtgctaccctgagaaaggtggacgtggtcagcctgggccagtgggcccccaggggtacaatgggccaccaggattacaaggattcccgggactgcagggacgtaaaggagacaagggtgaaaggggagcccccggagtaacgggacccaagggcgacgtgggagcaagaggcgtttctggattccctggtgccgatggaattcctggacacccggggcaaggtgggcccaggggaaggccgggctacgatggctgcaacggaacccagggagactcaggtccacaggggccccccggctctgaggggttcaccgggcctcccgggccccaaggaccaaaagggcagaaaggtgagccttatgcactgcctaaagaggagcgcgacagatatcggggtgaacctggagagcctggattggtcggtttccagggacctcccggccgccctgggcatgtgggacagatgggtccagttggagctccagggagaccaggaccacctggaccccctggaccaaaaggacagcaaggcaacagaggacttggtttctacggagttaagggtgaaaagggtgacgtagggcagccgggacccaacgggattccatcagacaccctccaccccatcatcgcgcccacaggagtcaccttccacccagatcagtacaagggtgaaaaaggcagtgagggggaaccaggaataagaggcatttccttgaagggagaagaaggaatcatgggctttcctggactgaggggttaccctggcttgagtggtgaaaaaggatcaccaggacagaagggaagccgaggcctggatggctatcaagggcctgatggaccccggggacccaagggagaagccggagacccagggccccctggactacctgcctactcccctcacccttccctagcaaaaggtgccagaggtgacccgggattcccaggggcccaaggggagccaggaagccagggtgagccaggagacccgggcctcccaggtccccctggcctctccatcggagatggagatcagaggagaggcctgccgggtgagatgggacccaagggcttcatcggagaccccggcatccctgcgctctacgggggcccacctggacctgatggaaagcgagggcctccaggaccccccgggctccctggaccacctggacctgatggcttcctgtttgggctgaaaggagcaaaaggaagagcaggcttccctgggcttcccggctcccctggagcccgcggaccaaaggggtggaaaggtgacgctggggaatgcagatgtacagaaggcgacgaagctatcaaaggtcttccgggactgccaggacccaagggcttcgcaggcatcaacggggagccggggaggaaaggggacagaggagaccccggccaacacggcctccctgggttcccagggctcaagggagtgcctggcaacattggtgctcccggacccaaaggagcaaaaggagattccagaacaatcacaaccaaaggtgagcggggacagcccggcgtcccaggtgtgcccgggatgaaaggtgacgatggcagcccaggccgcgatgggctcgatggattccccggcctcccaggccctcccggtgatggcatcaagggccctccaggggacccaggctatccaggaatacctggaacgaagggtactccaggagaaatgggccccccaggactgggccttcccggcctcaaaggccaacgtggtttccctggagacgccggcttacctggaccaccaggcttcctgggccctcctggccccgcagggaccccaggacaaatagattgtgacacagatgtgaaaagggccgttggaggtgacagacaggaggccatccagccaggttgcataggagggcccaagggattgccaggcctgccaggacccccaggccccacaggtgccaaaggcctccgaggaatcccaggcttcgcaggagctgatggaggaccagggcccaggggcttgccaggagacgcaggtcgtgaagggttcccaggacccccagggttcataggaccccgaggatccaaaggtgcagtgggcctccctggcccagatggatccccaggtcccatcggcctgccagggccagatgggccccctggggaaaggggcctccctggagaagtcctgggagctcagcccgggccacggggagatgctggtgtgcctggacagcctgggcttaaaggccttcccggagacagaggcccccctggattcagaggaagccaagggatgcctgggatgccagggctgaagggccagccaggcctcccaggaccttccggccagccaggcctgtatgggcctccaggactgcatggattcccaggagctcctggccaagaggggcccttggggctgccaggaatcccaggccgtgaaggtctgcctggtgatagaggggaccctggggacacaggcgctcctggccctgtgggcatgaaaggtctctctggtgacagaggagatgctggcttcacaggggagcaaggccatccaggaagccctggatttaaaggaattgatggaatgcctgggacccccgggctaaaaggagatagaggctcacctgggatggatggtttccaaggcatgcctggactcaaagggagacccgggtttccagggagcaaaggcgaggctggatttttcggaatacccggtctgaagggtctggctggtgagccaggttttaaaggcagccgaggggaccctgggcccccaggaccacctcctgtcatcctgccaggaatgaaagacattaaaggagagaaaggagatgaagggcctatggggctgaaaggatacctgggcgcaaaaggtatccaaggaatgccaggcatcccagggctgtcaggaatccctgggctgcctgggaggcccggccacatcaaaggagtcaagggagacatcggagtccccggcatccccggtttgccaggattccctggggtggctggcccccctggaattacgggattcccaggattcataggaagccggggtgacaaaggtgccccagggagagcaggcctgtatggcgagattggcgcgactggtgatttcggtgacatcggggacactataaatttaccaggaagaccaggcctgaagggggagcggggcaccactggaataccaggtctgaagggattctttggagagaagggaacagaaggtgacatcggcttccctgggataacaggcgtgactggagtccaaggccctcctggacttaaaggacaaacaggctttccagggctgactgggcctccagggtcgcagggagagctggggcggattggactgcctggtggcaaaggagatgatggctggccgggagctccgggcttaccaggttttccgggactccgtgggatccgcggcttacacggcttgccaggcaccaagggctttccaggatccccaggttctgacatccacggagacccaggcttcccaggccctcctggggaaagaggtgacccaggagaggccaacacccttccaggccctgtgggagtcccaggacagaaaggagaccaaggagctccaggggaacgaggcccacctgggagcccaggacttcaggggttccctggtatcacacccccttccaacatctctggggcacctggtgacaaaggggcgccagggatatttggcctgaaaggttatcggggcccaccagggccaccaggttctgctgctcttcctggaagcaaaggtgacacagggaacccaggagctccaggaaccccagggaccaaaggatgggccggggactccgggccccagggcaggcctggtgtgtttggtctcccaggagaaaaagggcccaggggtgaacaaggcttcatggggaacactggacccactggggcggtgggcgacagaggccccaagggacccaagggagacccaggattccctggtgcccccgggactgtgggagcccccgggattgcaggaatcccccagaagattgccgtccaaccagggacagtgggtccccaggggaggcgaggcccccctggggcaccgggggagatggggccccagggcccccccggagaaccaggtttccgtggggctccagggaaagctgggccccaaggaagaggtggtgtgtctgctgttcccggcttccggggagatgaaggacccataggccaccaggggccgattggccaagaaggtgcaccaggccgtccagggagcccgggcctgccgggtatgccaggccgcagcgtcagcatcggctacctcctggtgaagcacagccagacggaccaggagcccatgtgcccagtgggcatgaacaaactctggagtggatacagcctgctgtacttcgagggccaggagaaggcgcacaaccaggacctggggctggcgggctcctgcctggcgcggttcagcaccatgcccttcctgtactgcaaccctggtgatgtctgctactatgccagccggaacgacaagtcctactggctctctaccactgcgccgctgcccatgatgcccgtggccgaggacgagatcaagccctacatcagccgctgttctgtgtgtgaggccccggccatcgccatcgcggtccacagtcaggatgtctccatcccacactgcccagctgggtggcggagtttgtggatcggatattccttcctcatgcacacggcggcgggagacgaaggcggtggccaatcactggtgtcaccgggcagctgtctagaggacttccgcgccacaccattcatcgaatgcaatggaggccgcggcacctgccactactacgccaacaagtacagcttctggctgaccaccattcccgagcagagcttccagggctcgccctccgccgacacgctcaaggccggcctcatccgcacacacatcagccgctgccaggtgtgcatgaagaacctgtgagccggcgcgtgccaggaagggccattttggtgcttattcttaacttattacctcaggtgccaacccaaaaattggttttatttttttcttaaaaaaaaaaaagtctaccaaaggaatttgcatccagcagcagcacttagacctgccagccactgtcaccgagcgggtgcaagcactcggggtccctggagggcaagccctgcccacagaaagccaggagcagccctggcccccatcagccctgctagacgcaccgcctgaaggcacagctaaccacttcgcacacacccatgtaaccactgcactttccaatgccacagacaactcacattgttcaactcccttctcggggtgggacagacgagacaacagcacacaggcagccagccgtggccagaggctcgaggggctcagggcctcaggcacccgtccccacacgagggccccgtgggtgggcctggccctgctttctacgccaatgttatgccagctccatgttctcccaaataccgttgatgtgaattattttaaaggcaaaaccgtgctctttattttaaaaaacactgataatcacactgcggtaggtcattcttttgccacatccctatagaccactgggtttggcaaaactcaggcagaagtggagacctttctagacatcattgtcagccttgctacttgaaggtacaccccatagggtcggaggtgctgtccccactgccccacgttgtccctgagatttaacccctccactgctgggggtgagctgtactcttctgactgccccctcctgtgtaacgactacaaaataaaacttggttctgaatatttttaaa

SEQ ID NO: 121433 - DNA, 491 bp, Homo sapiens
  Payload ID: 3808
  Gene Symbol: COL4A2
  Gene Name: collagen, type IV, alpha 2
  ENST ID: ENST00000400163
  CDS Start-End: 177-491
agttaacaatttctatacagttaagtggatttagtgagtatcattcttccaggagagaagtaaaatttttttttaaagaggaaaacaaagaacaagattaagaacagtaaaagaataagtatggaaaatctggctaagtgggactgaccggggcccagagtggacgaaccgccagcatggggagagaccagcgcgcggtggccggccctgccctacggcggtggctgctgctggggacagtgaccgtggggttcctcgcccagagcgtcttggcgggtgtgaagaagtttgatgtgccgtgtggaggaagagattgcagtgggggctgccagtgctaccctgagaaaggtggacgtggtcagcctgggccagtgggcccccaggggtacaatgggccaccaggattacaaggattcccgggactgcagggacgtaaaggagacaagggtgaaaggggagcccccggagtaacgggacccaagggcgacgtg

SEQ ID NO: 121434 - DNA, 868 bp, Homo sapiens
  Payload ID: 3808
  Gene Symbol: COL4A2
  Gene Name: collagen, type IV, alpha 2
  ENST ID: ENST00000617564
  CDS Start-End: 1-128
gaggagaccccggccaacacggcctccctgggttcccagggctcaaggtgaggagcaatttcatcatgaagctggcaagacactctgaggcctccccaggtgtcccgttcttgccttttatctcctaagtttacacagcttcagaccggcaacactcatggacccaaggcatggctaaaccattctaaaaacccacataccccaaggcggactttctacatgtccactggtgagactgagaaggggcgctgctgtgggaaccgcagccgacagctcttgaaagagttcaatagggggtcaccacgtgacccagaaatgccactcctggtgtatccccaagagacttgaaagcacgtgtccacacaaacacacatacaccaatgttcacagcagcattcttcaaaataggcagaaggtgaaactatccaaatgtgcgtcacctgatgaatggatcagctaaatctatacagcatctataccacagaatagccctgaccttcacgtgggagcaaggtgctgagccataccacactgtggatgaacctggaacatgttatgccatggggattgagacccacacagaaggacacatgctatcacatggtctctcattctattcttatgaaatgtccacacaggcaacctagaaacaggaagtcgattggtggctgccacaggtggaggtgggggtgggggtggggagtacctgcttaatgggaatggggtttctttttgatataatgaagatgttctgaaattagataagagtgatggttgcacaaccttgtgaaaatactaaaaatcactgaattttatgctttaaaacagtgaactttgtgctatatgaattatatctcaaaaaaaccta

SEQ ID NO: 121435 - DNA, 910 bp, Homo sapiens
  Payload ID: 3809
  Gene Symbol: COL4A3
  Gene Name: collagen, type IV, alpha 3 (Goodpasture antigen)
  ENST ID: ENST00000304990
  CDS Start-End: 1-471
ggaaatccaggtgagaaaggaaacagaggcgttccagggatgccaggtttaaagggcctcaaaggactacccggaccagcaggaccaccaggccccagaggagatttgggcagcactgggaatcctggagaaccaggactgcgtggtataccaggaagcatggggaacatgggcatgccaggttctaaaggaaaaaggggaactttgggattcccaggtcgagcaggaagaccaggcctcccaggtattcatggtctccagggagataagggagagccaggttattcagaaggtacaaggccaggaccaccgggaccaacgggggatccaggactgccgggtgatatgggaaagaaaggagaaatggggcaacctggcccacctggacatttggggcctgctggacctgagggagcccctggaagtcctggaagtcctggcctcccagttccagcagctccgagtctgtgatcaagctgtcggcagcgttggtttcttgtggggcccctgttcttggcttgtggatggctatcttcttccagtgttttccaagtgtctgaatcttcttttcttataaagacaccactcacattggattagggcccaccctactgacctcattttaatttaattacctgtttaccagccctatccccaaatacagagtcatgttccgaagtactgaaggttaggacttcagcatatgaatttggggacaacacaattcaaactacaacactgtgctgtgactctttttcgaacccatttctggattgaattttggctttctggcttattagcttacaattcaggtttagggttttgttttattaaaaacaactgtgaaactatcgggttgcagattcaggtcttacttaaatacaataaactacctgttcaaatacagaaa

SEQ ID NO: 121436 - DNA, 8097 bp, Homo sapiens
  Payload ID: 3809
  Gene Symbol: COL4A3
  Gene Name: collagen, type IV, alpha 3 (Goodpasture antigen)
  Uniprot ID: Q01955
  ENST ID: ENST00000396578
  CDS Start-End: 163-5175
gggagggacgaaccgcgcgaccgagccctacaaaacccgccccggccgagtggcgaggcgagctttccagccgggctcccagagccgcgctgcgcaggagacgcggtggcctgagagcctgagggtccccggactcgcccaggctctgagcgcgcgcccaccatgagcgcccggaccgcccccaggccgcaggtgctcctgctgccgctcctgctggtgctcctggcggcggcgcccgcagccagcaagggttgtgtctgtaaagacaaaggccagtgcttctgtgacggggccaaaggggagaagggggagaagggctttcctggaccccccggttctcctggccagaaaggattcacaggtcctgaaggcttgcctggaccgcagggacccaagggctttccaggacttccaggactcacgggttccaaaggtgtaaggggaataagtggattgccaggattttctggttctcctggacttccaggcaccccaggcaataccgggccttacggacttgtcggtgtaccaggatgcagtggttctaagggtgagcaggggtttccaggactcccagggacactgggctacccagggatcccgggtgctgctggtttgaaaggacaaaagggtgctcctgctaaagaagaagatatagaacttgatgcaaaaggcgaccccgggttgccaggggctccaggaccccagggtttgccaggccctccaggttttcctgggcctgttggcccacctggtcctccgggattctttggctttccaggagccatgggacctagaggacctaagggtcacatgggtgaaagagtgataggacataaaggagagcggggtgtgaaagggttaacaggacccccgggaccaccaggaacagttattgtgaccctaactggcccagataacagaacggacctcaagggggaaaagggagacaagggagcaatgggcgagcctggacctcctggaccctcaggactgcctggagaatcatatggatctgaaaagggtgctcctggagaccctggcctgcagggaaaacccggaaaagatggtgttcctggcttccctggaagtgagggagtcaagggcaacaggggtttccctgggttaatgggtgaagatggcattaagggacagaaaggggacattggccctccaggatttcgtggtccaacagaatattatgacacataccaggaaaagggagatgaaggcactccaggcccaccagggcccagaggagctcgtggcccacaaggtcccagtggtccccccggagttcctggaagtcctggatcatcaaggcctggcctcagaggagcccctggatggccaggcctgaaaggaagtaaaggggaacgaggccgcccaggaaaggatgccatggggactcctgggtccccaggttgtgctggttcaccaggtcttccaggatcaccgggacctccaggaccgccaggtgacatcgtttttcgcaagggtccacctggagatcacggactgccaggctatctagggtctccaggaatcccaggagttgatgggcccaaaggagaaccaggcctcctgtgtacacagtgcccttatatcccagggcctcccggtctcccaggattgccagggttacatggtgtaaaaggaatcccaggaagacaaggcgcagctggcttgaaaggaagcccagggtccccaggaaatacaggtcttccaggatttccaggtttcccaggtgcccagggtgacccaggacttaaaggagaaaaaggtgaaacacttcagcctgaggggcaagtgggtgtcccaggtgacccggggctcagaggccaacctgggagaaagggcttggatggaattcctggaactccgggagtgaaaggattaccaggacctaaaggcgaactggctctgagtggtgagaaaggggaccaaggtcctccaggggatcctggctcccctgggtccccaggacctgcaggaccagctggaccacctggctacggaccccaaggagaacctggtctccagggcacgcaaggagttcctggagcccccggaccacccggagaagccggccctaggggagagctcagtgtttcaacaccagttccaggcccaccaggacctccagggccccctggccatcctggcccccaaggtccacctggtatccctggatccctggggaaatgtggagatcctggtcttccagggcctgatggtgaaccaggaattccaggaattggatttcctgggcctcctggacctaagggagaccaaggttttccaggtacaaaaggatcactgggttgtcctggaaaaatgggagagcctgggttacctggaaagccaggcctcccaggagccaagggagaaccagcagtagccatgcctggaggaccaggaacaccaggttttccaggagaaagaggcaattctggggaacatggagaaattggactccctggacttccaggtctccctggaactccaggaaatgaagggcttgatggaccacgaggagatccagggcagcctggaccacctggagaacaaggacccccaggaaggtgcatagagggtcccaggggagcccaaggacttccaggcttaaatggattgaaagggcaacaaggcagaagaggtaaaacggggccaaagggagacccaggaattccaggcttggatagatcaggatttcctggagaaactggatcaccaggaattccaggtcatcaaggtgaaatgggaccactgggtcaaagaggatatccaggaaatccgggaattttagggccaccaggtgaagatggagtgattgggatgatgggctttcctggagccattggccctccagggccccctgggaacccaggcacaccagggcagagggggagccctggaattccaggagtaaagggccagagaggaaccccaggagccaagggggaacaaggagataaaggaaatcccgggccttcagagatatcccacgtaataggggacaaaggagaaccaggtctcaaaggattcgcaggaaatccaggtgagaaaggaaacagaggcgttccagggatgccaggtttaaagggcctcaaaggactacccggaccagcaggaccaccaggccccagaggagatttgggcagcactgggaatcctggagaaccaggactgcgtggtataccaggaagcatggggaacatgggcatgccaggttctaaaggaaaaaggggaactttgggattcccaggtcgagcaggaagaccaggcctcccaggtattcatggtctccagggagataagggagagccaggttattcagaaggtacaaggccaggaccaccgggaccaacgggggatccaggactgccgggtgatatgggaaagaaaggagaaatggggcaacctggcccacctggacatttggggcctgctggacctgagggagcccctggaagtcctggaagtcctggcctcccaggaaagccaggtcctcatggtgatttgggttttaaaggaatcaaaggcctcctgggccctccaggaatcagaggccctccaggtcttccaggatttccaggatctcctggaccaatgggtataagaggtgaccaaggacgtgatggaattcctggtccagccggagaaaagggagaaacgggtttattgagggcccctccaggcccaagagggaaccctggtgctcaaggagccaaaggagacaggggagccccaggttttcctggcctcccgggcagaaaaggggccatgggagatgctggacctcgaggacccacaggcatagaaggattcccagggccaccaggtctgcccggtgcaattatccctggccagacaggaaatcgtggtccaccaggctcaagaggaagcccaggtgcgcctggtccccctggacctccagggagtcatgtaataggcataaaaggagacaaagggtctatgggccaccctggcccaaaaggtccacctggaactgcaggagacatgggaccaccaggtcgtctgggagcaccaggtactccaggtcttccaggacccagaggtgatcctggattccaggggtttccaggcgtgaaaggagaaaagggtaatcctggatttctaggatccattggacctccaggaccaattgggccaaaaggaccacctggtgtacgtggagaccctggcacacttaagattatctcccttccaggaagcccagggccacctggcacacctggagaaccagggatgcagggagaacctgggccaccagggccacctggaaacctaggaccctgtgggccaagaggtaagccaggcaaggatggaaaaccaggaactcctggaccagctggagaaaaaggcaacaaaggttctaaaggagagccaggaccagctggatcagatggattgccaggtttgaaaggaaaacgtggagacagtggatcacctgcaacctggacaacgagaggctttgtcttcacccgacacagtcaaaccacagcaattccttcatgtccagaggggacagtgccactctacagtgggttttcttttctttttgtacaaggaaatcaacgagcccacggacaagaccttggaactcttggcagctgcctgcagcgatttaccacaatgccattcttattctgcaatgtcaatgatgtatgtaattttgcatctcgaaatgattattcatactggctgtcaacaccagctctgatgccaatgaacatggctcccattactggcagagcccttgagccttatataagcagatgcactgtttgtgaaggtcctgcgatcgccatagccgttcacagccaaaccactgacattcctccatgtcctcacggctggatttctctctggaaaggattttcattcatcatgttcacaagtgcaggttctgagggcaccgggcaagcactggcctcccctggctcctgcctggaagaattccgagccagcccatttctagaatgtcatggaagaggaacgtgcaactactattcaaattcctacagtttctggctggcttcattaaacccagaaagaatgttcagaaagcctattccatcaactgtgaaagctggggaattagaaaaaataataagtcgctgtcaggtgtgcatgaagaaaagacactgaagctaaaaaagacagcagaactgctatttttcatcctaaagaacaaagtaatgacagaacatgctgttatttaggtatttttctttaaccaaacaatattgctccatgatgacttagtacaaagtttcaatttgtttccccacaaaacaaagcaattctttcaagtcagttctgtgatctgggtctctaatctgtgctgtttcaaagttctctgtggcaaagcagcaactattcacaaaatatcaccaaaaacctattccacttacatccaaggcactgtcactacggtgattgtatgaagtttgaatgctgcaagttatgaaatatttggcccgctggattcccacatttgtcttctttctgtctttaagactcagggaggctaaatcagtgtttgattgccccgccaacccttcctgaaacttcagaccctgggtaggggaagagaagggggcatgtggtatcctggagcattgtgtatagaactggattttcagacctgctgaggaccgtaaggcctgatggaacacagaactgaactgaggttcatggattttccaggactgtttcaaacatgcccattactaacggcaaaagggggattccctgatggaaccataatacccttggaaatactgtatggttttgttttgttttgttggtttttaaagatttttgtttgtttattgaattcatttcactgtagctctaaaatctgcttgtattccaagcatataaaattttcccccttagtgaattagttttaaaatgatattgttatatacatactatgaaatatgtataactttaacttctgttttaccagcatacccacacaaataacaagaatactacttatgaaatgtgcactttatcctcattccataaatgtcggtgcataccttatgtaagggagcagttcaataatccatgaaagaacttaaggcatttgttggtttatcagactcggaatctattttctcattgctctgaatatgtcatcactctaggttttacagatttattcctttgttacttctctaattcttcctttgtaaaaaaaaaaaaaagcaacactttttatgttatatgttgttcttacaaaccatactgaaagagtccattgtttaaaaatcttaatgtatcaaactgtataacttggccgctgtatgtcttaaaacctgcttttcaatgtgttgatacattcccaaggttacttaattcaacttaactatcatcttattcagcaccaagcatgtcccaggcactgtactaacctacagagatgctaagagaaaaaaaagacttgtttctgatctaatatcccagaaaaagtaactcattgctctgttaataatctcacatatacaagtagcttccctcccctctagttttttcttccttttcactgctgttatatttcatcatgataattcagcaggcccaagtaaaggttaaaaataaggtctatgcctagggaaactcagggcttctagtttctcttagaaaagctaagagaagataaggtctgaataatagcagaaaaaccaacatctacaaaacattaaactagtgttatacttgatgataacactatttgatgagtcttagagtccagacacaaagagacaaagctttgaagatgctttttgatctacctaggtggagttggtggtgctgatatttaaattcaggctactgcttcaatctcaattgctttgtaagtgaaaaacatgacccagaggacagcacagactatggccatggctcacatggtttacatccttcactgctcacgtgtttgctgtcaagccatttttacatctaaactaagatgtgcagcatttcacttatttagattcacttaacaaacaaatttttctgctttaaaaatgtcttattgtcccaagtgtactatagcggcatatagagctagctaatctctacaaaccctctgtaggccagtagttctcaaagtgtggtctctggaagagcagtatcagcatcatctgggaacttgtcacagatgcagattctagggaccactccagacctacacaatcagaaactcttgggggagggcccgaaatatctatgttttaccaagcccaccacatgattctgatgtactctaaatactgagaaaacctgttctagacaaatacccaagcaacaactccgcaggcagttaccaagtacggctggctacaactgctccatccgtgcctctttttaaagttcaaactcacaggtgactctaaggttatctacttttactcataagtaaaagccctagactggtgctaatgtcaaaccactggcctccactcaggcctccatcttctcatgccctcttaccagtatttaacttctgaggaagacaagtgatgctaaaacctgaaattccaatgaagccatatgaacagctgttcagttgcacttctaagactttacttagcagtaaattatagctcatgtgcattattttccagataacttagcttatgagtagcttatacaattatgaagatttaatattacagataaaatgtaaactgtttctttaaaattggggcttcaactttggaatttcacagcgtgctaaaataacagatttctcagaagtctttcagcaagataaacattattaagtaacttatttatgaaagtattaaaatgcttacatttgaacttgatggctaacttacaaagattctctatgtatcaaatgtaacttactgcgactaaacttaatttaatatttactctataaccaaatgaaatatatttaaaatatattgaatattttatattgttatatcctgacaagattataatattttaatgtactaatatttctgtaattatatctaaaatattattttattatattgcctaagaataaacatttgttaaattgga

SEQ ID NO: 121437 - DNA, 2262 bp, Homo sapiens
  Payload ID: 3810
  Gene Symbol: COL4A3BP
  Gene Name: collagen, type IV, alpha 3 (Goodpasture antigen) binding protein
  Uniprot ID: Q9Y5P4
  ENST ID: ENST00000261415
  CDS Start-End: 423-2219
aaatagtgggccaggcaggaagatggcggcggtagcggaggtgtgagtggacgcgggactcagcggccggattttctcttcccttcttttcccttttccttccctatttgaaattggcatcgagggggctaagttcgggtggcagcgccgggcgcaacgcaggggtcacggcgacggcggcggcggctgacggctggaagggtaggcttccttcaccgctcgtcctccttcctcgctccgctcggtgtcaggcgcggcggcggcgcggcgggcggacttcgtccctcctcctgctcccccccacaccggagcgggcactcttcgcttcgccatcccccgacccttcaccccgaggactgggcgcctcctccggcgcagctgagggagcgggggccggtctcctgctcggttgtcgagcctccatgtcggataatcagagctggaactcgtcgggctcggaggaggatccagagacggagtctgggccgcctgtggagcgctgcggggtcctcagtaagtggacaaactacattcatgggtggcaggatcgttgggtagttttgaaaaataatgctctgagttactacaaatctgaagatgaaacagagtatggctgcagaggatccatctgtcttagcaaggctgtcatcacacctcacgattttgatgaatgtcgatttgatattagtgtaaatgatagtgtttggtatcttcgtgctcaggatccagatcatagacagcaatggatagatgccattgaacagcacaagactgaatctggatatggatctgaatccagcttgcgtcgacatggctcaatggtgtccctggtgtctggagcaagtggctactctgcaacatccacctcttcattcaagaaaggccacagtttacgtgagaagttggctgaaatggaaacatttagagacatcttatgtagacaagttgacacgctacagaagtactttgatgcctgtgctgatgctgtctctaaggatgaacttcaaagggataaagtggtagaagatgatgaagatgactttcctacaacgcgttctgatggtgacttcttgcatagtaccaacggcaataaagaaaagttatttccacatgtgacaccaaaaggaattaatggtatagactttaaaggggaagcgataacttttaaagcaactactgctggaatccttgcaacactttctcattgtattgaactaatggttaaacgtgaggacagctggcagaagagactggataaggaaactgagaagaaaagaagaacagaggaagcatataaaaatgcaatgacagaacttaagaaaaaatcccactttggaggaccagattatgaagaaggccctaacagtctgattaatgaagaagagttctttgatgctgttgaagctgctcttgacagacaagataaaatagaagaacagtcacagagtgaaaaggtgagattacattggcctacatccttgccctctggagatgccttttcttctgtggggacacatagatttgtccaaaaggttgaagagatggtgcagaaccacatgacttactcattacaggatgtaggcggagatgccaattggcagttggttgtagaagaaggagaaatgaaggtatacagaagagaagtagaagaaaatgggattgttctggatcctttaaaagctacccatgcagttaaaggcgtcacaggacatgaagtctgcaattatttctggaatgttgacgttcgcaatgactgggaaacaactatagaaaactttcatgtggtggaaacattagctgataatgcaatcatcatttatcaaacacacaagagggtgtggcctgcttctcagcgagacgtattatatctttctgtcattcgaaagataccagccttgactgaaaatgaccctgaaacttggatagtttgtaatttttctgtggatcatgacagtgctcctctaaacaaccgatgtgtccgtgccaaaataaatgttgctatgatttgtcaaaccttggtaagcccaccagagggaaaccaggaaattagcagggacaacattctatgcaagattacatatgtagctaatgtgaaccctggaggatgggcaccagcctcagtgttaagggcagtggcaaagcgagagtatcctaaatttctaaaacgttttacttcttacgtccaagaaaaaactgcaggaaagcctattttgttctagtattaacagtgactgaagcaaggctgtgtgacattccatgttg

SEQ ID NO: 121438 - DNA, 886 bp, Homo sapiens
  Payload ID: 3810
  Gene Symbol: COL4A3BP
  Gene Name: collagen, type IV, alpha 3 (Goodpasture antigen) binding protein
  ENST ID: ENST00000357457
  CDS Start-End: 1-704
atagatttgtccaaaaggttgaagagatggtgcagaaccacatgacttactcattacaggatgtaggcggagatgccaattggcagttggttgtagaagaaggagaaatgaaggtatacagaagagaagtagaagaaaatgggattgttctggatcctttaaaagctacccatgcagttaaaggcgtcacaggacatgaagtctgcaattatttctggaatgttgacgttcgcaatgactgggaaacaactatagaaaactttcatgtggtggaaacattagctgataatgcaatcatcatttatcaaacacacaagagggtgtggcctgcttctcagcgagacgtattatatctttctgtcattcgaaagataccagccttgactgaaaatgaccctgaaacttggatagtttgtaatttttctgtggatcatgacagtgctcctctaaacaaccgatgtgtccgtgccaaaataaatgttgctatgatttgtcaaaccttggtaagcccaccagagggaaaccaggaaattagcagggacaacattctatgcaagattacatatgtagctaatgtgaaccctggaggatgggcaccagcctcagtgttaagggcagtggcaaagcgagagtatcctaaatttctaaaacgttttacttcttacgtccaagaaaaaactgcaggaaagcctattttgttctagtattaacagctcagaggatgaaacaggaaactgagtcataaaacactactacaaacaagcccaaggattttatcccagattttcaacccaaggatgagctgcaatataactatcactgttttgttggctgcctgccacagaatgaccactgaggaaataaagcgagctttggattcactgca

SEQ ID NO: 121439 - DNA, 5651 bp, Homo sapiens
  Payload ID: 3810
  Gene Symbol: COL4A3BP
  Gene Name: collagen, type IV, alpha 3 (Goodpasture antigen) binding protein
  Uniprot ID: Q9Y5P4
  ENST ID: ENST00000380494
  CDS Start-End: 295-2553
agatgctcccgggctttcgacaagccgccctggaaagcaggcccgtcatcttcagcggaaagctctctcacgtctgggcccgcaagcccggagggttcgtcataaacacacaaggcaaggatagaagcgaggccgaggggctggtcacgcaactgtcaaacgaagcccacccaccgactgacaaggccccaaggggacaagcgatccccgcgcgggatactcacccgttacctcaggatcgcgactacaactcccaggaggctgcgcgagcgacggaccaacgcccttcccagaatgcagcacagctgcatccctaccccgccctctcctttctccgctcctcctgcttttctacccgtcgtcacccgggagagccggagggggctaagttcgggtggcagcgccgggcgcaacgcaggggtcacggcgacggcggcggcggctgacggctggaagggtaggcttccttcaccgctcgtcctccttcctcgctccgctcggtgtcaggcgcggcggcggcgcggcgggcggacttcgtccctcctcctgctcccccccacaccggagcgggcactcttcgcttcgccatcccccgacccttcaccccgaggactgggcgcctcctccggcgcagctgagggagcgggggccggtctcctgctcggttgtcgagcctccatgtcggataatcagagctggaactcgtcgggctcggaggaggatccagagacggagtctgggccgcctgtggagcgctgcggggtcctcagtaagtggacaaactacattcatgggtggcaggatcgttgggtagttttgaaaaataatgctctgagttactacaaatctgaagatgaaacagagtatggctgcagaggatccatctgtcttagcaaggctgtcatcacacctcacgattttgatgaatgtcgatttgatattagtgtaaatgatagtgtttggtatcttcgtgctcaggatccagatcatagacagcaatggatagatgccattgaacagcacaagactgaatctggatatggatctgaatccagcttgcgtcgacatggctcaatggtgtccctggtgtctggagcaagtggctactctgcaacatccacctcttcattcaagaaaggccacagtttacgtgagaagttggctgaaatggaaacatttagagacatcttatgtagacaagttgacacgctacagaagtactttgatgcctgtgctgatgctgtctctaaggatgaacttcaaagggataaagtggtagaagatgatgaagatgactttcctacaacgcgttctgatggtgacttcttgcatagtaccaacggcaataaagaaaagttatttccacatgtgacaccaaaaggaattaatggtatagactttaaaggggaagcgataacttttaaagcaactactgctggaatccttgcaacactttctcattgtattgaactaatggttaaacgtgaggacagctggcagaagagactggataaggaaactgagaagaaaagaagaacagaggaagcatataaaaatgcaatgacagaacttaagaaaaaatcccactttggaggaccagattatgaagaaggccctaacagtctgattaatgaagaagagttctttgatgctgttgaagctgctcttgacagacaagataaaatagaagaacagtcacagagtgaaaaggtgagattacattggcctacatccttgccctctggagatgccttttcttctgtggggacacatagatttgtccaaaagccctatagtcgctcttcctccatgtcttccattgatctagtcagtgcctctgatgatgttcacagattcagctcccaggttgaagagatggtgcagaaccacatgacttactcattacaggatgtaggcggagatgccaattggcagttggttgtagaagaaggagaaatgaaggtatacagaagagaagtagaagaaaatgggattgttctggatcctttaaaagctacccatgcagttaaaggcgtcacaggacatgaagtctgcaattatttctggaatgttgacgttcgcaatgactgggaaacaactatagaaaactttcatgtggtggaaacattagctgataatgcaatcatcatttatcaaacacacaagagggtgtggcctgcttctcagcgagacgtattatatctttctgtcattcgaaagataccagccttgactgaaaatgaccctgaaacttggatagtttgtaatttttctgtggatcatgacagtgctcctctaaacaaccgatgtgtccgtgccaaaataaatgttgctatgatttgtcaaaccttggtaagcccaccagagggaaaccaggaaattagcagggacaacattctatgcaagattacatatgtagctaatgtgaaccctggaggatgggcaccagcctcagtgttaagggcagtggcaaagcgagagtatcctaaatttctaaaacgttttacttcttacgtccaagaaaaaactgcaggaaagcctattttgttctagtattaacagtgactgaagcaaggctgtgtgacattccatgttggagaaaaaaagaaaaaaaaaagctgaatgctctaagctggaacgtaggatctatagccttgtctgtggcccaagaccttggccttgtgtacaaaaatgacaaaatattgcaatagcaaagctgaacatctaacactagctatctcttgctagatctccttgctcagcatataactataaatacatgtaaaattacatgtatatggctatatttttatttgcttgctcctagaagagaaaaaaaaatcaactttgaatcacaactaggaattgatgctttaatttttggatactttttcagaatttttaatttactatggtccggcctaagatcctctgttgtatcaggttttgtgcacaaaagaaaagcacaaaagttgaatgcacatggggcatgtgctttctgtgcaccaaatatctggatgaggttcttttttcaggcctacagtcaaatctgtgtccagaattttttgacttttttgctttgtataatcatagaattcattgctgctgatttctataatgattcatgttgtcatgtgtctcttaataactgagggctgtcagtaacctgtgattttgccttttctatagtcttactcccatgaagaaccttggttctgatggagaaagtgaaaagctttatttcttcccctagatatctttatatttctattatattttttagttgtgtactgtgtactagagatttttttcagtttgttatgaacacaatttggtaagccctaaattggttctgcctgtctccaaacagaaacatctgtacaaatcttgttggtatagactactttctggaaaatggtcaagataagttcatgttttcttgaaatttctaagatagtatatggtatcacttgtttaaagcaaatcagactgagtttgacatttaattcaatatttctggtattcagtaacgggtatatatgtttgttcttccagtttgggtcagtttaaaagatatgttgcaaagtatacatagaaaatgtgagcaatgcctctctttgccttttgatcagaaacttcagcagagcggtaaggattccacatgatttaaactgaaatgcttttctttgttgctgtaagaacttaaaatgtaaaatacctttttcagtttaagtcctgtaaacaacattgaagcatggagatgaggcaaggaatagtactcactgaagttgaaatgactgcccacttcaaaatcttcattgtgtttacacaccagtgtatttatacaaatcagaggcattttgtagatgctttgctgacttgttcagctctgtaaaaacacagaaatcagacccattttgtaaagcggaaaatcatgttacatggaacatgtcctgtatatatcacatacatggtaatggagtcttaatgataagtgcaagataataatttaatgatgggattagtctgatcgcttaatatgcacaatcctggaagtgaattacttgcatcagatatagtgatatttattattctgtacagagagaaaaatacatataaaacatatgcttacattacatgcacgcggatttcatgctccataatcttttctattttttaatttacctttctgtaaatgatgtgcatggaatatgccttatagaaaaatgctgttcataatttgactacgtggaaaagtgcctatatggtggtaatgctagtaaggcaaataagacaaattatcatgttggtttactacatcaccagttaacattttatattgtgatgtttaaaaaagaaaaatttatacctcaaatgtgtattttattttacaatcagctgtggggtatggggttgggatgggagaatgggggggttggggagggcaggtttattcaccatagccgctgataagaatcttcaaaaaaattctatatgcgcactataaatgtttctctgtttgccatttctggtaactatcatgaacacagacagttaactctttcataactgaattggatagctttattttacagaagtatggcaagtttacaaagcaatatctaaatctaattatcattagttgcatttggactaaatgtgatgatatacttttgcaattgattctgtaaataaaaggattacactaaaatatttgtattaaaagaagaaaagataacattttacctttagataactgcacttgtacctcactagagttaatcccacccaatcagattgagaaataaattggggaatgtggaaagagtccaaaagaggtcagaatttggagaggtactggccttctggacaacatttagaccctctacaattattttcattaagctgattcctacatcctgaatattcatgttttctcatctacagatatttgtcttcccccaaactaaaagaaaaaaaactaccctttactctcttttctactcagttactcttttgtgctatgttagaaacttgaaatatattggtgatgtggggattttgtccctgactgcccactgtacaggacaagagagtacagtgtttcagttggaattcaggactcctggttttgaggtagaggatgatcactgcagtacttggtttggaattgccacaggggtagctaaaccaaaggagggttatatctgcaagggaggtgtaagaaggcaaaataaggaaaaggaggaatgggttttctatttgttcagtttcatcaactaatttatacacttaatacaacttcagtgtcaattgctattaagaaatttttagttgggctgagctggttctcttgtgaaattgtgctggttatctttaagcttatcagttatttgtccaattaaacacttttcaccagtatttagtccgagttgtacagacgatgtatttggattttgtcatggttcatctacagactcaaaacataatcattttaaagtaccttgggagtgtgtagagtaacttctataatagctttatgatcctgatgatgttttttaaacacaataaagttggatcttccatgttacaatcacagaattaaaaccagtatttaaagtggaaaagtattaaaatattatggacaaata

SEQ ID NO: 121440 - DNA, 2843 bp, Homo sapiens
  Payload ID: 3810
  Gene Symbol: COL4A3BP
  Gene Name: collagen, type IV, alpha 3 (Goodpasture antigen) binding protein
  Uniprot ID: Q9Y5P4
  ENST ID: ENST00000405807
  CDS Start-End: 423-2297
aaatagtgggccaggcaggaagatggcggcggtagcggaggtgtgagtggacgcgggactcagcggccggattttctcttcccttcttttcccttttccttccctatttgaaattggcatcgagggggctaagttcgggtggcagcgccgggcgcaacgcaggggtcacggcgacggcggcggcggctgacggctggaagggtaggcttccttcaccgctcgtcctccttcctcgctccgctcggtgtcaggcgcggcggcggcgcggcgggcggacttcgtccctcctcctgctcccccccacaccggagcgggcactcttcgcttcgccatcccccgacccttcaccccgaggactgggcgcctcctccggcgcagctgagggagcgggggccggtctcctgctcggttgtcgagcctccatgtcggataatcagagctggaactcgtcgggctcggaggaggatccagagacggagtctgggccgcctgtggagcgctgcggggtcctcagtaagtggacaaactacattcatgggtggcaggatcgttgggtagttttgaaaaataatgctctgagttactacaaatctgaagatgaaacagagtatggctgcagaggatccatctgtcttagcaaggctgtcatcacacctcacgattttgatgaatgtcgatttgatattagtgtaaatgatagtgtttggtatcttcgtgctcaggatccagatcatagacagcaatggatagatgccattgaacagcacaagactgaatctggatatggatctgaatccagcttgcgtcgacatggctcaatggtgtccctggtgtctggagcaagtggctactctgcaacatccacctcttcattcaagaaaggccacagtttacgtgagaagttggctgaaatggaaacatttagagacatcttatgtagacaagttgacacgctacagaagtactttgatgcctgtgctgatgctgtctctaaggatgaacttcaaagggataaagtggtagaagatgatgaagatgactttcctacaacgcgttctgatggtgacttcttgcatagtaccaacggcaataaagaaaagttatttccacatgtgacaccaaaaggaattaatggtatagactttaaaggggaagcgataacttttaaagcaactactgctggaatccttgcaacactttctcattgtattgaactaatggttaaacgtgaggacagctggcagaagagactggataaggaaactgagaagaaaagaagaacagaggaagcatataaaaatgcaatgacagaacttaagaaaaaatcccactttggaggaccagattatgaagaaggccctaacagtctgattaatgaagaagagttctttgatgctgttgaagctgctcttgacagacaagataaaatagaagaacagtcacagagtgaaaaggtgagattacattggcctacatccttgccctctggagatgccttttcttctgtggggacacatagatttgtccaaaagccctatagtcgctcttcctccatgtcttccattgatctagtcagtgcctctgatgatgttcacagattcagctcccaggttgaagagatggtgcagaaccacatgacttactcattacaggatgtaggcggagatgccaattggcagttggttgtagaagaaggagaaatgaaggtatacagaagagaagtagaagaaaatgggattgttctggatcctttaaaagctacccatgcagttaaaggcgtcacaggacatgaagtctgcaattatttctggaatgttgacgttcgcaatgactgggaaacaactatagaaaactttcatgtggtggaaacattagctgataatgcaatcatcatttatcaaacacacaagagggtgtggcctgcttctcagcgagacgtattatatctttctgtcattcgaaagataccagccttgactgaaaatgaccctgaaacttggatagtttgtaatttttctgtggatcatgacagtgctcctctaaacaaccgatgtgtccgtgccaaaataaatgttgctatgatttgtcaaaccttggtaagcccaccagagggaaaccaggaaattagcagggacaacattctatgcaagattacatatgtagctaatgtgaaccctggaggatgggcaccagcctcagtgttaagggcagtggcaaagcgagagtatcctaaatttctaaaacgttttacttcttacgtccaagaaaaaactgcaggaaagcctattttgttctagtattaacagtgactgaagcaaggctgtgtgacattccatgttggagaaaaaaagaaaaaaaaaagctgaatgctctaagctggaacgtaggatctatagccttgtctgtggcccaagaccttggccttgtgtacaaaaatgacaaaatattgcaatagcaaagctgaacatctaacactagctatctcttgctagatctccttgctcagcatataactataaatacatgtaaaattacatgtatatggctatatttttatttgcttgctcctagaagagaaaaaaaaatcaactttgaatcacaactaggaattgatgctttaatttttggatactttttcagaatttttaatttactatggtccggcctaagatcctctgttgtatcaggttttgtgcacaaaagaaaagcacaaaagttgaatgcacatggggcatgtgctttctgtgcaccaaatatctggatgaggttcttttttcaggcctacagtcaaatctgtgtccagaattttttgacttttttgctttgtataatcatagaattca

SEQ ID NO: 121441 - DNA, 693 bp, Homo sapiens
  Payload ID: 3810
  Gene Symbol: COL4A3BP
  Gene Name: collagen, type IV, alpha 3 (Goodpasture antigen) binding protein
  ENST ID: ENST00000508809
  CDS Start-End: 1-379
gcctgcttctcagcgagacgtattatatctttctgtcattcgaaagataccagccttgactgaaaatgaccctgaaacttggatagtttgtaatttttctgtggatcatgacagtgctcctctaaacaaccgatgtgtccgtgccaaaataaatgttgctatgatttgtcaaaccttggtaagcccaccagagggaaaccaggaaattagcagggacaacattctatgcaagattacatatgtagctaatgtgaaccctggaggatgggcaccagcctcagtgttaagggcagtggcaaagcgagagtatcctaaatttctaaaacgttttacttcttacgtccaagaaaaaactgcaggaaagcctattttgttctagtattaacaggtactagaagatatgttttatctttttttaactttatttgactaatatgactgtcaatactaaaatttagttgttgaaagtatttactatgttttttgatgttcccctatagagtattgtttcgttggtttttgttgttgtcgttgttgttgttttaaacagggtcttgctctgtttcctaagctgaagtgcaatgacaccatcacggctcactgcaacctcaacctctggcctcaaacaatcctctcatctcagccttcccagtagctgggagtccccacaggcatgtgccaccatgctcagct

SEQ ID NO: 121442 - DNA, 9895 bp, Homo sapiens
  Payload ID: 3811
  Gene Symbol: COL4A4
  Gene Name: collagen, type IV, alpha 4
  Uniprot ID: P53420
  ENST ID: ENST00000396625
  CDS Start-End: 209-5281
cgagagcgccgcgaagaggcagcggggcgcgggtggattggggctggaggtgcgcgtcccgtggggtggcaaggcggcagctcctggcgctgcgggcgtccccacaggaacagactttgacccagaacacagaacctcacttgtcaacaagaaccttctggaagagaagactggcagaatattttttaagtactaagacttgcctgcgatgtggtctctgcacatagtactaatgaggtgctccttcagattgaccaagtccttggccacaggtccctggtcacttatactcattctcttttctgtacaatatgtatatgggagtggaaagaaatacattggtccttgtggaggaagagattgctctgtttgccactgtgttcctgaaaaggggtctcggggtccaccaggaccaccagggccacagggtccaattggacccctgggagccccaggacccattgggctttcaggagagaaaggaatgagaggggaccgcggccctcctggagcagcaggggacaaaggagataagggtccaactggtgttcctggatttccaggtttagatggcatacctgggcacccagggcctcctggacccagaggcaaacctggtatgagtggccacaatggctcaagaggtgacccagggtttccaggaggaagaggagctcttggcccaggaggccccctaggccatcctggggaaaagggagaaaaaggaaattcagtgttcattttaggtgccgttaaaggtattcagggagacagaggggacccaggactgcctggcttaccaggatcttggggtgcaggaggaccggcaggtcccacaggatatcctggagagccagggttagtgggacctccgggccaaccagggcgtccaggtttgaagggaaatcccggtgtgggagtaaaggggcaaatgggagacccgggtgaggttggtcagcaaggttctcctggacccaccctgttggtagagccacctgacttttgtctctataaaggagaaaagggtataaaaggaattcctggaatggttggactgccaggaccaccaggacgcaagggagaatctggtattggggcaaaaggagaaaaaggtattcctggatttccagggcctcggggggatcctggttcctatggatctccaggttttccaggattaaagggagaactaggactggttggagatcctgggctatttggattaattggcccaaagggggatcctggaaatcgagggcacccaggaccaccaggtgttttggtgactccacctcttccactcaaaggcccaccaggggacccagggttccctggccgctatggagaaacaggggatgttggaccacctggtcccccaggtctcttgggcagaccaggggaagcctgtgcaggcatgataggaccccctgggccacaaggatttcctggtcttcctgggcttccaggagaagctggtattcctgggagacctgattctgctccaggaaaaccagggaagccaggatcacctggcttgcctggagcaccaggcctgcagggcctcccaggatcaagtgtgatatactgtagtgttgggaaccccggaccacaaggaataaaaggcaaagttggtcccccaggaggaagaggcccaaaaggagaaaaaggaaatgaaggactctgtgcctgtgagcctggacccatgggcccccctggccctccaggacttcctgggaggcaggggagtaagggagacttggggctccctggctggcttggaacaaaaggtgacccaggacctcctggtgctgaaggacctccagggctaccaggaaagcatggtgcctctggaccacctggcaacaaaggggcgaagggtgacatggttgtatcaagagttaaagggcacaaaggagaaagaggtcctgatgggcccccaggatttccagggcagccaggatcacatggtcgggatggacatgctggagaaaaaggggatccaggacctccaggggatcatgaagatgcgaccccaggtggtaaaggatttcctggacctctgggccccccaggcaaagcaggacctgtggggcccccaggactgggatttcctggtccaccaggagagcgaggccacccaggagttccaggccacccaggtgtgaggggccctgatggcttgaagggtcagaaaggtgacacaatttcttgcaacgtaacctaccctgggaggcatggccctccaggttttgatggacctccaggtccgaagggatttccaggtccccaaggtgcccctgggctgagtggttcagatgggcataaaggcagacctggcacaccaggaacagcggaaataccaggtccacctggttttcgtggtgacatgggagatccgggttttggaggtgaaaaggggtcctcccctgttgggcccccaggccctcccggctcaccaggagtgaatggtcagaaaggaatcccgggagaccctgcatttggtcacctgggacccccgggaaagaggggtctttcaggagtgccagggataaaaggacccagaggtgatccgggatgtccaggggctgaagggccagctggcattcctggattcctaggtctcaaaggtcccaaaggcagagagggacatgctgggtttccaggtgtcccaggtccacctggccattcctgtgaaagaggtgctccagggataccagggcaaccgggactccctgggtatccaggtagcccaggtgctccaggtgggaaaggacagccgggagatgtggggcctcccgggccagctggaatgaaaggcctccccggactcccaggacggcctggggcacatggtcccccaggcctcccaggaatcccaggtccctttggagatgatgggctacctggtcctccaggtccaaagggaccccgggggctgcctggtttcccaggttttcccggagaaagaggaaagcctggtgcagagggatgtcctggcgcaaagggagaacctggagagaagggcatgtctggccttcctggagaccggggactgagaggggccaaaggagccataggacctcccggagatgaaggagaaatggctatcatttcacaaaagggaacacctggggaacctggacctcctggagatgatggattcccaggagaaagaggtgataaaggaactcccgggatgcaagggagaagaggagagccgggaagatacggaccacctggatttcacagaggggaacctggtgagaaaggtcagccagggcctcctggacccccaggccctccaggctcaactggtctaagagggttcattggttttccaggacttccaggtgaccagggtgagccaggttctccaggtccccctggattttcaggaattgatggagcaagaggacctaaaggaaacaaaggtgaccctgccagtcactttggtccacctggtccaaagggtgagccaggtagccctggatgtccagggcattttggagcatccggagagcagggcttgcctggtattcaagggcccagaggatcacctggaaggccagggccacctggctcctctggaccaccagggtgcccaggtgatcacgggatgcctgggctgaggggacagccaggagaaatgggagaccctgggccaagaggcctccagggggatccagggataccaggtcctccgggaataaaaggtccctccggatcacctggcctgaacggcttgcatggattgaaaggtcagaaaggaactaaaggtgcttcaggtttgcatgatgtggggccacctggtccagtgggaatacctgggctaaaaggggagagaggagaccctgggagcccaggaatctctcctccaggtcctcgtggaaagaaaggtcccccaggacccccagggagttcaggaccacctggtcctgcaggtgccacaggaagagctcctaaggacattcctgacccgggtccacctggagatcagggacctcctggtcctgatggcccaagaggagcacctgggcctccaggcctccctgggagtgttgaccttctgagaggggagccaggtgactgtggtctaccagggccaccaggtccccctggcccaccaggccctccaggatacaaaggctttccaggatgtgatggaaaagatggccagaaaggaccagtgggattcccgggaccgcagggaccacatggatttcctgggccacctggagagaagggtttacctggacctccagggagaaaagggcccactggtcttccgggtcccagaggtgaaccggggccacctgcagatgtggatgactgtccccgaatcccaggccttcctggggcgccaggcatgagaggaccagaaggagccatggggctccctggaatgagaggcccctcaggaccagggtgcaaaggagagcctgggctggatggcaggaggggtgtggatggcgtccctgggtctcctgggcctcccggacgtaaaggtgacacaggagaagacggctaccctggaggaccagggcctcctggtcccattggggatcctgggcccaaagggtttggccctggatacctcggtggcttcctcctggttctccacagtcagacggaccaggagcccacctgccccctgggcatgcccaggctctggactgggtatagtctgttatacctggaagggcaagagaaagctcacaatcaagaccttggtctggcagggtcttgccttcccgtatttagcacgctgccctttgcctactgcaacatccaccaggtgtgccactatgcccagagaaacgacagatcctactggctggccagcgctgcgcccctccccatgatgccactctctgaagaggcgatccgcccctatgtcagccgctgtgcggtatgcgaggccccggcccaggcggtggcggtgcacagccaggaccagtccatccccccatgtccgcagacctggaggagcctctggatcgggtattcattcctgatgcacacaggagctggggaccaaggaggagggcaggcccttatgtcacctggcagctgcctggaagatttcagagcagcaccattccttgaatgccagggccggcagggaacttgccactttttcgcaaataagtatagcttctggctcacaacggtgaaagcagacttgcagttttcctctgctccagcaccagacaccttaaaagaaagccaggcccaacgccagaaaatcagccggtgccaggtctgcgtgaagtatagctagagaatgcgaaattcaccaacacgtggccaagagaaacttcctagggggctaagacttcctagactgtgctaagagatgtcatggtgctcattttggactccctttcagtggttccttctgttttgtcgtggttattcccagagtcctctggttccttacacattaagcaaatgctgcacagatggatttgtttggacctcccaatctagggagcctagatactcttattttactgaggatgatcgaagaactggctttacttaaaaatatgctaattctcagaaaggcaagtagatgataaaggccagattacaaattacattactgaaaacttcattcttgggttaacagtatctcaaacaattgaagtcaattactctataatacagtgggcttctggatggattttataggaaaaaataaacaggtcaatgaatgaaactagaaagcagagattttcaacatttcaaaatgatttcctctgtaatctatttttccatatactttaaataatggtaaaaccatgacgcaaagagagatttttttttaaagaagaaaaaaaaaaattcacactgccagcgttaacagttcctttcaaaggagaatgaatcatgatggcaggaaggcccacagtcgccgtattccagagatgcgacattagcataaacacatcacagatgaatataaaacattatgttctcttctgcatttttcagagaatagaaatgcctactttggcaacccttttgaaaagtagcaattatggaaaaaaaatattcaataagagattaggagcctaaaagctattagtgaatattaaggtagttattcacaaaaattgactccccattgcagtgaacttccagacagactgcttttccccagtcggggtccggcgtgtcacaggtgcgtgcgtgctaatgggactgacgctacatggggctcactcaggcaggcacgcgcttcatacaaagcatctcactcccctccccaggagagcctgcacagcttcttgcactcacaacggacactttgctccacacacataatggcagctcacacagggacgtgacagagctatcattatgcacttgggagaaaattaagggccgatttaattaaacttaggtaagaagattcatttaagtcagggttaccccatcaggaggacatggcactatctttaaacgaaacaaagacaatttataatttgaattttatgctcccgtggttggctgttacaggagcatcccattttgccaattttaaagacattcttatatttcatatcagtcttgtaccaaggcaacagtttgacatttggcattagtattttctaaaaaagtttagaatgtgtgtcaatttataatgattatttttttctgtaaagcaaaagatccctttttctgttttgctaggaatttggtgatctaatcctaaatttaaaagatttgttggaaaaaatttttaggaaactcaccttcctcatctaaaagaaaaaggcattttagagaaaactaaagaaatttctcatgagcgtgacactcattttagtgctttgtttccgtgcacttaaaaataattgagaagaaaaactcaattaaaattttgtttataagaaatgttttccttgccaaaccttgatttgtaatgagctcttatatgcagaacacatttcaaatgagttttgctatgggctgcccccagggtggcaatttattttaagagtattttctggtaaaaagaaaaatgtgtattttaagatgaaatattttcttgatgtagcagaatatttcctagttcatttgacccatttgatattttttaaaccatgctctggcatgttgaatatttttgtgcacctaaaacttaagccaatttcaatcttatttgtgattacctttctccttcccaaaaagctttatctattaccaaaagtcaaccctcctaaaagttcaacctgttcatcttgaacttggcctgagaacattttctgggaagaggtaagggtgacaaatggaacatcagaaacgtatcttgcttgctaattattttaaacactttaatgttggtattagaatattatcttcataagttaataaataagtaaaaaaaaaaaacccacacaaagacaggctaaattatgtagacagtttactccacagtgagcttgggaaggtatcagactgttcaaaatgttagtattacaagagctgtctctaaatgcagcattaacactgccctctaattttacaaaagtattttaaaggatcaaaagggcggaaaaataacttcttggaatagaagatcctgttaccttaaaccattattttcttcacctggttatatatcaatgtgccttcaattaccctttctctgtggaggtgatgaacaaagcttttaagttgttctcctaacccattattggagatgatccttatcaaacccttctctccctgcctccccaccaaccttgtagactggaacgtgcctagattgccctaatgggaactgttctgttctgtgcccgtgctggaaatctgggatgcttccttctgggttctgattctcagtgagtggagcccattcatccaggcaggtttccatgctatgagtggccctttcgttctgctctcacactccccacattgaaagctgagtcatcgctgctttggatggctacctcctctttagccccgtgcccgtctcacacagcctttgttttccacctccacccttgcagtaggcatctcccagttggtgccttagtttcaaatcccagttgccatctaagatccacccaaacttgattttgtcaccctctggattagaatccttctgtgactccgctgcccatgaagtccaaatgacttcctatggggtgaaaggtccagtggggactgttcgagggttccctctaggagtatttcctgtcatgatgaactgtgtgcagctctgcagacactcccagcacctcttcgactttgctcctgcttcaccagtgatgtcctccctggggtcagtttaccctgcgtgggaggtgaattccctgggggaaacttaggctcccttctgctgctcttgtgcagtgcacggggctgtcctcattttctccgttccccattgcttctttaatgtctcagtgcacttccttcattccattgccaaaatgcaagccccttgagggcagggaccatgcttgactcgtttttgtatgcctaatgcctagcacagagttgaacacattactgccaattcatttttttcaatgacaattccataaacatcattaggcattaggtgttcagctctgcatataaggtcttcatcagcaagacggttacaagtataaaccatttcctatttcagaatattttaatattcaacatatttgtatacccacattctcttgttacaattattgccagaaagccaattgataagctttcaaaatgggcttatcacacccctccaaaaatagatttttgttttttctataaacagaaatttcagaaatgagatttgagagatccgactgagaagacccttcagtaaaatgtgacatgacttaccttatgctgtaatctgtattccctcaggatttaagagcttcctagcataaaatctttgctaaacgtttgtgtacatgttattggtgctccgaaaaatagtcaatggaatggtgcactacaattgggctttatcatcttattttgaacctcgtgtagattacagtaaagcaaaccattcagtgtgttccaggaaattatattagatctgtgtttctatcagctcactggaataatctgataattgttacttttacttggtatggctgcaagaatagtggaaagaagaggacttgagagttggtcgaacccaggtttgaaatctggcttagtcatttttcagctgttatcctgggtgagttttgccaactttcttagcttcatttccctcattaatacggtgggacataacagctactcttgcattgaaaattaagttagattacctgtctagcatacccatcatcatacacttactatggtcacattttgtatttaaaataaactaatacgaaaaatatttctttttttttacacagaattatgattctcacagggtatataaattactgattagaattatttatatgtggccaattcttaatgtcattgggaatgctgtttcatttcaatcctcaaagttactgtagcacagaaaatatcacaatttcctgcagggacattatcagtaagttctgcagggaacaaacaattgacattaaaaatcagtactctgcaattgtcactgttatcatctgctagaaactctgcataatgcattttaaaccaccaaggctggctgccacatccatgtgaaatgcttgaattttatggtgcttaaatatttaatgattcatgggaaaaatgtgaaatgtgtctaataaattgcatccctttctctaacctctggttgtaaagttaaagactttcagcatgtaacttttgcaagatgcctggtctgccattggcacttaaatatttgttgtattacgatttataatatggttcattatatataaaattctgtgatgacttccaaaaacaa

SEQ ID NO: 121443 - DNA, 6483 bp, Homo sapiens
  Payload ID: 3812
  Gene Symbol: COL4A5
  Gene Name: collagen, type IV, alpha 5
  Uniprot ID: P29400
  ENST ID: ENST00000328300
  CDS Start-End: 245-5320
agaagggaaaagttctcctgagagaccggctttggggaggggaggggggaaggaagagtagctccttcttcttcttcttttttttttcttccactcttaaaaagcttctttctcttcacccaagcctcactgtccctctccggctctagctctctccatataaaccctcaagattatgtcaattggttagagccagccgggaatttcgtgcgggtgctgaaggagctgcgggagccggagaagaatgaaactgcgtggagtcagcctggctgccggcttgttcttactggccctgagtctttgggggcagcctgcagaggctgcggcttgctatgggtgttctccaggatcaaagtgtgactgcagtggcataaaaggggaaaagggagagagagggtttccaggtttggaaggacacccaggattgcctggatttccaggtccagaagggcctccggggcctcggggacaaaagggtgatgatggaattccagggccaccaggaccaaaaggaatcagaggtcctcctggacttcctggatttccagggacaccaggtcttcctggaatgccaggccacgatggggccccaggacctcaaggtattcccggatgcaatggaaccaagggagaacgtggatttccaggcagtcccggttttcctggtttacagggtcctccaggaccccctgggatcccaggtatgaagggtgaaccaggtagtataattatgtcatcactgccaggaccaaagggtaatccaggatatccaggtcctcctggaatacaaggcctacctggtcccactggtataccagggccaattggtcccccaggaccaccaggtttgatgggccctcctggtccaccaggacttccaggacctaaggggaatatgggcttaaatttccagggacccaaaggtgaaaaaggtgagcaaggtcttcagggcccacctgggccacctgggcagatcagtgaacagaaaagaccaattgatgtagagtttcagaaaggagatcagggacttcctggtgaccgagggcctcctggacctccagggatacgtggtcctccaggtcccccaggtggtgagaaaggtgagaagggtgagcaaggagagccaggcaaaagaggtaaaccaggcaaagatggagaaaatggccaaccaggaattcctggtttgcctggtgatcctggttaccctggtgaacccggaagggatggtgaaaagggccaaaaaggtgacactggcccacctggacctcctggacttgtaattcctagacctgggactggtataactataggagaaaaaggaaacattgggttgcctgggttgcctggagaaaaaggagagcgaggatttcctggaatacagggtccacctggccttcctggacctccaggggctgcagttatgggtcctcctggccctcctggatttcctggagaaaggggtcagaaaggtgatgaaggaccacctggaatttccattcctggacctcctggacttgacggacagcctggggctcctgggcttccagggcctcctggccctgctggccctcacattcctcctagtgatgagatatgtgaaccaggccctccaggccccccaggatctccaggtgataaaggactccaaggagaacaaggagtgaaaggtgacaaaggtgacacttgcttcaactgcattggaactggtatttcagggcctccaggtcaacctggtttgccaggtctcccaggtcctccaggatctcttggtttccctggacagaaaggggaaaaaggacaagctggtgcaactggtcccaaaggattaccaggcattccaggagctccaggtgctccaggctttcctggatctaaaggtgaacctggtgatatcctcacttttccaggaatgaagggtgacaaaggagagttgggttcccctggagctccagggcttcctggtttacctggcactcctggacaggatggattgccagggcttcctggcccgaaaggagagcctggtggaattacttttaagggtgaaagaggtccccctgggaacccaggtttaccaggcctcccagggaatatagggcctatgggtccccctggtttcggccctccaggcccagtaggtgaaaaaggcatacaaggtgtggcaggaaatccaggccagccaggaataccaggtcctaaaggggatccaggtcagactataacccagccggggaagcctggcttgcctggtaacccaggcagagatggtgatgtaggtcttccaggtgaccctggacttccagggcaaccaggcttgccagggatacctggtagcaaaggagaaccaggtatccctggaattgggcttcctggaccacctggtcccaaaggctttcctggaattccaggacctccaggagcacctgggacacctggaagaattggtctagaaggccctcctgggccacccggctttccaggaccaaagggtgaaccaggatttgcattacctgggccacctgggccaccaggacttccaggtttcaaaggagcacttggtccaaaaggtgatcgtggtttcccaggacctccgggtcctccaggacgcactggcttagatgggctccctggaccaaaaggtgatgttggaccaaatggacaacctggaccaatgggacctcctgggctgccaggaataggtgttcagggaccaccaggaccaccagggattcctgggccaataggtcaacctggtttacatggaataccaggagagaagggggatccaggacctcctggacttgatgttccaggacccccaggtgaaagaggcagtccagggatccccggagcacctggtcctataggacctccaggatcaccagggcttccaggaaaagcaggtgcctctggatttccaggtaccaaaggtgaaatgggtatgatgggacctccaggcccaccaggacctttgggaattcctggcaggagtggtgtacctggtcttaaaggtgatgatggcttgcagggtcagccaggacttcctggccctacaggagaaaaaggtagtaaaggagagcctggccttccaggccctcctggaccaatggatccaaatcttctgggctcaaaaggagagaagggggaacctggcttaccaggtatacctggagtttcagggccaaaaggttatcagggtttgcctggagacccagggcaacctggactgagtggacaacctggattaccaggaccaccaggtcccaaaggtaaccctggtctccctggacagccaggtcttataggacctcctggacttaaaggaaccatcggtgatatgggttttccagggcctcagggtgtggaagggcctcctggaccttctggagttcctggacaacctggctccccaggattacctggacagaaaggcgacaaaggtgatcctggtatttcaagcattggtcttccaggtcttcctggtccaaagggtgagcctggtctgcctggatacccagggaaccctggtatcaaaggttctgtgggagatcctggtttgcccggattaccaggaacccctggagcaaaaggacaaccaggccttcctggattcccaggaaccccaggccctcctggaccaaaaggtattagtggccctcctgggaaccccggccttccaggagaacctggtcctgtaggtggtggaggtcatcctgggcaaccagggcctccaggcgaaaaaggcaaacccggtcaagatggtattcctggaccagctggacagaagggtgaaccaggtcaaccaggctttggaaacccaggaccccctggacttccaggactttctggccaaaagggtgatggaggattacctgggattccaggaaatcctggccttccaggtccaaagggcgaaccaggctttcacggtttccctggtgtgcagggtcccccaggccctcctggttctccgggtccagctctggaaggacctaaaggcaaccctgggccccaaggtcctcctgggagaccaggtcctacaggttttcaaggtctaccaggtccagaaggtcctccaggtctccctggaaatggaggtattaaaggagagaagggaaatccaggccaacctgggctacctggcttgcctggtttgaaaggagatcaaggaccaccaggactccagggtaatcctggccggccgggtctcaatggaatgaaaggagatcctggtctccctggtgttccaggattcccaggcatgaaaggacccagtggagtacctggatcagctggccctgagggggaaccgggacttattggtcctccaggtcctcctggattacctggtccttcaggacagagtatcataattaaaggagatgctggtcctccaggaatccctggccagcctgggctaaagggtctaccaggaccccaaggacctcaaggcttaccaggtccaactggccctccaggagatcctggacgcaatggactccctggctttgatggtgcaggagggcgcaaaggagacccaggtctgccaggacagccaggtacccgtggtttggatggtccccctggtccagatggattgcaaggtcccccaggtccccctggaacctcctctgttgcacatggatttcttattacacgccacagccagacaacggatgcaccacaatgcccacagggaacacttcaggtctatgaaggcttttctctcctgtatgtacaaggaaataaaagagcccacggtcaagacttggggacggctggcagctgccttcgtcgctttagtaccatgcctttcatgttctgcaacatcaataatgtttgcaactttgcttcaagaaatgactattcttactggctctctaccccagagcccatgccaatgagcatgcaacccctaaagggccagagcatccagccattcattagtcgatgtgcagtatgtgaagctccagctgtggtgatcgcagttcacagtcagacgatccagattccccattgtcctcagggatgggattctctgtggattggttattccttcatgatgcatacaagtgcaggggcagaaggctcaggtcaagccctagcctcccctggttcctgcttggaagagtttcgttcagctcccttcatcgaatgtcatgggaggggtacctgtaactactatgccaactcctacagcttttggctggcaactgtagatgtgtcagacatgttcagtaaacctcagtcagaaacgctgaaagcaggagacttgaggacacgaattagccgatgtcaagtgtgcatgaagaggacataacattttgaagaattccttttgtgttttaaaatgtgatatatatatatataaaattcctaggatgcagtgtctcattgtccccaactttactactgctgccgtcaatggtgctactatatatgatcaagataacatgctgactagtaaccatgaagattcagatgtacctcagcaatgcgccagagcaaagtctctattatttttctactaaagaaataaggaagtgaatttactttttgggtccagaatgactttctccaagaattataagatgaaaattatatattttgcccagttactaaaatggtacattaaaaattcaattaagagaagagtcacattgagtaaaataaaagactgcagtttgtgggaagaattatttttcacggtgctactaatcctgctgtatcccgggtttttaatataaaggtgttaagcttattttgctttgtaagtaaagaatgtgtatattgtgaacagccttttagctcaaaatgttgagtcatttacatatgacatagcatgaatcactctttacagaaaatgtaggaaaccctagaatacagacagcaatattttatattcatgtttatcaaagtgagaggacttatattcctacatcaagttactactgagagtaaatttattttgagttttatcccgtaagttctgttttgattttttttaaaaaacaaacccttttagtcactttaatcagaattttaaatgttcatgttacataccaaattataatatctaatggagcaatttgtcttttgctatattctccaagattatctcttaagaccatatgccccctgttttaatgtttcttacatcttgtttttactcatttctgactggacaaagttcttccaaacaattctgagaaacaaaaacacacacgcagaattaacaattcttttccctgtgcttcttatgtaagaatcctcctgtggcctctgcttgtacagaactgggaaacaacacttggttagtctcttttaagttacaaaaagccaattgatgtttcttattctttttaaattttaaatattttgttataaatactcacaggataccttatttccctagctatcatctcctgacttaatgttttttaaacccaccaatataaatttaattaaagatatatgttgtaa

SEQ ID NO: 121444 - DNA, 6469 bp, Homo sapiens
  Payload ID: 3812
  Gene Symbol: COL4A5
  Gene Name: collagen, type IV, alpha 5
  Uniprot ID: P29400
  ENST ID: ENST00000361603
  CDS Start-End: 245-5302
agaagggaaaagttctcctgagagaccggctttggggaggggaggggggaaggaagagtagctccttcttcttcttcttttttttttcttccactcttaaaaagcttctttctcttcacccaagcctcactgtccctctccggctctagctctctccatataaaccctcaagattatgtcaattggttagagccagccgggaatttcgtgcgggtgctgaaggagctgcgggagccggagaagaatgaaactgcgtggagtcagcctggctgccggcttgttcttactggccctgagtctttgggggcagcctgcagaggctgcggcttgctatgggtgttctccaggatcaaagtgtgactgcagtggcataaaaggggaaaagggagagagagggtttccaggtttggaaggacacccaggattgcctggatttccaggtccagaagggcctccggggcctcggggacaaaagggtgatgatggaattccagggccaccaggaccaaaaggaatcagaggtcctcctggacttcctggatttccagggacaccaggtcttcctggaatgccaggccacgatggggccccaggacctcaaggtattcccggatgcaatggaaccaagggagaacgtggatttccaggcagtcccggttttcctggtttacagggtcctccaggaccccctgggatcccaggtatgaagggtgaaccaggtagtataattatgtcatcactgccaggaccaaagggtaatccaggatatccaggtcctcctggaatacaaggcctacctggtcccactggtataccagggccaattggtcccccaggaccaccaggtttgatgggccctcctggtccaccaggacttccaggacctaaggggaatatgggcttaaatttccagggacccaaaggtgaaaaaggtgagcaaggtcttcagggcccacctgggccacctgggcagatcagtgaacagaaaagaccaattgatgtagagtttcagaaaggagatcagggacttcctggtgaccgagggcctcctggacctccagggatacgtggtcctccaggtcccccaggtggtgagaaaggtgagaagggtgagcaaggagagccaggcaaaagaggtaaaccaggcaaagatggagaaaatggccaaccaggaattcctggtttgcctggtgatcctggttaccctggtgaacccggaagggatggtgaaaagggccaaaaaggtgacactggcccacctggacctcctggacttgtaattcctagacctgggactggtataactataggagaaaaaggaaacattgggttgcctgggttgcctggagaaaaaggagagcgaggatttcctggaatacagggtccacctggccttcctggacctccaggggctgcagttatgggtcctcctggccctcctggatttcctggagaaaggggtcagaaaggtgatgaaggaccacctggaatttccattcctggacctcctggacttgacggacagcctggggctcctgggcttccagggcctcctggccctgctggccctcacattcctcctagtgatgagatatgtgaaccaggccctccaggccccccaggatctccaggtgataaaggactccaaggagaacaaggagtgaaaggtgacaaaggtgacacttgcttcaactgcattggaactggtatttcagggcctccaggtcaacctggtttgccaggtctcccaggtcctccaggatctcttggtttccctggacagaaaggggaaaaaggacaagctggtgcaactggtcccaaaggattaccaggcattccaggagctccaggtgctccaggctttcctggatctaaaggtgaacctggtgatatcctcacttttccaggaatgaagggtgacaaaggagagttgggttcccctggagctccagggcttcctggtttacctggcactcctggacaggatggattgccagggcttcctggcccgaaaggagagcctggtggaattacttttaagggtgaaagaggtccccctgggaacccaggtttaccaggcctcccagggaatatagggcctatgggtccccctggtttcggccctccaggcccagtaggtgaaaaaggcatacaaggtgtggcaggaaatccaggccagccaggaataccaggtcctaaaggggatccaggtcagactataacccagccggggaagcctggcttgcctggtaacccaggcagagatggtgatgtaggtcttccaggtgaccctggacttccagggcaaccaggcttgccagggatacctggtagcaaaggagaaccaggtatccctggaattgggcttcctggaccacctggtcccaaaggctttcctggaattccaggacctccaggagcacctgggacacctggaagaattggtctagaaggccctcctgggccacccggctttccaggaccaaagggtgaaccaggatttgcattacctgggccacctgggccaccaggacttccaggtttcaaaggagcacttggtccaaaaggtgatcgtggtttcccaggacctccgggtcctccaggacgcactggcttagatgggctccctggaccaaaaggtgatgttggaccaaatggacaacctggaccaatgggacctcctgggctgccaggaataggtgttcagggaccaccaggaccaccagggattcctgggccaataggtcaacctggtttacatggaataccaggagagaagggggatccaggacctcctggacttgatgttccaggacccccaggtgaaagaggcagtccagggatccccggagcacctggtcctataggacctccaggatcaccagggcttccaggaaaagcaggtgcctctggatttccaggtaccaaaggtgaaatgggtatgatgggacctccaggcccaccaggacctttgggaattcctggcaggagtggtgtacctggtcttaaaggtgatgatggcttgcagggtcagccaggacttcctggccctacaggagaaaaaggtagtaaaggagagcctggccttccaggccctcctggaccaatggatccaaatcttctgggctcaaaaggagagaagggggaacctggcttaccaggtatacctggagtttcagggccaaaaggttatcagggtttgcctggagacccagggcaacctggactgagtggacaacctggattaccaggaccaccaggtcccaaaggtaaccctggtctccctggacagccaggtcttataggacctcctggacttaaaggaaccatcggtgatatgggttttccagggcctcagggtgtggaagggcctcctggaccttctggagttcctggacaacctggctccccaggattacctggacagaaaggcgacaaaggtgatcctggtatttcaagcattggtcttccaggtcttcctggtccaaagggtgagcctggtctgcctggatacccagggaaccctggtatcaaaggttctgtgggagatcctggtttgcccggattaccaggaacccctggagcaaaaggacaaccaggccttcctggattcccaggaaccccaggccctcctggaccaaaaggtattagtggccctcctgggaaccccggccttccaggagaacctggtcctgtaggtggtggaggtcatcctgggcaaccagggcctccaggcgaaaaaggcaaacccggtcaagatggtattcctggaccagctggacagaagggtgaaccaggtcaaccaggctttggaaacccaggaccccctggacttccaggactttctggccaaaagggtgatggaggattacctgggattccaggaaatcctggccttccaggtccaaagggcgaaccaggctttcacggtttccctggtgtgcagggtcccccaggccctcctggttctccgggtccagctctggaaggacctaaaggcaaccctgggccccaaggtcctcctgggagaccaggtctaccaggtccagaaggtcctccaggtctccctggaaatggaggtattaaaggagagaagggaaatccaggccaacctgggctacctggcttgcctggtttgaaaggagatcaaggaccaccaggactccagggtaatcctggccggccgggtctcaatggaatgaaaggagatcctggtctccctggtgttccaggattcccaggcatgaaaggacccagtggagtacctggatcagctggccctgagggggaaccgggacttattggtcctccaggtcctcctggattacctggtccttcaggacagagtatcataattaaaggagatgctggtcctccaggaatccctggccagcctgggctaaagggtctaccaggaccccaaggacctcaaggcttaccaggtccaactggccctccaggagatcctggacgcaatggactccctggctttgatggtgcaggagggcgcaaaggagacccaggtctgccaggacagccaggtacccgtggtttggatggtccccctggtccagatggattgcaaggtcccccaggtccccctggaacctcctctgttgcacatggatttcttattacacgccacagccagacaacggatgcaccacaatgcccacagggaacacttcaggtctatgaaggcttttctctcctgtatgtacaaggaaataaaagagcccacggtcaagacttggggacggctggcagctgccttcgtcgctttagtaccatgcctttcatgttctgcaacatcaataatgtttgcaactttgcttcaagaaatgactattcttactggctctctaccccagagcccatgccaatgagcatgcaacccctaaagggccagagcatccagccattcattagtcgatgtgcagtatgtgaagctccagctgtggtgatcgcagttcacagtcagacgatccagattccccattgtcctcagggatgggattctctgtggattggttattccttcatgatgcatacaagtgcaggggcagaaggctcaggtcaagccctagcctcccctggttcctgcttggaagagtttcgttcagctcccttcatcgaatgtcatgggaggggtacctgtaactactatgccaactcctacagcttttggctggcaactgtagatgtgtcagacatgttcagtaaacctcagtcagaaacgctgaaagcaggagacttgaggacacgaattagccgatgtcaagtgtgcatgaagaggacataacattttgaagaattccttttgtgttttaaaatgtgatatatatatatataaaattcctaggatgcagtgtctcattgtccccaactttactactgctgccgtcaatggtgctactatatatgatcaagataacatgctgactagtaaccatgaagattcagatgtacctcagcaatgcgccagagcaaagtctctattatttttctactaaagaaataaggaagtgaatttactttttgggtccagaatgactttctccaagaattataagatgaaaattatatattttgcccagttactaaaatggtacattaaaaattcaattaagagaagagtcacattgagtaaaataaaagactgcagtttgtgggaagaattatttttcacggtgctactaatcctgctgtatcccgggtttttaatataaaggtgttaagcttattttgctttgtaagtaaagaatgtgtatattgtgaacagccttttagctcaaaatgttgagtcatttacatatgacatagcatgaatcactctttacagaaaatgtaggaaaccctagaatacagacagcaatattttatattcatgtttatcaaagtgagaggacttatattcctacatcaagttactactgagagtaaatttattttgagttttatcccgtaagttctgttttgattttttttaaaaaacaaacccttttagtcactttaatcagaattttaaatgttcatgttacataccaaattataatatctaatggagcaatttgtcttttgctatattctccaagattatctcttaagaccatatgccccctgttttaatgtttcttacatcttgtttttactcatttctgactggacaaagttcttccaaacaattctgagaaacaaaaacacacacgcagaattaacaattcttttccctgtgcttcttatgtaagaatcctcctgtggcctctgcttgtacagaactgggaaacaacacttggttagtctcttttaagttacaaaaagccaattgatgtttcttattctttttaaattttaaatattttgttataaatactcacaggataccttatttccctagctatcatctcctgacttaatgttttttaaacccaccaatataaatttaattaaagatatatgttgtaaggat

SEQ ID NO: 121445 - DNA, 790 bp, Homo sapiens
  Payload ID: 3812
  Gene Symbol: COL4A5
  Gene Name: collagen, type IV, alpha 5
  ENST ID: ENST00000515658
  CDS Start-End: 1-347
aaggcttaccaggtccaactggccctccaggagatcctggacgcaatggactccctggctttgatggtgcaggagggcgcaaaggagacccaggtctgccaggacagccaggtacccgtggtttggatggtccccctggtccagatggattgcaaggtcccccaggtccccctggaacctcctctgttgcacatggatttcttattacacgccacagccagacaacggatgcaccacaatgcccacagggaacacttcaggtctatgaaggcttttctctcctgtatgtacaaggaaataaaagagcccacggtcaagacttggtaaacctcagtcagaaacgctgaaagcaggagacttgaggacacgaattagccgatgtcaagtgtgcatgaagaggacataacattttgaagaattccttttgtgttttaaaatgtgatatatatatatataaaattcctaggatgcagtgtctcattgtccccaactttactactgctgccgtcaatggtgctactatatatgatcaagataacatgctgactagtaaccatgaagattcagatgtacctcagcaatgcgccagagcaaagtctctattatttttctactaaagaaataaggaagtgaatttactttttgggtccagaatgactttctccaagaattataagatgaaaattatatattttgcccagttactaaaatggtacattaaaaattcaattaagagaagagtcacattgagtaaaataaaagactgcagtttgtgggaagaattattttt

SEQ ID NO: 121446 - DNA, 537 bp, Homo sapiens
  Payload ID: 3812
  Gene Symbol: COL4A5
  Gene Name: collagen, type IV, alpha 5
  ENST ID: ENST00000505728
  CDS Start-End: 1-524
gtgatgatggcttgcagggtcagccaggacttcctggccctacaggagaaaaaggtagtaaaggagagcctggccttccaggccctcctggaccaatggatccaaatcttctgggctcaaaaggagagaagggggaacctggcttaccaggtatacctggagtttcagggccaaaaggttatcagggtttgcctggagacccagggcaacctggactgagtggacaacctggattaccaggaccaccaggtcccaaaggtaaccctggtctccctggacagccaggtcttataggacctcctggacttaaaggaaccatcggtgatatgggttttccagggcctcagggtgtggaagggcctcctggaccttctggagttcctggacaacctggctccccaggattacctggacagaaaggcgacaaaggtgatcctggtatttcaagcattggtcttccaggtcttcctggtccaaagatgataagaagatatgttttagggtttgtggccagtccaaaataaaaagggaaaactt

SEQ ID NO: 121447 - DNA, 859 bp, Homo sapiens
  Payload ID: 3812
  Gene Symbol: COL4A5
  Gene Name: collagen, type IV, alpha 5
  ENST ID: ENST00000504541
  CDS Start-End: 1-222
tttgcttcaagaaatgactattcttactggctctctaccccagagcccatgccaatgagcatgcaacccctaaagggccagagcatccagccattcattagtcgatgtgcagtatgtgaagctccagctgtggtgatcgcagttcacagtcagacgatccagattccccattgtcctcagggatgggattctctgtggattggttattccttcatgatgtaaacctcagtcagaaacgctgaaagcaggagacttgaggacacgaattagccgatgtcaagtgtgcatgaagaggacataacattttgaagaattccttttgtgttttaaaatgtgatatatatatatataaaattcctaggatgcagtgtctcattgtccccaactttactactgctgccgtcaatggtgctactatatatgatcaagataacatgctgactagtaaccatgaagattcagatgtacctcagcaatgcgccagagcaaagtctctattatttttctactaaagaaataaggaagtgaatttactttttgggtccagaatgactttctccaagaattataagatgaaaattatatattttgcccagttactaaaatggtacattaaaaattcaattaagagaagagtcacattgagtaaaataaaagactgcagtttgtgggaagaattatttttcacggtgctactaatcctgctgtatcccgggtttttaatataaaggtgttaagcttattttgctttgtaagtaaagaatgtgtatattgtgaacagccttttagctcaaaatgttgagtcatttacatatgacatagcatgaatcactctttacagaaaatgtaggaaacccta

SEQ ID NO: 121448 - DNA, 6700 bp, Homo sapiens
  Payload ID: 3813
  Gene Symbol: COL4A6
  Gene Name: collagen, type IV, alpha 6
  Uniprot ID: Q14031
  ENST ID: ENST00000334504
  CDS Start-End: 235-5307
atggaactatctcctgagtgctgcaagttgtaacgggcaccgctgagcctgtttccctttggagcacttcttatctagaagcagtgtttagtttcttccaaactgggccacttcgtccacctactctgttctgagtaaggaaacagcctccaagcatcagcagagcccagatgagcacgggccgcggagccgcttagcagtctcccgggacccagctccggaggagccgcaagcatgcaccctgggttgtggctgctcctggttacgttgtgcctgaccgaggaactggcagcagcgggagagaagtcttatggaaagccatgtgggggccaggactgcagtgggagctgtcagtgttttcctgagaaaggagcgagaggacgacctggaccaattggaattcaaggcccaacaggtcctcaaggattcactggctctactggtttatcgggattgaaaggagaaaggggtttcccaggccttctgggaccttatggaccaaaaggagataagggtcccatgggagttcctggctttcttggcatcaatgggattccgggccaccctggacaaccaggccccagaggcccacctggtctggatggctgtaatggaactcaaggagctgttggatttccaggccctgatggctatcctgggcttctcggaccacccgggcttcctggtcagaaaggatcaaaaggtgaccctgtccttgctccaggtagtttcaaaggaatgaagggggatcctgggctgcctggactggatggaatcactggcccacaaggagcacccggatttcctggagctgtaggacctgcaggaccaccaggattacaaggtcctccagggcctcctggtcctcttggtcctgatgggaatatggggctaggttttcaaggagagaaaggagtcaagggggatgttggcctccctggcccagcaggacctccaccatctactggagagctggaattcatgggattccccaaagggaagaaaggatccaagggtgaaccagggcctaagggttttccaggcataagtggccctccaggcttcccgggccttggaactactggagaaaagggagaaaagggagaaaagggaatccctggtttgccaggacctaggggtcccatgggttcagaaggagtccaaggccctccagggcaacagggcaagaaagggaccctgggatttcctgggcttaatggattccaaggaattgagggtcaaaagggtgacattggcctgccaggcccagatgttttcatcgatatagatggtgctgtgatctcaggtaatcctggagatcctggtgtacctggcctcccaggccttaaaggagatgaaggcatccaaggcctacgtggcccttctggtgtccctggattgccagcattatcaggtgtcccaggagccctagggcctcagggatttccagggctgaagggggaccaaggaaacccaggccgtaccacaattggagcagctggcctccctggcagagatggtttgccaggcccaccaggtccaccaggcccacctagtccagaatttgagactgaaactctacacaacaaagagtcagggttccctggtctccgaggagaacaaggtccaaaaggaaacctaggcctcaaaggaataaaaggagactcaggtttctgtgcttgtgacggtggtgttcccaacactggaccacccggggaaccaggcccacctggtccatggggtctcataggccttccaggccttaaaggagccagaggagatcgaggctctgggggtgcacagggcccagcaggggctccaggcttagttgggcctctgggtccttcaggacccaaaggaaagaagggggaaccaattctcagtacaatccaaggaatgccaggagatcggggtgattctggctcccagggcttccgtggtgtaataggagaaccaggcaaggacggagtaccaggtttaccaggtctgccaggccttccgggtgatggtggacagggcttcccaggtgaaaaggggttacctggacttcctggtgaaaaaggccatcctggtccacctggcctcccaggaaatgggttaccaggacttcctggaccccgtgggcttcctggagataaaggcaaggatggattaccgggacaacaaggccttcccggatctaagggaatcaccctgccctgtattattcctgggtcatacggtccatcaggatttccaggcactcccggattcccaggccctaaagggtctcgaggcctccctgggaccccaggccagcctgggtcaagtggaagtaaaggagagccagggagtccaggattggttcatcttcctgaattaccaggatttcctggacctcgtggggagaagggcttgcctgggtttcctgggctccctggaaaagatggcttgcctgggatgattggcagtccaggcttacctggttccaagggagccactggtgacatctttggtgctgaaaatggtgctccgggggaacaaggcctacaaggattaacagggcacaaaggatttcttggagactctggccttccaggactcaagggtgtgcacgggaagcctggcttactaggccccaaaggtgagcggggcagccctgggacaccaggacaggtgggacagccaggcaccccaggatctagtggtccatatggcatcaagggcaaatctgggctcccaggagcaccaggcttcccaggcatctcaggacatcctggaaagaaaggaacaagaggcaagaaaggtcctcctggatcaattgtaaagaaagggctgccagggctaaaaggccttcctggaaatccaggcctagtaggactgaaaggaagcccaggctctccaggggtcgctgggttgccagccctctctggacccaagggagagaaggggtctgttggattcgtaggttttccaggaataccaggtctgcctggtattcctggaacaagaggattaaaaggaattccaggatcaactggaaaaatgggaccatctggacgtgctggtactcctggtgaaaagggagacagaggcaatccggggccagtcggaatacctagtccaagacgtccaatgtcaaacctttggctcaaaggagacaaaggctctcaaggctcagccggatccaatggatttcctgggccaagaggtgacaaaggagaggctggtcgacctggaccaccaggcctacctggagctcctggcctcccaggcattatcaaaggagttagtggaaagccagggccccctggcttcatgggaatccggggcttacctggcctgaaggggtcctctgggatcacaggtttcccaggaatgccaggagaaagtggttcacaaggtatcagagggtcgcctggactcccaggagcatctggtctcccaggcctgaaaggagacaacggccagacagttgaaatttccggtagcccaggacccaagggacagcctggcgaatctggttttaaaggcacaaaaggaagagatggactaataggcaatataggcttccctggaaacaaaggtgaagatggaaaagttggtgtttctggagatgttggccttcctggagctccaggatttccaggagttgccggcatgagaggagaaccaggacttccaggttcttctggtcaccaaggggcaattgggcctctaggatcccccggattaataggacccaaaggcttccctggatttcctggtttacatggactgaatgggcttccgggcaccaagggtacccatggcactccaggacctagtatcaccggtgtgcctgggcctgctggtctccctggacccaaaggagaaaaaggatatccaggaattggcatcggagctccagggaagccgggcctgagagggcaaaaaggtgatcgaggtttcccaggtctccagggccctgctggtctccccggtgccccaggcatctccttgccctcactcatagcaggacagcctggtgaccccgggcgaccaggcctagatggagaacgaggccgcccaggccccgctggacccccaggtccccctgggccatcctcgaatcaaggcgacaccggagaccctggcttccctggaattcctggacctaaagggcctaagggagaccaaggaattccaggtttttctggcctccctggagagctaggactgaaaggcatgagaggtgagcctggcttcatggggactccaggcaaggttgggccacctggagacccaggatttcccggaatgaaggggaaggcagggccaagaggctcttctggcctccaaggtgatcctggacaaacaccaactgcagaagctgtccaggttcctcctggacccttgggtctaccagggatcgatggcatccctggcctcactggggaccctggggctcaaggccctgtaggcctacaaggctccaaaggtttacctggcatccccggtaaagatggccccagtgggctcccaggcccacctggggctcttggtgatcctggtctgcctggactgcaaggccctccaggatttgaaggagctccagggcagcaaggccccttcgggatgcctggaatgcctggccagagcatgagagtgggctacacgttggtaaagcacagccagtcggaacaggtgcccccgtgtcccatcgggatgagccagctgtgggtggggtacagcttactgtttgtggaggggcaagagaaagcccacaaccaggacctgggctttgctggctcctgtctgccccgcttcagcaccatgcccttcatctactgcaacatcaacgaggtgtgccactatgccaggcgcaatgataaatcttactggctctccactaccgcccctatccccatgatgcccgtcagccagacccagattccccagtacatcagccgctgctctgtgtgtgaggcaccctcgcaagccattgctgtgcacagccaggacatcaccatcccgcagtgccccctgggctggcgcagcctctggattgggtactctttcctcatgcacactgccgctggtgccgagggtggaggccagtccctggtctcacctggctcctgcctagaggactttcgggccactcctttcatcgaatgcagtggtgcccgaggcacctgccactactttgcaaacaagtacagtttctggttgaccacagtggaggagaggcagcagtttggggagttgcctgtgtctgaaacgctgaaagctgggcagctccacactcgagtcagtcgctgccaggtgtgtatgaaaagcctgtagggtggcacctgccactctgccccttgccctcccctgcccctcacaacagtcacctcacaaacctgaatggtctgaagaaggaaggcctgagcccctttgcctgtcaagttgtacattggagtctcatttgggctagactaccggacactcgtcaccccagccctcgggtccatagagatgagcccaccctgctgagatctgctgtcctgtttctgtcaagctggtgctactgtttgatttggatgattgtgtgactattcatggctacctcagaaagatttgatgggccacaactgtcttagactgctagctttctccttaccgtcttgatcggaaagctcttcctaatcgctaatcagtcatttcttcatgtacagaggtcagcacacattatttggcttaaaccagaacccagtgtttccacacttaaattctctaaccgaatattcatggatggctcaagtctgcacagagcaagtcctcactcttcaaggaggcccactgtgtctaggcaggcaagagaattgaaatgaggtgccacccagtagcccagagtgagctttagctctctctagaatgagcaagactgggccccacatggcttagagaggcttgaaggccagcagctgggttgggggtggtggtcattaatggcatatggtcctagacaaaccatctcctccttgccggctccccctccagccagagacagaggatgtggcctggttcaaagtaaagcagaggatgcaacaaatgtggccaagcctatcaaaggaaatgagaatgacagccttttttcctgggccagaagtagaggggtgggtgcgtaaggatgtgtgagttttgcttttgactccaggaacaaaaaggtaaatcccacatcccagtttctcagaagtccctgtttattccaaatgccatccagatgtgtgcaatgtggcaaactgaagctgcacagtgttggtttccttgtattctgaggatgttaaagactttgttaaatggttatccaattgctctttcacaggtagcctattaaactattttaatatgtttttttaaacctcataaaaatctagcacactcttctcttgagcagttagcagacctaaagcaagcctgaattggctatgcagtacattgtattctgtttgggggaatttgttttagccattttctttaattaccagttttccagaacactcttagctatgttgacatgaggcagttccttccaggtgattctgtttccttaagtattatataaactgtgccaatacagacaaagcataatcaatataatctgaattattgttatctttacctcctgagtaataagcatggtgtcagttttgtacatagcaaataaaataaatgaaatctgaacatgtga

SEQ ID NO: 121449 - DNA, 6570 bp, Homo sapiens
  Payload ID: 3813
  Gene Symbol: COL4A6
  Gene Name: collagen, type IV, alpha 6
  Uniprot ID: Q14031
  ENST ID: ENST00000372216
  CDS Start-End: 102-5177
tccctgggctgctggtcttctttaccttccagctgctcacagaacagagagtttctacatacaagcagaagatgtgaaaatattgggaataaataaagtatatgcttataaacaagttgtggctgctcctggttacgttgtgcctgaccgaggaactggcagcagcgggagagaagtcttatggaaagccatgtgggggccaggactgcagtgggagctgtcagtgttttcctgagaaaggagcgagaggacgacctggaccaattggaattcaaggcccaacaggtcctcaaggattcactggctctactggtttatcgggattgaaaggagaaaggggtttcccaggccttctgggaccttatggaccaaaaggagataagggtcccatgggagttcctggctttcttggcatcaatgggattccgggccaccctggacaaccaggccccagaggcccacctggtctggatggctgtaatggaactcaaggagctgttggatttccaggccctgatggctatcctgggcttctcggaccacccgggcttcctggtcagaaaggatcaaaaggtgaccctgtccttgctccaggtagtttcaaaggaatgaagggggatcctgggctgcctggactggatggaatcactggcccacaaggagcacccggatttcctggagctgtaggacctgcaggaccaccaggattacaaggtcctccagggcctcctggtcctcttggtcctgatgggaatatggggctaggttttcaaggagagaaaggagtcaagggggatgttggcctccctggcccagcaggacctccaccatctactggagagctggaattcatgggattccccaaagggaagaaaggatccaagggtgaaccagggcctaagggttttccaggcataagtggccctccaggcttcccgggccttggaactactggagaaaagggagaaaagggagaaaagggaatccctggtttgccaggacctaggggtcccatgggttcagaaggagtccaaggccctccagggcaacagggcaagaaagggaccctgggatttcctgggcttaatggattccaaggaattgagggtcaaaagggtgacattggcctgccaggcccagatgttttcatcgatatagatggtgctgtgatctcaggtaatcctggagatcctggtgtacctggcctcccaggccttaaaggagatgaaggcatccaaggcctacgtggcccttctggtgtccctggattgccagcattatcaggtgtcccaggagccctagggcctcagggatttccagggctgaagggggaccaaggaaacccaggccgtaccacaattggagcagctggcctccctggcagagatggtttgccaggcccaccaggtccaccaggcccacctagtccagaatttgagactgaaactctacacaacaaagagtcagggttccctggtctccgaggagaacaaggtccaaaaggaaacctaggcctcaaaggaataaaaggagactcaggtttctgtgcttgtgacggtggtgttcccaacactggaccacccggggaaccaggcccacctggtccatggggtctcataggccttccaggccttaaaggagccagaggagatcgaggctctgggggtgcacagggcccagcaggggctccaggcttagttgggcctctgggtccttcaggacccaaaggaaagaagggggaaccaattctcagtacaatccaaggaatgccaggagatcggggtgattctggctcccagggcttccgtggtgtaataggagaaccaggcaaggacggagtaccaggtttaccaggtctgccaggccttccgggtgatggtggacagggcttcccaggtgaaaaggggttacctggacttcctggtgaaaaaggccatcctggtccacctggcctcccaggaaatgggttaccaggacttcctggaccccgtgggcttcctggagataaaggcaaggatggattaccgggacaacaaggccttcccggatctaagggaatcaccctgccctgtattattcctgggtcatacggtccatcaggatttccaggcactcccggattcccaggccctaaagggtctcgaggcctccctgggaccccaggccagcctgggtcaagtggaagtaaaggagagccagggagtccaggattggttcatcttcctgaattaccaggatttcctggacctcgtggggagaagggcttgcctgggtttcctgggctccctggaaaagatggcttgcctgggatgattggcagtccaggcttacctggttccaagggagccactggtgacatctttggtgctgaaaatggtgctccgggggaacaaggcctacaaggattaacagggcacaaaggatttcttggagactctggccttccaggactcaagggtgtgcacgggaagcctggcttactaggccccaaaggtgagcggggcagccctgggacaccaggacaggtgggacagccaggcaccccaggatctagtggtccatatggcatcaagggcaaatctgggctcccaggagcaccaggcttcccaggcatctcaggacatcctggaaagaaaggaacaagaggcaagaaaggtcctcctggatcaattgtaaagaaagggctgccagggctaaaaggccttcctggaaatccaggcctagtaggactgaaaggaagcccaggctctccaggggtcgctgggttgccagccctctctggacccaagggagagaaggggtctgttggattcgtaggttttccaggaataccaggtctgcctggtattcctggaacaagaggattaaaaggaattccaggatcaactggaaaaatgggaccatctggacgtgctggtactcctggtgaaaagggagacagaggcaatccggggccagtcggaatacctagtccaagacgtccaatgtcaaacctttggctcaaaggagacaaaggctctcaaggctcagccggatccaatggatttcctgggccaagaggtgacaaaggagaggctggtcgacctggaccaccaggcctacctggagctcctggcctcccaggcattatcaaaggagttagtggaaagccagggccccctggcttcatgggaatccggggcttacctggcctgaaggggtcctctgggatcacaggtttcccaggaatgccaggagaaagtggttcacaaggtatcagagggtcgcctggactcccaggagcatctggtctcccaggcctgaaaggagacaacggccagacagttgaaatttccggtagcccaggacccaagggacagcctggcgaatctggttttaaaggcacaaaaggaagagatggactaataggcaatataggcttccctggaaacaaaggtgaagatggaaaagttggtgtttctggagatgttggccttcctggagctccaggatttccaggagttgccggcatgagaggagaaccaggacttccaggttcttctggtcaccaaggggcaattgggcctctaggatcccccggattaataggacccaaaggcttccctggatttcctggtttacatggactgaatgggcttccgggcaccaagggtacccatggcactccaggacctagtatcaccggtgtgcctgggcctgctggtctccctggacccaaaggagaaaaaggatatccaggaattggcatcggagctccagggaagccgggcctgagagggcaaaaaggtgatcgaggtttcccaggtctccagggccctgctggtctccccggtgccccaggcatctccttgccctcactcatagcaggacagcctggtgaccccgggcgaccaggcctagatggagaacgaggccgcccaggccccgctggacccccaggtccccctgggccatcctcgaatcaaggcgacaccggagaccctggcttccctggaattcctggacctaaagggcctaagggagaccaaggaattccaggtttttctggcctccctggagagctaggactgaaaggcatgagaggtgagcctggcttcatggggactccaggcaaggttgggccacctggagacccaggatttcccggaatgaaggggaaggcagggccaagaggctcttctggcctccaaggtgatcctggacaaacaccaactgcagaagctgtccaggttcctcctggacccttgggtctaccagggatcgatggcatccctggcctcactggggaccctggggctcaaggccctgtaggcctacaaggctccaaaggtttacctggcatccccggtaaagatggccccagtgggctcccaggcccacctggggctcttggtgatcctggtctgcctggactgcaaggccctccaggatttgaaggagctccagggcagcaaggccccttcgggatgcctggaatgcctggccagagcatgagagtgggctacacgttggtaaagcacagccagtcggaacaggtgcccccgtgtcccatcgggatgagccagctgtgggtggggtacagcttactgtttgtggaggggcaagagaaagcccacaaccaggacctgggctttgctggctcctgtctgccccgcttcagcaccatgcccttcatctactgcaacatcaacgaggtgtgccactatgccaggcgcaatgataaatcttactggctctccactaccgcccctatccccatgatgcccgtcagccagacccagattccccagtacatcagccgctgctctgtgtgtgaggcaccctcgcaagccattgctgtgcacagccaggacatcaccatcccgcagtgccccctgggctggcgcagcctctggattgggtactctttcctcatgcacactgccgctggtgccgagggtggaggccagtccctggtctcacctggctcctgcctagaggactttcgggccactcctttcatcgaatgcagtggtgcccgaggcacctgccactactttgcaaacaagtacagtttctggttgaccacagtggaggagaggcagcagtttggggagttgcctgtgtctgaaacgctgaaagctgggcagctccacactcgagtcagtcgctgccaggtgtgtatgaaaagcctgtagggtggcacctgccactctgccccttgccctcccctgcccctcacaacagtcacctcacaaacctgaatggtctgaagaaggaaggcctgagcccctttgcctgtcaagttgtacattggagtctcatttgggctagactaccggacactcgtcaccccagccctcgggtccatagagatgagcccaccctgctgagatctgctgtcctgtttctgtcaagctggtgctactgtttgatttggatgattgtgtgactattcatggctacctcagaaagatttgatgggccacaactgtcttagactgctagctttctccttaccgtcttgatcggaaagctcttcctaatcgctaatcagtcatttcttcatgtacagaggtcagcacacattatttggcttaaaccagaacccagtgtttccacacttaaattctctaaccgaatattcatggatggctcaagtctgcacagagcaagtcctcactcttcaaggaggcccactgtgtctaggcaggcaagagaattgaaatgaggtgccacccagtagcccagagtgagctttagctctctctagaatgagcaagactgggccccacatggcttagagaggcttgaaggccagcagctgggttgggggtggtggtcattaatggcatatggtcctagacaaaccatctcctccttgccggctccccctccagccagagacagaggatgtggcctggttcaaagtaaagcagaggatgcaacaaatgtggccaagcctatcaaaggaaatgagaatgacagccttttttcctgggccagaagtagaggggtgggtgcgtaaggatgtgtgagttttgcttttgactccaggaacaaaaaggtaaatcccacatcccagtttctcagaagtccctgtttattccaaatgccatccagatgtgtgcaatgtggcaaactgaagctgcacagtgttggtttccttgtattctgaggatgttaaagactttgttaaatggttatccaattgctctttcacaggtagcctattaaactattttaatatgtttttttaaacctcataaaaatctagcacactcttctcttgagcagttagcagacctaaagcaagcctgaattggctatgcagtacattgtattctgtttgggggaatttgttttagccattttctttaattaccagttttccagaacactcttagctatgttgacatgaggcagttccttccaggtgattctgtttccttaagtattatataaactgtgccaatacagacaaagcataatcaatataatctgaattattgttatctttacctcctgagtaataagcatggtgtcagttttgtacatagcaaataaaataaatgaaatctgaacatgtga

SEQ ID NO: 121450 - DNA, 6750 bp, Homo sapiens
  Payload ID: 3813
  Gene Symbol: COL4A6
  Gene Name: collagen, type IV, alpha 6
  ENST ID: ENST00000394872
  CDS Start-End: 235-5358
atggaactatctcctgagtgctgcaagttgtaacgggcaccgctgagcctgtttccctttggagcacttcttatctagaagcagtgtttagtttcttccaaactgggccacttcgtccacctactctgttctgagtaaggaaacagcctccaagcatcagcagagcccagatgagcacgggccgcggagccgcttagcagtctcccgggacccagctccggaggagccgcaagcatgcaccctgggttgtggctgctcctggttacgttgtgcctgaccgaggaactggcagcagcgggagagaagtcttatggaaagccatgtgggggccaggactgcagtgggagctgtcagtgttttcctgagaaaggagcgagaggacgacctggaccaattggaattcaaggcccaacaggtcctcaaggattcactggctctactggtttatcgggattgaaaggagaaaggggtttcccaggccttctgggaccttatggaccaaaaggagataagggtcccatgggagttcctggctttcttggcatcaatgggattccgggccaccctggacaaccaggccccagaggcccacctggtctggatggctgtaatggaactcaaggagctgttggatttccaggccctgatggctatcctgggcttctcggaccacccgggcttcctggtcagaaaggatcaaaaggtgaccctgtccttgctccaggtagtttcaaaggaatgaagggggatcctgggctgcctggactggatggaatcactggcccacaaggagcacccggatttcctggagctgtaggacctgcaggaccaccaggattacaaggtcctccagggcctcctggtcctcttggtcctgatgggaatatggggctaggttttcaaggagagaaaggagtcaagggggatgttggcctccctggcccagcaggacctccaccatctactggagagctggaattcatgggattccccaaagggaagaaaggatccaagggtgaaccagggcctaagggttttccaggcataagtggccctccaggcttcccgggccttggaactactggagaaaagggagaaaagggagaaaagggaatccctggtttgccaggacctaggggtcccatgggttcagaaggagtccaaggccctccagggcaacagggcaagaaagggaccctgggatttcctgggcttaatggattccaaggaattgagggtcaaaagggtgacattggcctgccaggcccagatgttttcatcgatatagatggtgctgtgatctcaggtaatcctggagatcctggtgtacctggcctcccaggccttaaaggagatgaaggcatccaaggcctacgtggcccttctggtgtccctggattgccagcattatcaggtgtcccaggagccctagggcctcagggatttccagggctgaagggggaccaaggaaacccaggccgtaccacaattggagcagctggcctccctggcagagatggtttgccaggcccaccaggtccaccaggcccacctagtccagaatttgagactgaaactctacacaacaaagagtcagggttccctggtctccgaggagaacaaggtccaaaaggaaacctaggcctcaaaggaataaaaggagactcaggtttctgtgcttgtgacggtggtgttcccaacactggaccacccggggaaccaggcccacctggtccatggggtctcataggccttccaggccttaaaggagccagaggagatcgaggctctgggggtgcacagggcccagcaggggctccaggcttagttgggcctctgggtccttcaggacccaaaggaaagaagggggaaccaattctcagtacaatccaaggaatgccaggagatcggggtgattctggctcccagggcttccgtggtgtaataggagaaccaggcaaggacggagtaccaggtttaccaggtctgccaggccttccgggtgatggtggacagggcttcccaggtgaaaaggggttacctggacttcctggtgaaaaaggccatcctggtccacctggcctcccaggaaatgggttaccaggacttcctggaccccgtgggcttcctggagataaaggcaaggatggattaccgggacaacaaggccttcccggatctaagggtgactgctgctgtagagaggttggtaaaggagacttagacacagagagaggaatcaccctgccctgtattattcctgggtcatacggtccatcaggatttccaggcactcccggattcccaggccctaaagggtctcgaggcctccctgggaccccaggccagcctgggtcaagtggaagtaaaggagagccagggagtccaggattggttcatcttcctgaattaccaggatttcctggacctcgtggggagaagggcttgcctgggtttcctgggctccctggaaaagatggcttgcctgggatgattggcagtccaggcttacctggttccaagggagccactggtgacatctttggtgctgaaaatggtgctccgggggaacaaggcctacaaggattaacagggcacaaaggatttcttggagactctggccttccaggactcaagggtgtgcacgggaagcctggcttactaggccccaaaggtgagcggggcagccctgggacaccaggacaggtgggacagccaggcaccccaggatctagtggtccatatggcatcaagggcaaatctgggctcccaggagcaccaggcttcccaggcatctcaggacatcctggaaagaaaggaacaagaggcaagaaaggtcctcctggatcaattgtaaagaaagggctgccagggctaaaaggccttcctggaaatccaggcctagtaggactgaaaggaagcccaggctctccaggggtcgctgggttgccagccctctctggacccaagggagagaaggggtctgttggattcgtaggttttccaggaataccaggtctgcctggtattcctggaacaagaggattaaaaggaattccaggatcaactggaaaaatgggaccatctggacgtgctggtactcctggtgaaaagggagacagaggcaatccggggccagtcggaatacctagtccaagacgtccaatgtcaaacctttggctcaaaggagacaaaggctctcaaggctcagccggatccaatggatttcctgggccaagaggtgacaaaggagaggctggtcgacctggaccaccaggcctacctggagctcctggcctcccaggcattatcaaaggagttagtggaaagccagggccccctggcttcatgggaatccggggcttacctggcctgaaggggtcctctgggatcacaggtttcccaggaatgccaggagaaagtggttcacaaggtatcagagggtcgcctggactcccaggagcatctggtctcccaggcctgaaaggagacaacggccagacagttgaaatttccggtagcccaggacccaagggacagcctggcgaatctggttttaaaggcacaaaaggaagagatggactaataggcaatataggcttccctggaaacaaaggtgaagatggaaaagttggtgtttctggagatgttggccttcctggagctccaggatttccaggagttgccggcatgagaggagaaccaggacttccaggttcttctggtcaccaaggggcaattgggcctctaggatcccccggattaataggacccaaaggcttccctggatttcctggtttacatggactgaatgggcttccgggcaccaagggtacccatggcactccaggacctagtatcaccggtgtgcctgggcctgctggtctccctggacccaaaggagaaaaaggatatccaggaattggcatcggagctccagggaagccgggcctgagagggcaaaaaggtgatcgaggtttcccaggtctccagggccctgctggtctccccggtgccccaggcatctccttgccctcactcatagcaggacagcctggtgaccccgggcgaccaggcctagatggagaacgaggccgcccaggccccgctggacccccaggtccccctgggccatcctcgaatcaaggcgacaccggagaccctggcttccctggaattcctggacctaaagggcctaagggagaccaaggaattccaggtttttctggcctccctggagagctaggactgaaaggcatgagaggtgagcctggcttcatggggactccaggcaaggttgggccacctggagacccaggatttcccggaatgaaggggaaggcagggccaagaggctcttctggcctccaaggtgatcctggacaaacaccaactgcagaagctgtccaggttcctcctggacccttgggtctaccagggatcgatggcatccctggcctcactggggaccctggggctcaaggccctgtaggcctacaaggctccaaaggtttacctggcatccccggtaaagatggccccagtgggctcccaggcccacctggggctcttggtgatcctggtctgcctggactgcaaggccctccaggatttgaaggagctccagggcagcaaggccccttcgggatgcctggaatgcctggccagagcatgagagtgggctacacgttggtaaagcacagccagtcggaacaggtgcccccgtgtcccatcgggatgagccagctgtgggtggggtacagcttactgtttgtggaggggcaagagaaagcccacaaccaggacctgggctttgctggctcctgtctgccccgcttcagcaccatgcccttcatctactgcaacatcaacgaggtgtgccactatgccaggcgcaatgataaatcttactggctctccactaccgcccctatccccatgatgcccgtcagccagacccagattccccagtacatcagccgctgctctgtgtgtgaggcaccctcgcaagccattgctgtgcacagccaggacatcaccatcccgcagtgccccctgggctggcgcagcctctggattgggtactctttcctcatgcacactgccgctggtgccgagggtggaggccagtccctggtctcacctggctcctgcctagaggactttcgggccactcctttcatcgaatgcagtggtgcccgaggcacctgccactactttgcaaacaagtacagtttctggttgaccacagtggaggagaggcagcagtttggggagttgcctgtgtctgaaacgctgaaagctgggcagctccacactcgagtcagtcgctgccaggtgtgtatgaaaagcctgtagggtggcacctgccactctgccccttgccctcccctgcccctcacaacagtcacctcacaaacctgaatggtctgaagaaggaaggcctgagcccctttgcctgtcaagttgtacattggagtctcatttgggctagactaccggacactcgtcaccccagccctcgggtccatagagatgagcccaccctgctgagatctgctgtcctgtttctgtcaagctggtgctactgtttgatttggatgattgtgtgactattcatggctacctcagaaagatttgatgggccacaactgtcttagactgctagctttctccttaccgtcttgatcggaaagctcttcctaatcgctaatcagtcatttcttcatgtacagaggtcagcacacattatttggcttaaaccagaacccagtgtttccacacttaaattctctaaccgaatattcatggatggctcaagtctgcacagagcaagtcctcactcttcaaggaggcccactgtgtctaggcaggcaagagaattgaaatgaggtgccacccagtagcccagagtgagctttagctctctctagaatgagcaagactgggccccacatggcttagagaggcttgaaggccagcagctgggttgggggtggtggtcattaatggcatatggtcctagacaaaccatctcctccttgccggctccccctccagccagagacagaggatgtggcctggttcaaagtaaagcagaggatgcaacaaatgtggccaagcctatcaaaggaaatgagaatgacagccttttttcctgggccagaagtagaggggtgggtgcgtaaggatgtgtgagttttgcttttgactccaggaacaaaaaggtaaatcccacatcccagtttctcagaagtccctgtttattccaaatgccatccagatgtgtgcaatgtggcaaactgaagctgcacagtgttggtttccttgtattctgaggatgttaaagactttgttaaatggttatccaattgctctttcacaggtagcctattaaactattttaatatgtttttttaaacctcataaaaatctagcacactcttctcttgagcagttagcagacctaaagcaagcctgaattggctatgcagtacattgtattctgtttgggggaatttgttttagccattttctttaattaccagttttccagaacactcttagctatgttgacatgaggcagttccttccaggtgattctgtttccttaagtattatataaactgtgccaatacagacaaagcataatcaatataatctgaattattgttatctttacctcctgagtaataagcatggtgtcagttttgtacatagcaaataaaataaatgaaatctgaacatgtg

SEQ ID NO: 121451 - DNA, 6380 bp, Homo sapiens
  Payload ID: 3813
  Gene Symbol: COL4A6
  Gene Name: collagen, type IV, alpha 6
  ENST ID: ENST00000545689
  CDS Start-End: 235-5271
atggaactatctcctgagtgctgcaagttgtaacgggcaccgctgagcctgtttccctttggagcacttcttatctagaagcagtgtttagtttcttccaaactgggccacttcgtccacctactctgttctgagtaaggaaacagcctccaagcatcagcagagcccagatgagcacgggccgcggagccgcttagcagtctcccgggacccagctccggaggagccgcaagcatgcaccctgggttgtggctgctcctggttacgttgtgcctgaccgaggaactggcagcagcgggagagaagtcttatggaaagccatgtgggggccaggactgcagtgggagctgtcagtgttttcctgagaaaggagcgagaggacgacctggaccaattggaattcaaggcccaacaggtcctcaaggattcactggctctactggtttatcgggattgaaaggagaaaggggtttcccaggccttctgggaccttatggaccaaaaggagataagggtcccatgggagttcctggctttcttggcatcaatgggattccgggccaccctggacaaccaggccccagaggcccacctggtctggatggctgtaatggaactcaaggagctgttggatttccaggccctgatggctatcctgggcttctcggaccacccgggcttcctggtcagaaaggatcaaaaggtgaccctgtccttgctccaggtagtttcaaaggaatgaagggggatcctgggctgcctggactggatggaatcactggcccacaaggagcacccggatttcctggagctgtaggacctgcaggaccaccaggattacaaggtcctccagggcctcctggtcctcttggtcctgatgggaatatggggctaggttttcaaggagagaaaggagtcaagggggatgttggcctccctggcccagcaggacctccaccatctactggagagctggaattcatgggattccccaaagggaagaaaggatccaagggtgaaccagggcctaagggttttccaggcataagtggccctccaggcttcccgggccttggaactactggagaaaagggagaaaagggagaaaagggaatccctggtttgccaggacctaggggtcccatgggttcagaaggagtccaaggccctccagggcaacagggcaagaaagggaccctgggatttcctgggcttaatggattccaaggaattgagggtcaaaagggtgacattggcctgccaggcccagatgttttcatcgatatagatggtgctgtgatctcaggtaatcctggagatcctggtgtacctggcctcccaggccttaaaggagatgaaggcatccaaggcctacgtggcccttctggtgtccctggattgccagcattatcaggtgtcccaggagccctagggcctcagggatttccagggctgaagggggaccaaggaaacccaggccgtaccacaattggagcagctggcctccctggcagagatggtttgccaggcccaccaggtccaccaggcccacctagtccagaatttgagactgaaactctacacaacaaagagtcagggttccctggtctccgaggagaacaaggtccaaaaggaaacctaggcctcaaaggaataaaaggagactcaggtttctgtgcttgtgacggtggtgttcccaacactggaccacccggggaaccaggcccacctggtccatggggtctcataggccttccaggccttaaaggagccagaggagatcgaggctctgggggtgcacagggcccagcaggggctccaggcttagttgggcctctgggtccttcaggacccaaaggaaagaagggggaaccaattctcagtacaatccaaggaatgccaggagatcggggtgattctggctcccagggcttccgtggtgtaataggagaaccaggcaaggacggagtaccaggtttaccaggtctgccaggccttccgggtgatggtggacagggcttcccaggtgaaaaggggttacctggacttcctggtgaaaaaggccatcctggtccacctggcctcccaggaaatgggttaccaggacttcctggaccccgtgggcttcctggagataaaggcaaggatggattaccgggacaacaaggccttcccggatctaagggaatcaccctgccctgtattattcctgggtcatacggtccatcaggatttccaggcactcccggattcccaggccctaaagggtctcgaggcctccctgggaccccaggccagcctgggtcaagtggaagtaaaggagagccagggagtccaggattggttcatcttcctgaattaccaggatttcctggacctcgtggggagaagggcttgcctgggtttcctgggctccctggaaaagatggcttgcctgggatgattggcagtccaggcttacctggttccaagggagccactggtgacatctttggtgctgaaaatggtgctccgggggaacaaggcctacaaggattaacagggcacaaaggatttcttggagactctggccttccaggactcaagggtgtgcacgggaagcctggcttactaggccccaaaggtgagcggggcagccctgggacaccaggacaggtgggacagccaggcaccccaggatctagtggtccatatggcatcaagggcaaatctgggctcccaggagcaccaggcttcccaggcatctcaggacatcctggaaagaaaggaacaagaggcaagaaaggtcctcctggatcaattgtaaagaaagggctgccagggctaaaaggccttcctggaaatccaggcctagtaggactgaaaggaagcccaggctctccaggggtcgctgggttgccagccctctctggacccaagggagagaaggggtctgttggattcgtaggttttccaggaataccaggtctgcctggtattcctggaacaagaggattaaaaggaattccaggatcaactggaaaaatgggaccatctggacgtgctggtactcctggtgaaaagggagacagaggcaatccggggccagtcggaatacctagtccaagacgtccaatgtcaaacctttggctcaaaggagacaaaggctctcaaggctcagccggatccaatggatttcctgggccaagaggtgacaaaggagaggctggtcgacctggaccaccaggcctacctggagctcctggcctcccaggcattatcaaaggagttagtggaaagccagggccccctggcttcatgggaatccggggcttacctggcctgaaggggtcctctgggatcacaggtttcccaggaatgccaggagaaagtggttcacaaggtatcagagggtcgcctggactcccaggagcatctggtctcccaggcctgaaaggagacaacggccagacagttgaaatttccggtagcccaggacccaagggacagcctggcgaatctggttttaaaggcacaaaaggaagagatggactaataggcaatataggcttccctggaaacaaaggtgaagatggaaaagttggtgtttctggagatgttggccttcctggagctccaggatttccaggagttgccggcatgagaggagaaccaggacttccaggttcttctggtcaccaaggggcaattgggcctctaggatcccccggattaataggacccaaaggcttccctggatttcctggtttacatggactgaatgggcttccgggcaccaagggtacccatggcactccaggacctagtatcaccggtgtgcctgggcctgctggtctccctggacccaaaggagaaaaaggatatccaggaattggcatcggagctccagggaagccgggcctgagagggcaaaaaggtgatcgaggtttcccaggtctccagggccctgctggtctccccggtgccccaggcatctccttgccctcactcatagcaggacagcctggtgaccccgggcgaccaggcctagatggagaacgaggccgcccaggccccgctggacccccaggtccccctgggccatcctcgaatcaaggcgacaccggagaccctggcttccctggaattccaggtttttctggcctccctggagagctaggactgaaaggcatgagaggtgagcctggcttcatggggactccaggcaaggttgggccacctggagacccaggatttcccggaatgaaggggaaggcagggccaagaggctcttctggcctccaaggtgatcctggacaaacaccaactgcagaagctgtccaggttcctcctggacccttgggtctaccagggatcgatggcatccctggcctcactggggaccctggggctcaaggccctgtaggcctacaaggctccaaaggtttacctggcatccccggtaaagatggccccagtgggctcccaggcccacctggggctcttggtgatcctggtctgcctggactgcaaggccctccaggatttgaaggagctccagggcagcaaggccccttcgggatgcctggaatgcctggccagagcatgagagtgggctacacgttggtaaagcacagccagtcggaacaggtgcccccgtgtcccatcgggatgagccagctgtgggtggggtacagcttactgtttgtggaggggcaagagaaagcccacaaccaggacctgggctttgctggctcctgtctgccccgcttcagcaccatgcccttcatctactgcaacatcaacgaggtgtgccactatgccaggcgcaatgataaatcttactggctctccactaccgcccctatccccatgatgcccgtcagccagacccagattccccagtacatcagccgctgctctgtgtgtgaggcaccctcgcaagccattgctgtgcacagccaggacatcaccatcccgcagtgccccctgggctggcgcagcctctggattgggtactctttcctcatgcacactgccgctggtgccgagggtggaggccagtccctggtctcacctggctcctgcctagaggactttcgggccactcctttcatcgaatgcagtggtgcccgaggcacctgccactactttgcaaacaagtacagtttctggttgaccacagtggaggagaggcagcagtttggggagttgcctgtgtctgaaacgctgaaagctgggcagctccacactcgagtcagtcgctgccaggtgtgtatgaaaagcctgtagggtggcacctgccactctgccccttgccctcccctgcccctcacaacagtcacctcacaaacctgaatggtctgaagaaggaaggcctgagcccctttgcctgtcaagttgtacattggagtctcatttgggctagactaccggacactcgtcaccccagccctcgggtccatagagatgagcccaccctgctgagatctgctgtcctgtttctgtcaagctggtgctactgtttgatttggatgattgtgtgactattcatggctacctcagaaagatttgatgggccacaactgtcttagactgctagctttctccttaccgtcttgatcggaaagctcttcctaatcgctaatcagtcatttcttcatgtacagaggtcagcacacattatttggcttaaaccagaacccagtgtttccacacttaaattctctaaccgaatattcatggatggctcaagtctgcacagagcaagtcctcactcttcaaggaggcccactgtgtctaggcaggcaagagaattgaaatgaggtgccacccagtagcccagagtgagctttagctctctctagaatgagcaagactgggccccacatggcttagagaggcttgaaggccagcagctgggttgggggtggtggtcattaatggcatatggtcctagacaaaccatctcctccttgccggctccccctccagccagagacagaggatgtggcctggttcaaagtaaagcagaggatgcaacaaatgtggccaagcctatcaaaggaaatgagaatgacagccttttttcctgggccagaagtagaggggtgggtgcgtaaggatgtgtgagttttgcttttgactccaggaacaaaaaggtaaatcccacatcccagtttctcagaagtccctgtttattccaaatgccatccagatgtgtgcaatgtggcaaactgaagctgcacagtgttggtttccttgtattctgaggatgttaaagactttgttaaatggttatccaattgctctttcacaggtagcctattaaactattttaatatgtttttttaaacctcataaaaatctagcacactcttctcttgagcagttagcagacc

SEQ ID NO: 121452 - DNA, 6528 bp, Homo sapiens
  Payload ID: 3813
  Gene Symbol: COL4A6
  Gene Name: collagen, type IV, alpha 6
  ENST ID: ENST00000538570
  CDS Start-End: 235-5136
atggaactatctcctgagtgctgcaagttgtaacgggcaccgctgagcctgtttccctttggagcacttcttatctagaagcagtgtttagtttcttccaaactgggccacttcgtccacctactctgttctgagtaaggaaacagcctccaagcatcagcagagcccagatgagcacgggccgcggagccgcttagcagtctcccgggacccagctccggaggagccgcaagcatgcaccctgggttgtggctgctcctggttacgttgtgcctgaccgaggaactggcagcagcgggagagaagtcttatggaaagccatgtgggggccaggactgcagtgggagctgtcagtgttttcctgagaaaggagcgagaggacgacctggaccaattggaattcaaggcccaacaggtcctcaaggattcactggctctactggtttatcgggattgaaaggagaaaggggtttcccaggccttctgggaccttatggaccaaaaggagataagggtcccatgggagttcctggctttcttggcatcaatgggattccgggccaccctggacaaccaggccccagaggcccacctggtctggatggctgtaatggaactcaaggagctgttggatttccaggccctgatggctatcctgggcttctcggaccacccgggcttcctggtcagaaaggatcaaaaggtgaccctgtccttgctccaggtagtttcaaaggaatgaagggggatcctgggctgcctggactggatggaatcactggcccacaaggagcacccggatttcctggagctgtaggacctgcaggaccaccaggattacaaggtcctccagggcctcctggtcctcttggtcctgatgggaatatggggctaggttttcaaggagagaaaggagtcaagggggatgttggcctccctggcccagcaggacctccaccatctactggagagctggaattcatgggattccccaaagggaagaaaggatccaagggtgaaccagggcctaagggttttccaggcataagtggccctccaggcttcccgggccttggaactactggagaaaagggagaaaagggagaaaagggaatccctggtttgccaggacctaggggtcccatgggttcagaaggagtccaaggccctccagggcaacagggcaagaaagggaccctgggatttcctgggcttaatggattccaaggaattgagggtcaaaagggtgacattggcctgccaggcccagatgttttcatcgatatagatggtgctgtgatctcaggtaatcctggagatcctggtgtacctggcctcccaggccttaaaggagatgaaggcatccaaggcctacgtggcccttctggtgtccctggattgccagcattatcaggtgtcccaggagccctagggcctcagggatttccagggctgaagggggaccaaggaaacccaggccgtaccacaattggagcagctggcctccctggcagagatggtttgccaggcccaccaggtccaccaggcccacctagtccagaatttgagactgaaactctacacaacaaagagtcagggttccctggtctccgaggagaacaaggtccaaaaggaaacctaggcctcaaaggaataaaaggagactcaggtttctgtgcttgtgacggtggtgttcccaacactggaccacccggggaaccaggcccacctggtccatggggtctcataggccttccaggccttaaaggagccagaggagatcgaggctctgggggtgcacagggcccagcaggggctccaggcttagttgggcctctgggtccttcaggacccaaaggaaagaagggggaaccaattctcagtacaatccaaggaatgccaggagatcggggtgattctggctcccagggcttccgtggtgtaataggagaaccaggcaaggacggagtaccaggtttaccaggtctgccaggccttccgggtgatggtggacagggcttcccaggtgaaaaggggttacctggacttcctggtgaaaaaggccatcctggtccacctggcctcccaggaaatgggttaccaggacttcctggaccccgtgggcttcctggagataaaggcaaggatggattaccgggacaacaaggccttcccggatctaagggaatcaccctgccctgtattattcctgggtcatacggtccatcaggatttccaggcactcccggattcccaggccctaaagggtctcgaggcctccctgggaccccaggccagcctgggtcaagtggaagtaaaggagagccagggagtccaggattggttcatcttcctgaattaccaggatttcctggacctcgtggggagaagggcttgcctgggtttcctgggctccctggaaaagatggcttgcctgggatgattggcagtccaggcttacctggttccaagggagccactggtgacatctttggtgctgaaaatggtgctccgggggaacaaggcctacaaggattaacagggcacaaaggatttcttggagactctggccttccaggactcaagggtgtgcacgggaagcctggcttactaggccccaaaggtgagcggggcagccctgggacaccaggacaggtgggacagccaggcaccccaggatctagtggtccatatggcatcaagggcaaatctgggctcccaggagcaccaggcttcccaggcatctcaggacatcctggaaagaaaggaacaagaggcaagaaaggtcctcctggatcaattgtaaagaaagggctgccagggctaaaaggccttcctggaaatccaggcctagtaggactgaaaggaagcccaggctctccaggggtcgctgggttgccagccctctctggacccaagggagagaaggggtctgttggattcgtaggttttccaggaataccaggtctgcctggtattcctggaacaagaggattaaaaggaattccaggatcaactggaaaaatgggaccatctggacgtgctggtactcctggtgaaaagggagacagaggcaatccggggccagtcggaatacctagtccaagacgtccaatgtcaaacctttggctcaaaggagacaaaggctctcaaggctcagccggatccaatggatttcctgggccaagaggtgacaaaggagaggctggtcgacctggaccaccaggcctacctggagctcctggcctcccaggcattatcaaaggagttagtggaaagccagggccccctggcttcatgggaatccggggcttacctggcctgaaggggtcctctgggatcacaggtttcccaggaatgccaggagaaagtggttcacaaggtatcagagggtcgcctggactcccaggagcatctggtctcccaggcctgaaaggagacaacggccagacagttgaaatttccggtagcccaggacccaagggacagcctggcgaatctggttttaaaggcacaaaaggaagagatggactaataggcaatataggcttccctggaaacaaaggtgaagatggaaaagttggtgtttctggagatgttggccttcctggagctccaggatttccaggagttgccggcatgagaggagaaccaggacttccaggttcttctggtcaccaaggggcaattgggcctctaggatcccccggattaataggacccaaaggacctagtatcaccggtgtgcctgggcctgctggtctccctggacccaaaggagaaaaaggatatccaggaattggcatcggagctccagggaagccgggcctgagagggcaaaaaggtgatcgaggtttcccaggtctccagggccctgctggtctccccggtgccccaggcatctccttgccctcactcatagcaggacagcctggtgaccccgggcgaccaggcctagatggagaacgaggccgcccaggccccgctggacccccaggtccccctgggccatcctcgaatcaaggcgacaccggagaccctggcttccctggaattcctggacctaaagggcctaagggagaccaaggaattccaggtttttctggcctccctggagagctaggactgaaaggctcttctggcctccaaggtgatcctggacaaacaccaactgcagaagctgtccaggttcctcctggacccttgggtctaccagggatcgatggcatccctggcctcactggggaccctggggctcaaggccctgtaggcctacaaggctccaaaggtttacctggcatccccggtaaagatggccccagtgggctcccaggcccacctggggctcttggtgatcctggtctgcctggactgcaaggccctccaggatttgaaggagctccagggcagcaaggccccttcgggatgcctggaatgcctggccagagcatgagagtgggctacacgttggtaaagcacagccagtcggaacaggtgcccccgtgtcccatcgggatgagccagctgtgggtggggtacagcttactgtttgtggaggggcaagagaaagcccacaaccaggacctgggctttgctggctcctgtctgccccgcttcagcaccatgcccttcatctactgcaacatcaacgaggtgtgccactatgccaggcgcaatgataaatcttactggctctccactaccgcccctatccccatgatgcccgtcagccagacccagattccccagtacatcagccgctgctctgtgtgtgaggcaccctcgcaagccattgctgtgcacagccaggacatcaccatcccgcagtgccccctgggctggcgcagcctctggattgggtactctttcctcatgcacactgccgctggtgccgagggtggaggccagtccctggtctcacctggctcctgcctagaggactttcgggccactcctttcatcgaatgcagtggtgcccgaggcacctgccactactttgcaaacaagtacagtttctggttgaccacagtggaggagaggcagcagtttggggagttgcctgtgtctgaaacgctgaaagctgggcagctccacactcgagtcagtcgctgccaggtgtgtatgaaaagcctgtagggtggcacctgccactctgccccttgccctcccctgcccctcacaacagtcacctcacaaacctgaatggtctgaagaaggaaggcctgagcccctttgcctgtcaagttgtacattggagtctcatttgggctagactaccggacactcgtcaccccagccctcgggtccatagagatgagcccaccctgctgagatctgctgtcctgtttctgtcaagctggtgctactgtttgatttggatgattgtgtgactattcatggctacctcagaaagatttgatgggccacaactgtcttagactgctagctttctccttaccgtcttgatcggaaagctcttcctaatcgctaatcagtcatttcttcatgtacagaggtcagcacacattatttggcttaaaccagaacccagtgtttccacacttaaattctctaaccgaatattcatggatggctcaagtctgcacagagcaagtcctcactcttcaaggaggcccactgtgtctaggcaggcaagagaattgaaatgaggtgccacccagtagcccagagtgagctttagctctctctagaatgagcaagactgggccccacatggcttagagaggcttgaaggccagcagctgggttgggggtggtggtcattaatggcatatggtcctagacaaaccatctcctccttgccggctccccctccagccagagacagaggatgtggcctggttcaaagtaaagcagaggatgcaacaaatgtggccaagcctatcaaaggaaatgagaatgacagccttttttcctgggccagaagtagaggggtgggtgcgtaaggatgtgtgagttttgcttttgactccaggaacaaaaaggtaaatcccacatcccagtttctcagaagtccctgtttattccaaatgccatccagatgtgtgcaatgtggcaaactgaagctgcacagtgttggtttccttgtattctgaggatgttaaagactttgttaaatggttatccaattgctctttcacaggtagcctattaaactattttaatatgtttttttaaacctcataaaaatctagcacactcttctcttgagcagttagcagacctaaagcaagcctgaattggctatgcagtacattgtattctgtttgggggaatttgttttagccattttctttaattaccagttttccagaacactcttagctatgttgacatgaggcagttccttccaggtgattctgtttccttaagtattatataaactgtgccaatacagacaaagcataatcaatataatctgaattattgttatctttacctcctgagtaataagcatggtgtcagttttgtacatagcaaataaaataaatgaaatctgaacatgtg

SEQ ID NO: 121453 - DNA, 6627 bp, Homo sapiens
  Payload ID: 3813
  Gene Symbol: COL4A6
  Gene Name: collagen, type IV, alpha 6
  ENST ID: ENST00000621266
  CDS Start-End: 235-5235
atggaactatctcctgagtgctgcaagttgtaacgggcaccgctgagcctgtttccctttggagcacttcttatctagaagcagtgtttagtttcttccaaactgggccacttcgtccacctactctgttctgagtaaggaaacagcctccaagcatcagcagagcccagatgagcacgggccgcggagccgcttagcagtctcccgggacccagctccggaggagccgcaagcatgcaccctgggttgtggctgctcctggttacgttgtgcctgaccgaggaactggcagcagcgggagagaagtcttatggaaagccatgtgggggccaggactgcagtgggagctgtcagtgttttcctgagaaaggagcgagaggacgacctggaccaattggaattcaaggcccaacaggtcctcaaggattcactggctctactggtttatcgggattgaaaggagaaaggggtttcccaggccttctgggaccttatggaccaaaaggagataagggtcccatgggagttcctggctttcttggcatcaatgggattccgggccaccctggacaaccaggccccagaggcccacctggtctggatggctgtaatggaactcaaggagctgttggatttccaggccctgatggctatcctgggcttctcggaccacccgggcttcctggtcagaaaggatcaaaaggtgaccctgtccttgctccaggtagtttcaaaggaatgaagggggatcctgggctgcctggactggatggaatcactggcccacaaggagcacccggatttcctggagctgtaggacctgcaggaccaccaggattacaaggtcctccagggcctcctggtcctcttggtcctgatgggaatatggggctaggttttcaaggagagaaaggagtcaagggggatgttggcctccctggcccagcaggacctccaccatctactggagagctggaattcatgggattccccaaagggaagaaaggatccaagggtgaaccagggcctaagggttttccaggcataagtggccctccaggcttcccgggccttggaactactggagaaaagggagaaaagggagaaaagggaatccctggtttgccaggacctaggggtcccatgggttcagaaggagtccaaggccctccagggcaacagggcaagaaagggaccctgggatttcctgggcttaatggattccaaggaattgagggtcaaaagggtgacattggcctgccaggcccagatgttttcatcgatatagatggtgctgtgatctcaggtaatcctggagatcctggtgtacctggcctcccaggccttaaaggagatgaaggcatccaaggcctacgtggcccttctggtgtccctggattgccagcattatcaggtgtcccaggagccctagggcctcagggatttccagggctgaagggggaccaaggaaacccaggccgtaccacaattggagcagctggcctccctggcagagatggtttgccaggcccaccaggtccaccaggcccacctagtccagaatttgagactgaaactctacacaacaaagagtcagggttccctggtctccgaggagaacaaggtccaaaaggaaacctaggcctcaaaggaataaaaggagactcaggtttctgtgcttgtgacggtggtgttcccaacactggaccacccggggaaccaggcccacctggtccatggggtctcataggccttccaggccttaaaggagccagaggagatcgaggctctgggggtgcacagggcccagcaggggctccaggcttagttgggcctctgggtccttcaggacccaaaggaaagaagggggaaccaattctcagtacaatccaaggaatgccaggagatcggggtgattctggctcccagggcttccgtggtgtaataggagaaccaggcaaggacggagtaccaggtttaccaggtctgccaggccttccgggtgatggtggacagggcttcccaggtgaaaaggggttacctggacttcctggtgaaaaaggccatcctggtccacctggcctcccaggaaatgggttaccaggacttcctggaccccgtgggcttcctggagataaaggcaaggatggattaccgggacaacaaggccttcccggatctaagggaatcaccctgccctgtattattcctgggtcatacggtccatcaggatttccaggcactcccggattcccaggccctaaagggtctcgaggcctccctgggaccccaggccagcctgggtcaagtggaagtaaaggagagccagggagtccaggattggttcatcttcctgaattaccaggatttcctggacctcgtggggagaagggcttgcctgggtttcctgggctccctggaaaagatggcttgcctgggatgattggcagtccaggcttacctggttccaagggagccactggtgacatctttggtgctgaaaatggtgctccgggggaacaaggcctacaaggattaacagggcacaaaggatttcttggagactctggccttccaggactcaagggtgtgcacgggaagcctggcttactaggccccaaaggtgagcggggcagccctgggacaccaggacaggtgggacagccaggcaccccaggatctagtggtccatatggcatcaagggcaaatctgggctcccaggagcaccaggcttcccaggcatctcaggacatcctggaaagaaaggaacaagaggcaagaaaggtcctcctggatcaattgtaaagaaagggctgccagggctaaaaggccttcctggaaatccaggcctagtaggactgaaaggaagcccaggctctccaggggtcgctgggttgccagccctctctggacccaagggagagaaggggtctgttggattcgtaggttttccaggaataccaggtctgcctggtattcctggaacaagaggattaaaaggaattccaggatcaactggaaaaatgggaccatctggacgtgctggtactcctggtgaaaagggagacagaggcaatccggggccagtcggaatacctagtccaagacgtccaatgtcaaacctttggctcaaaggagacaaaggctctcaaggctcagccggatccaatggatttcctgggccaagaggtgacaaaggagaggctggtcgacctggaccaccaggcctacctggagctcctggcctcccaggcattatcaaaggagttagtggaaagccagggccccctggcttcatgggaatccggggcttacctggcctgaaggggtcctctgggatcacaggtttcccaggaatgccaggagaaagtggttcacaaggtatcagagggtcgcctggactcccaggagcatctggtctcccaggcctgaaaggagacaacggccagacagttgaaatttccggtagcccaggacccaagggacagcctggcgaatctggttttaaaggcacaaaaggaagagatggactaataggcaatataggcttccctggaaacaaaggtgaagatggaaaagttggtgtttctggagatgttggccttcctggagctccaggatttccaggagttgccggcatgagaggagaaccaggacttccaggttcttctggtcaccaaggggcaattgggcctctaggatcccccggattaataggacccaaaggacctagtatcaccggtgtgcctgggcctgctggtctccctggacccaaaggagaaaaaggatatccaggaattggcatcggagctccagggaagccgggcctgagagggcaaaaaggtgatcgaggtttcccaggtctccagggccctgctggtctccccggtgccccaggcatctccttgccctcactcatagcaggacagcctggtgaccccgggcgaccaggcctagatggagaacgaggccgcccaggccccgctggacccccaggtccccctgggccatcctcgaatcaaggcgacaccggagaccctggcttccctggaattcctggacctaaagggcctaagggagaccaaggaattccaggtttttctggcctccctggagagctaggactgaaaggcatgagaggtgagcctggcttcatggggactccaggcaaggttgggccacctggagacccaggatttcccggaatgaaggggaaggcagggccaagaggctcttctggcctccaaggtgatcctggacaaacaccaactgcagaagctgtccaggttcctcctggacccttgggtctaccagggatcgatggcatccctggcctcactggggaccctggggctcaaggccctgtaggcctacaaggctccaaaggtttacctggcatccccggtaaagatggccccagtgggctcccaggcccacctggggctcttggtgatcctggtctgcctggactgcaaggccctccaggatttgaaggagctccagggcagcaaggccccttcgggatgcctggaatgcctggccagagcatgagagtgggctacacgttggtaaagcacagccagtcggaacaggtgcccccgtgtcccatcgggatgagccagctgtgggtggggtacagcttactgtttgtggaggggcaagagaaagcccacaaccaggacctgggctttgctggctcctgtctgccccgcttcagcaccatgcccttcatctactgcaacatcaacgaggtgtgccactatgccaggcgcaatgataaatcttactggctctccactaccgcccctatccccatgatgcccgtcagccagacccagattccccagtacatcagccgctgctctgtgtgtgaggcaccctcgcaagccattgctgtgcacagccaggacatcaccatcccgcagtgccccctgggctggcgcagcctctggattgggtactctttcctcatgcacactgccgctggtgccgagggtggaggccagtccctggtctcacctggctcctgcctagaggactttcgggccactcctttcatcgaatgcagtggtgcccgaggcacctgccactactttgcaaacaagtacagtttctggttgaccacagtggaggagaggcagcagtttggggagttgcctgtgtctgaaacgctgaaagctgggcagctccacactcgagtcagtcgctgccaggtgtgtatgaaaagcctgtagggtggcacctgccactctgccccttgccctcccctgcccctcacaacagtcacctcacaaacctgaatggtctgaagaaggaaggcctgagcccctttgcctgtcaagttgtacattggagtctcatttgggctagactaccggacactcgtcaccccagccctcgggtccatagagatgagcccaccctgctgagatctgctgtcctgtttctgtcaagctggtgctactgtttgatttggatgattgtgtgactattcatggctacctcagaaagatttgatgggccacaactgtcttagactgctagctttctccttaccgtcttgatcggaaagctcttcctaatcgctaatcagtcatttcttcatgtacagaggtcagcacacattatttggcttaaaccagaacccagtgtttccacacttaaattctctaaccgaatattcatggatggctcaagtctgcacagagcaagtcctcactcttcaaggaggcccactgtgtctaggcaggcaagagaattgaaatgaggtgccacccagtagcccagagtgagctttagctctctctagaatgagcaagactgggccccacatggcttagagaggcttgaaggccagcagctgggttgggggtggtggtcattaatggcatatggtcctagacaaaccatctcctccttgccggctccccctccagccagagacagaggatgtggcctggttcaaagtaaagcagaggatgcaacaaatgtggccaagcctatcaaaggaaatgagaatgacagccttttttcctgggccagaagtagaggggtgggtgcgtaaggatgtgtgagttttgcttttgactccaggaacaaaaaggtaaatcccacatcccagtttctcagaagtccctgtttattccaaatgccatccagatgtgtgcaatgtggcaaactgaagctgcacagtgttggtttccttgtattctgaggatgttaaagactttgttaaatggttatccaattgctctttcacaggtagcctattaaactattttaatatgtttttttaaacctcataaaaatctagcacactcttctcttgagcagttagcagacctaaagcaagcctgaattggctatgcagtacattgtattctgtttgggggaatttgttttagccattttctttaattaccagttttccagaacactcttagctatgttgacatgaggcagttccttccaggtgattctgtttccttaagtattatataaactgtgccaatacagacaaagcataatcaatataatctgaattattgttatctttacctcctgagtaataagcatggtgtcagttttgtacatagcaaataaaataaatgaaatctgaacatgtg

SEQ ID NO: 121454 - DNA, 3059 bp, Homo sapiens
  Payload ID: 3814
  Gene Symbol: COL9A1
  Gene Name: collagen, type IX, alpha 1
  Uniprot ID: P20849
  ENST ID: ENST00000320755
  CDS Start-End: 158-2194
cgcgcgcctcccgggcctggacgctttggcaaccgctactcccgggggtgctttttctgcagggacgaagtgccacctatgctagtggcgggtctggaagcctagaggggaaccaggctgcagagccgggccaagggattagcggcgggcggcgggcatggcctggactgcgcgggaccgcggggccctggggctgctgctgttggggctctgcttgtgcgcggctcaaagaggtcccccgggtgagcagggtcctcccgggcctccgggcccccctggagttccaggcatcgatggcatcgacggtgaccgaggtcctaagggccccccgggccccccgggtcctgcaggtgaaccgggaaagccaggagctccaggcaagcctggcacacctggcgctgatggattaacaggacctgatggatcccctggctccattgggtcaaagggacaaaaaggagaacctggtgtgcctggatcgcgtggatttccaggccgtggtattcctggaccccctggtcctcctgggacagcaggactccctggagagcttggccgtgtaggacctgttggtgaccctgggagaagaggaccacctggcccccctggccccccaggacccagaggaacaattggctttcatgatggagatccattgtgtcccaatgcctgtccaccaggtcgctcaggatatccaggcctaccaggcatgaggggtcataaaggggctaaaggagaaattggtgaaccaggaagacaaggacacaagggtgaagaaggtgaccagggagaactcggagaagttggagctcaaggacctccaggagcccagggtttgcgaggcatcaccggcatagttggggacaaaggggaaaaaggtgctcggggcttagatggtgaacctgggcctcagggtcttcctggtgcacctggtgatcaaggacagcgaggacctccaggagaagcaggtcccaaaggagatagaggggctgaaggtgctagaggaattcctggtctccctgggcccaaaggagacacgggtttgccaggtgtggatggccgtgatgggatccctggaatgcctggaacaaagggtgaaccaggaaaacctgggcctcctggtgatgcaggattgcaggggttaccaggtgtacctggaattcctggtgcaaagggtgttgctggtgaaaagggtagcacaggtgctccagggaagcctggtcagatgggaaattcaggcaaaccgggccaacaggggcctccaggagaggtgggaccccgaggaccccaggggcttcctggcagtagaggagaattaggaccagtgggatccccaggcctaccaggtaaactgggttctctgggtagccctggcctccctggcttgcctgggccccctggacttcctggaatgaaaggtgacaggggtgtagtcggtgaaccgggtccaaagggtgaacagggtgcctctggtgaagaaggtgaagcaggagaaaggggggaacttggagatataggattacctggcccaaagggatctgcaggtaatcctggggaacctggcttgagagggcctgagggaagtcgggggcttcctggagtggaaggaccaagaggaccacctggaccccggggtgtgcagggagaacagggtgccaccggcctgcctggtgtccagggccctccgggtagagcaccgacagatcagcacattaagcaggtttgcatgagagtcatacaagaacattttgctgagatggctgccagtcttaagcgtccagactcaggtgccactgggcttcctggaaggcctggccctcctggtccccccggccctcctggagagaatggtttcccaggccagatgggaattcgtggccttccgggcattaaggggccccctggtgctcttggtttgaggggacctaaaggtgacttgggagaaaagggggagcgtggccctccaggaagaggtcccaacggtttgcctggagctataggtctcccaggtgacccaggccctgccagctatggcagaaatggccgagacggtgagcgaggccccccaggggtggcaggaattcctggagtgcctggacccccgggacctcctgggcttcccggtttctgtgagccagcctcctgcaccatgcaggctggtcagcgagcatttaacaaagggcctgacccttgaaaggcttactgctgcatggctgtctgcatgaaccacgcctggtgaaggagcctgggtgagaaacaccatccaaagctggggcaaagatgattaccttcagcatgattacaatgtattaccttcagtatgattacagaagtcctacttgacaatcacatatagaagaacggtgctattcagtaagttctctttcctttcccttggagggaagacagcagagtcatcagttaaaaaaaaaaaaagaaaaccaaacacctcccttgaataaatttatactcctgttcccaggatcttgagctttagtgtgctatacctatgtgtcttatcgtgggccactgtgccaataaacaaaaacaactgtttggtttacctcagttgcagtagttattttcatttagaagttgttctcagattattgtttcagttatatagaggattactagactagttatgaagaaaccccactacattcaatggaattggtgcttaaaatctcatcgatgtgctgtctctggagtgataagaaagggctacatctcccgaaatgatttctttacgtcatgtattggtttccttcttcaccttgaacttttgttgaactgtatgtactttaccccaaacctgttaatattttgagcgcttctatgtgaaagcaaagaaataattttaatactctggcattcataaattttattgatgagattatttattttaaaggtttgaggtaacatctctggttgtaccaaagaagaaataaatatggtttcttaatctcttgcatgttttcttataaataatcatgttcaatgaaaagaagttactgagcttatttagatacattaaacattacttaactactggttct

SEQ ID NO: 121455 - DNA, 4761 bp, Homo sapiens
  Payload ID: 3814
  Gene Symbol: COL9A1
  Gene Name: collagen, type IX, alpha 1
  Uniprot ID: P20849
  ENST ID: ENST00000357250
  CDS Start-End: 160-2925
cctttgcttttagccctcaccgggggcaggagggaccaaggctgggcccagaacacatagtcctagggtaacagtgaaggggtcgtgaggggacagtgactcccttccaaccccttcttcatagggactgttggcaaacaaagaaaatcaactgggaaaatgaagacctgctggaaaattccagttttcttctttgtgtgcagtttcctggaaccctgggcatctgcagctgtcaagcgtcgccccagattccctgtcaattccaattctaatggtggaaatgaactctgtccaaagatcaggattggccaagatgacttaccagggtttgatctgatctctcagttccaggtagataaagcagcatctagaagagctatccagagagtagtgggatcagctacattgcaggtggcttacaagttgggaaataatgtagacttcaggattccaactaggaatttatatcccagtggactgcctgaagaatactccttcttgacgacgtttcgaatgactggaagcactctcaaaaagaactggaacatttggcagattcaggattcctctgggaaggagcaagttggcataaagattaatggccaaacacaatctgttgtattttcatacaagggactggatggaagtctccaaacagcagccttttcgaatttgtcctccttgtttgattcccagtggcataagatcatgattggcgtggagaggagtagtgctactctttttgttgactgcaacaggattgaatctttacctataaagccaagaggcccaattgacattgatggctttgctgtgctgggaaaacttgcagataatcctcaagtttctgttccatttgaacttcaatggatgctgatccattgtgaccccctgcggcccaggagagaaacttgccatgagctgccagccagaataacgcccagccagaccaccgacgagagaggtcccccgggtgagcagggtcctcccgggcctccgggcccccctggagttccaggcatcgatggcatcgacggtgaccgaggtcctaagggccccccgggccccccgggtcctgcaggtgaaccgggaaagccaggagctccaggcaagcctggcacacctggcgctgatggattaacaggacctgatggatcccctggctccattgggtcaaagggacaaaaaggagaacctggtgtgcctggatcgcgtggatttccaggccgtggtattcctggaccccctggtcctcctgggacagcaggactccctggagagcttggccgtgtaggacctgttggtgaccctgggagaagaggaccacctggcccccctggccccccaggacccagaggaacaattggctttcatgatggagatccattgtgtcccaatgcctgtccaccaggtcgctcaggatatccaggcctaccaggcatgaggggtcataaaggggctaaaggagaaattggtgaaccaggaagacaaggacacaagggtgaagaaggtgaccagggagaactcggagaagttggagctcaaggacctccaggagcccagggtttgcgaggcatcaccggcatagttggggacaaaggggaaaaaggtgctcggggcttagatggtgaacctgggcctcagggtcttcctggtgcacctggtgatcaaggacagcgaggacctccaggagaagcaggtcccaaaggagatagaggggctgaaggtgctagaggaattcctggtctccctgggcccaaaggagacacgggtttgccaggtgtggatggccgtgatgggatccctggaatgcctggaacaaagggtgaaccaggaaaacctgggcctcctggtgatgcaggattgcaggggttaccaggtgtacctggaattcctggtgcaaagggtgttgctggtgaaaagggtagcacaggtgctccagggaagcctggtcagatgggaaattcaggcaaaccgggccaacaggggcctccaggagaggtgggaccccgaggaccccaggggcttcctggcagtagaggagaattaggaccagtgggatccccaggcctaccaggtaaactgggttctctgggtagccctggcctccctggcttgcctgggccccctggacttcctggaatgaaaggtgacaggggtgtagtcggtgaaccgggtccaaagggtgaacagggtgcctctggtgaagaaggtgaagcaggagaaaggggggaacttggagatataggattacctggcccaaagggatctgcaggtaatcctggggaacctggcttgagagggcctgagggaagtcgggggcttcctggagtggaaggaccaagaggaccacctggaccccggggtgtgcagggagaacagggtgccaccggcctgcctggtgtccagggccctccgggtagagcaccgacagatcagcacattaagcaggtttgcatgagagtcatacaagaacattttgctgagatggctgccagtcttaagcgtccagactcaggtgccactgggcttcctggaaggcctggccctcctggtccccccggccctcctggagagaatggtttcccaggccagatgggaattcgtggccttccgggcattaaggggccccctggtgctcttggtttgaggggacctaaaggtgacttgggagaaaagggggagcgtggccctccaggaagaggtcccaacggtttgcctggagctataggtctcccaggtgacccaggccctgccagctatggcagaaatggccgagacggtgagcgaggccccccaggggtggcaggaattcctggagtgcctggacccccgggacctcctgggcttcccggtttctgtgagccagcctcctgcaccatgcaggctggtcagcgagcatttaacaaagggcctgacccttgaaaggcttactgctgcatggctgtctgcatgaaccacgcctggtgaaggagcctgggtgagaaacaccatccaaagctggggcaaagatgattaccttcagcatgattacaatgtattaccttcagtatgattacagaagtcctacttgacaatcacatatagaagaacggtgctattcagtaagttctctttcctttcccttggagggaagacagcagagtcatcagttaaaaaaaaaaaaagaaaaccaaacacctcccttgaataaatttatactcctgttcccaggatcttgagctttagtgtgctatacctatgtgtcttatcgtgggccactgtgccaataaacaaaaacaactgtttggtttacctcagttgcagtagttattttcatttagaagttgttctcagattattgtttcagttatatagaggattactagactagttatgaagaaaccccactacattcaatggaattggtgcttaaaatctcatcgatgtgctgtctctggagtgataagaaagggctacatctcccgaaatgatttctttacgtcatgtattggtttccttcttcaccttgaacttttgttgaactgtatgtactttaccccaaacctgttaatattttgagcgcttctatgtgaaagcaaagaaataattttaatactctggcattcataaattttattgatgagattatttattttaaaggtttgaggtaacatctctggttgtaccaaagaagaaataaatatggtttcttaatctcttgcatgttttcttataaataatcatgttcaatgaaaagaagttactgagcttatttagatacattaaacattacttaactactggttctataggtgtatgtttataatattagtgttttttctacataaagtaatttaaaaagctgttccacagagggtgttaccctgtgacagatgcgtatgtgtgtgtgtgtgtgtgtgtgtgtgttttagtgtgtatggagagagcttcatggaccttttcgaaatgttaattccctagaaagatgtgcagctgcatgcgcatctatatttttgtatagtatttcagagatttcgtggacttttttaagtctagccttgctttatttctaggttaagaaccactgccttcattccaatggcttgttagctccctcctactcagaactttattgtaaacatgatttatgtttcaccatttcttgtaaattttataaatgcagctcagctaaagcactgtattcttaacaagtatttcctgaccacttaagcactttattattatctgtgtaatcatattggcttgctgtttcattaacatctacttaactatccaacagacttaatatattcattttatatcacagagcctgtgagtaacctgtgctggggcataaaacaatagctcaacatagtatctttagttagtttatggaactaaattctgtcaagtcaaaggagagtgagccctaatataattttttatatatatttttctcgtgtgtacttttatacattttaaattctagtcctagttgtttggttaaatcaatcattatgtaatctgtatttggatttctttaaaactgcttacagcatctagttttatgcttctagcatgaattttgcttaagaagattccaactttgccatatagatcagtgctatttacatagactgaaagaatgttctttcccttttttcaaatatgacttttgaaaataaaggtctctgttatagctccctaaaacaatccttaaaaaaatggcaaactttttcaggagctgtgacacataattaaataaaggcatagaaatta

SEQ ID NO: 121456 - DNA, 1372 bp, Homo sapiens
  Payload ID: 3814
  Gene Symbol: COL9A1
  Gene Name: collagen, type IX, alpha 1
  Uniprot ID: P20849
  ENST ID: ENST00000370496
  CDS Start-End: 147-1133
ccctcaccgggggcaggagggaccaaggctgggcccagaacacatagtcctagggtaacagtgaaggggtcgtgaggggacagtgactcccttccaaccccttcttcatagggactgttggcaaacaaagaaaatcaactgggaaaatgaagacctgctggaaaattccagttttcttctttgtgtgcagtttcctggaaccctgggcatctgcagctgtcaagcgtcgccccagattccctgtcaattccaattctaatggtggaaatgaactctgtccaaagatcaggattggccaagatgacttaccagggtttgatctgatctctcagttccaggtagataaagcagcatctagaagagctatccagagagtagtgggatcagctacattgcaggtggcttacaagttgggaaataatgtagacttcaggattccaactaggaatttatatcccagtggactgcctgaagaatactccttcttgacgacgtttcgaatgactggaagcactctcaaaaagaactggaacatttggcagattcaggattcctctgggaaggagcaagttggcataaagattaatggccaaacacaatctgttgtattttcatacaagggactggatggaagtctccaaacagcagccttttcgaatttgtcctccttgtttgattcccagtggcataagatcatgattggcgtggagaggagtagtgctactctttttgttgactgcaacaggattgaatctttacctataaagccaagaggcccaattgacattgatggctttgctgtgctgggaaaacttgcagataatcctcaagtttctgttccatttgaacttcaatggatgctgatccattgtgaccccctgcggcccaggagagaaacttgccatgagctgccagccagaataacgcccagccagaccaccgacgagagaggtcccccgggtgagcagggtcctcccgggcctccgggcccccctggagttccaggcatcgatggcatcgacggtgaccgaggtcctaagggccccccgggccccccgggtcctgcaggtgaaccgggaaagccaggagctccaggcaagcctggcacacctggcgctgataccagtccttgattttgtccctggaatatgaagtgaagtaagaaatggcgtctgttcttagcataccatggtgcatcactcaagttactcttcaagttaccactttatgtgttttccaaaaactaaagacttttctaaatgaaagaaagcactcgaaaacctataattatgatttccaagaatttttgactacagtttaagacatatccttcattttgaaagaaaaataaataactggatttttactgtta

SEQ ID NO: 121457 - DNA, 319 bp, Homo sapiens
  Payload ID: 3815
  Gene Symbol: COL9A2
  Gene Name: collagen, type IX, alpha 2
  ENST ID: ENST00000372736
  CDS Start-End: 71-319
agcgccgggagactctgccgtcggtgcgtgcgcggacacgcacccgtcccccttggtctcgccgccagccatggccgccgctacggcctccccccgcagcctccttgttctcctccaggtggtagtgctcgctctggcgcagattagaggtccaccgggagagcggggccccccgggtcccccgggaccgccgggagtgcctggatccgacggcatcgacgggcctcctggacctgttggcctccctggtgagattggaatccgaggccccaagggggaccctggaccagatggaccatcggggcccccaggaccccct

SEQ ID NO: 121458 - DNA, 2862 bp, Homo sapiens
  Payload ID: 3815
  Gene Symbol: COL9A2
  Gene Name: collagen, type IX, alpha 2
  Uniprot ID: Q14055
  ENST ID: ENST00000372748
  CDS Start-End: 98-2167
ctgcccgcgaacagccagcgctggaggagcgccgggagactctgccgtcggtgcgtgcgcggacacgcacccgtcccccttggtctcgccgccagccatggccgccgctacggcctccccccgcagcctccttgttctcctccaggtggtagtgctcgctctggcgcagattagaggtccaccgggagagcggggccccccgggtcccccgggaccgccgggagtgcctggatccgacggcatcgacggtgacaatgggccccctggaaaagctggccctccgggacccaagggcgagcctggcaaagctgggccagatgggccagacgggaagcccgggattgatggtttaactggagccaagggggagcctggccccatggggatccctggagtcaagggccagcccgggcttcctggtcctcctggccttccgggccctggttttgctggacctcctgggcctcctggacctgttggcctccctggtgagattggaatccgaggccccaagggggaccctggaccagatggaccatcggggcccccaggaccccctgggaaacctggtcgcccgggaaccatccagggtctggaaggcagtgcggatttcctgtgtccaaccaactgtccacccggaatgaaaggtcccccagggctgcagggagtgaaggggcatgcgggcaaacgcgggattctgggtgatcctggccaccaggggaagccgggtcccaagggagatgtgggtgcctctggagagcaaggcatccctggaccaccgggtccccagggcatcaggggctacccaggcatggcagggcccaagggagagacgggccctcatggatataaaggcatggtgggcgctatcggtgccactgggccaccgggtgaggaaggtcctaggggaccgccaggccgagctggggagaagggtgacgagggcagcccaggtattcgtggaccccaggggatcacaggcccgaaaggagcaacgggccccccaggcatcaacggcaaggatgggaccccaggcacgcctggcatgaagggcagtgcaggacaggcgggacagcccggaagtccaggccaccagggcctagcgggtgtgccaggccagcctgggacaaaaggaggccctggagaccagggtgagccgggcccgcagggccttcctggattctctggtccccctgggaaagagggagagccagggcctcgaggagaaattggtccccagggcatcatgggacagaagggtgaccaaggcgagaggggtccagtggggcaaccaggccctcagggaaggcagggccctaagggggagcagggcccccccggaattccagggccccaaggcttgccaggcgtcaaaggagacaagggctccccagggaagaccgggccccgcggcaaagtgggtgacccaggggtggccggcctccccggagagaaaggcgagaagggcgagtccggcgagccggggcccaagggacagcaaggagtacgtggagaacccggctaccctggccccagcggggatgcgggcgccccaggggttcagggctaccctggtccccccggccctcgaggactggccgggaaccgaggcgtgccaggacagcccgggagacagggcgtggagggccgggatgccactgaccagcacatcgtggatgtggcgctgaagatgctgcaagagcaactggcagaggtcgccgtgagtgccaagcgggaagccctgggtgcggtgggcatgatgggtcctccaggacctcctgggccccctgggtacccaggcaagcagggcccccatgggcaccctggccctcggggcgttcctggcatcgtgggagccgtgggtcagatcggcaacacggggcccaagggaaaacgtggagagaagggtgatccaggagaagtgggacgggggcaccccgggatgcctgggcccccagggatcccaggactccctggccggcctggccaggcaatcaacggcaaggatggagatcgagggtccccaggggctccaggagaggcaggtcgacctggcctgccaggccccgtggggctgccgggcttctgtgaacctgccgcctgccttggagcttcggcctatgcctctgcccgccttacagagcctggatccatcaaggggccttgagcatcaggcccagacagagcctggcaggcatcctggcgggaaggaccaggtcccctctgggtggacatgcacccatccccagtccaggaaaccatctcccccaggaccttctgtctgggactcaggagtcctaaggaaaaggaattctaaaacatgggggaaggggaggtagagcactgatgggtgaaaaagtgaggccaacacacagggcaagtggtgtcgatggagtcgaagcgctgaaggaatagggcggctttccttccagcgagcatcattcggctgttaccaaaacaaacatcttaatctgcacctttctccactggccatcttgtccttgggtcagtgggacatgggcacctcgggaggcccgggccctgcccagctacagttccacccctcagcttgaggaccaatgactgaggtctatgccagttcctgatcccatctcactctctggacctaccaggtgactgctgctgggtgactcccctgaggcggctatacccttaagccagccccactacttccttccctgcctcccagctcagtatttaaacatcatctcccttctctttctcgcataactccccacccctttctccccgatccacccaggcctttctgtaaataaaagctcccaagttgggtacaaaccaggatattggagttactctatcctggagttaactaggata

SEQ ID NO: 121459 - DNA, 677 bp, Homo sapiens
  Payload ID: 3815
  Gene Symbol: COL9A2
  Gene Name: collagen, type IX, alpha 2
  ENST ID: ENST00000417105
  CDS Start-End: 1-677
gtctcccttccgagggccgccgggggctgcgggcgcgcggagaggtccaccgggagagcggggccccccgggtcccccgggaccgccgggagtgcctggatccgacggcatcgacggtgacaatgggccccctggaaaagctggccctccgggacccaagggcgagcctggcaaagctgggccagatgggccagacgggaagcccgggattgatggtttaactggagccaagggggagcctggccccatggggatccctggagtcaagggccagcccgggcttcctggtcctcctggccttccgggccctggttttgctggacctcctgggcctcctggacctgttggcctccctggtgagattggaatccgaggccccaagggggaccctggaccagatggaccatcggggcccccaggaccccctgggaaacctggtcgcccgggaaccatccagggtctggaaggcagtgcggatttcctgtgtccaaccaactgtccacccggaatgaaaggtcccccagggctgcagggagtgaaggggcatgcgggcaaacgcgggattctgggtgatcctggccaccaggggaagccgggtcccaagggagatgtgggtgcctctggagagcaaggcatccctggaccaccgggtccccagggcatcaggggctacccag

SEQ ID NO: 121460 - DNA, 548 bp, Homo sapiens
  Payload ID: 3815
  Gene Symbol: COL9A2
  Gene Name: collagen, type IX, alpha 2
  ENST ID: ENST00000427563
  CDS Start-End: 1-548
ggcaaccaggccctcagggaaggcagggccctaagggggagcagggcccccccggaattccagggccccaaggcttgccaggcgtcaaaggagacaagggctccccagggaagaccgggccccgcggcaaagtgggtgacccaggggtggccggcctccccggagagaaaggcgagaagggcgagtccggcgagccggggcccaagggacagcaaggagtacgtggagaacccggctaccctggccccagcggggatgcgggcgccccaggggttcagggctaccctggtccccccggccctcgaggactggccgggaaccgaggcgtgccaggacagcccgggagacagggcgtggagagcaactggcagaggtcgccgtgagtgccaagcgggaagccctgggtgcggtgggcatgatgggtcctccaggacctcctgggccccctgggtacccaggcaagcagggcccccatgggcaccctggccctcggggcgttcctggcatcgtgggagccgtgggtcagatcggcaacacggggcccaagg

SEQ ID NO: 121461 - DNA, 2485 bp, Homo sapiens
  Payload ID: 3816
  Gene Symbol: COL9A3
  Gene Name: collagen, type IX, alpha 3
  Uniprot ID: Q14050
  ENST ID: ENST00000343916
  CDS Start-End: 4-2058
gccatggccgggccgcgcgcgtgcgccccgctcctgctcctgctcctgctcggggagcttctggcggccgccggggcgcagagagtgggactccccggcccccccggccccccagggccgcccgggaagcccggccaggacggcattgacggagaagctggtcctccaggtctgcctgggcccccgggaccaaagggggccccaggaaagccggggaaaccaggagaggctgggctgccgggactgccgggtgtggatggtctgactggacgagatggaccccctggacccaagggtgcccctggggaacggggaagtctgggacccccggggccgcccgggctggggggcaaaggcctccctggaccccccggagaggcaggagtgagcggccccccaggtgggatcggcctccgcggccccccgggaccttctggactccccggcctccctggtcccccaggacctcccggaccccctggacacccaggagtcctccctgaaggcgctactgaccttcagtgcccaagtatctgcccgccaggtcccccagggccccctggaatgccagggttcaagggacccactggctacaaaggcgagcagggggaagtcggcaaggacggcgagaagggtgaccctggcccccctgggcccgccggcctcccgggcagcgtggggctgcagggcccccggggattacgaggactgccagggccactcgggccccctggggaccggggtcccattgggttccgagggccgcctgggatcccaggagcgcctgggaaagcgggtgaccgaggcgagaggggcccagaagggttccgcggccccaagggtgacctcggcagacctggtcccaagggaacccccggagtggccgggccaagcggagagccgggcatgccgggcaaggacggccagaatggcgtgccaggactcgatggccagaagggagaggctggtcgcaacggtgctccgggagagaagggccccaacgggctgccgggcctccctggacgagcggggtccaaaggcgagaagggagaacggggcagagctggggagctgggtgaggccggcccctctggagagccaggcgtccctggagatgctggcatgcctggggagcgcggtgaggctggccaccggggctcagcgggggccctcggcccacaaggccctcccggagcccctggtgtccgaggcttccagggccagaagggcagcatgggagaccccggccttccaggcccccagggcctccgaggtgacgtgggcgaccggggtccgggaggtgccgcaggccctaagggagaccagggtattgcaggttccgacggtcttcctggggataaaggagaactgggtcccagcggcctggtcggacccaaaggagagtctggcagtcgaggggagctgggccccaaaggcacccagggtcccaacggcaccagcggtgttcagggtgtccccgggccccccggtcctctgggcctgcagggcgtcccgggtgttcctggcatcacggggaagccgggagttccggggaaggaggccagcgagcagcgcatcagggagctgtgtggggggatgatcagcgaacaaattgcacagttagccgcgcacctaaggaagcctttggcacccgggtccattggtcggcccggtccagctggcccccctgggcccccaggacccccaggctccattggtcaccctggcgctcgaggaccccctggataccgcggtcccactggggagctgggagaccccgggcccagaggaaaccagggtgacagaggagacaaaggcgcggcaggagcagggctggacgggcctgaaggagaccaggggccccaaggaccccaaggcgtgcccggcaccagcaaggacggccaggacggtgctcccggcgagcctgggcctcccggagatcctgggcttccaggtgccattggggcccaggggacaccggggatctgcgacacctcagcctgccaaggagccgtgttaggaggggtcggggagaaatcaggctctcgaagctcataaaattcaacgtgaggaagcaagtgacaaggacgcccgaagcacagtggacggtcatgaaggagcgggggtgtggcaggcgggtgacgtccaggagagggagcgcccctggctgcccctcggccgccgactggacgcgcgggccttgccagcgagcaccctcatcgggctgtcgcctgacagcatacctcaaaaggccctagctaataaacctgtaagcccagcatttgagagaaggtagggtgtgtatatataaaaggttgtgtacaactccacgaggtgaaaaatattcagtaacttgtttacatagcatttgtgtaaagactatgatctcatcccaataaaatgatatattaaaccttcagattaatgactggctacagagtaacaaaaaataaagaatttaatgtacagtaaattctctcccata

SEQ ID NO: 121462 - DNA, 596 bp, Homo sapiens
  Payload ID: 3816
  Gene Symbol: COL9A3
  Gene Name: collagen, type IX, alpha 3
  ENST ID: ENST00000452372
  CDS Start-End: 24-596
ggtgggtaggggtggagggtgtcatgtggtggtcctccacccagaatgccggcactgagggagaagctggtcctccaggtctgcctgggcccccgggaccaaagggggccccaggaaagccggggaaaccaggagaggctgggctgccgggactgccgggtgtggatggtctgactggacgagatggaccccctggacccaagggtgcccctggggaacggggaagtctgggacccccggggccgcccgggctggggggcaaaggcctccctggaccccccggagaggcaggagtgagcggccccccaggtgggatcggcctccgcggccccccgggaccttctggactccccggcctccctggtcccccaggacctcccggaccccctggacacccaggagtcctccctgaaggcgctactgaccttcagtgcccaagtatctgcccgccaggtcccccagggccccctggaatgccagggttcaagggacccactggctacaaaggcgagcagggggaagtcggcaaggacggcgagaagggtgaccctggcccccctgggcccgccggcctcccgggcagcgtggggctgcag

SEQ ID NO: 121463 - DNA, 8471 bp, Homo sapiens
  Payload ID: 3817
  Gene Symbol: COL5A1
  Gene Name: collagen, type V, alpha 1
  Uniprot ID: P20908
  ENST ID: ENST00000371817
  CDS Start-End: 415-5931
ggaaaaaagtgctccgcgccgaaggcgaggtccgcactctccgtccccgcggctggcgcaggacctcactcgagcggagcgcccacggggagcgggtcgcggggcggcggcggcgaggaggaggcgagaaggagttggaggaggaggaggaggaggcgagggcgagctagcccagcggggtcccggccgccccgcgggccaaagtcgagccctcccgcccgtgggcgagcgcgccagccgccccttccagaacagccgccgccacaaagaagaacggggggtgccgaggtccccatgacctcctaaagtggtgcggtccctgctgagtgcgctgcccgggccgtgacccgcgcccctgtgcgtccccgcgcgcctccgagcgcccctgtgcgccccggcccgcgccccgccggcatggacgtccatacccgctggaaagcgcgcagcgcgctccgcccgggcgccccgctgctgcccccgctgctgctgctgctgctgtgggcgccgcctccgagccgcgcagctcagccagcagatctcctgaaggttctagattttcacaacttgcctgatggaataacaaagacaacaggcttttgcgccacgcggcgatcttccaaaggcccggatgtcgcttacagagtcaccaaagacgcgcagctcagcgcacccaccaagcagctgtaccctgcgtctgcatttcccgaggacttctccatcctaacaactgtgaaagccaagaaaggcagccaggccttcctggtctccatctacaacgagcagggtatccagcagattgggctggagctgggccgctctcccgtcttcctctacgaggaccacacggggaagcctggcccggaagactaccccctcttccggggcatcaacctgtcagatggcaagtggcacagaattgctctcagcgtccacaagaaaaatgtcaccttgatcctcgactgtaaaaagaagaccaccaaattcctcgaccgcagcgaccaccccatgatcgacatcaatggcatcatcgtgtttggcacccggatcctggatgaggaggtgtttgagggtgacatccagcagctgctctttgtctcggaccaccgggcagcttatgattactgtgagcactacagccctgactgtgacaccgcagtacctgacaccccacagtcgcaggaccccaatccagatgaatattacacggaaggagacggcgagggtgagacctattactacgaatacccctactacgaagaccccgaagacctagggaaggagcccacccccagcaagaagcccgtggaagctgccaaagaaaccacagaggtccccgaggagctgaccccgacccccacggaagctgctcccatgcctgaaaccagtgaaggggctgggaaggaagaggacgtcggcatcggggactatgactacgtgcccagtgaggactactacacgccctcaccgtatgatgacctcacctatggcgagggggaggagaaccccgaccagcccacagacccaggcgctggggccgaaattcccaccagcaccgccgacacctccaactcctccaatccagctccgcctccaggggaaggtgcggatgacttggagggggagttcactgaggaaacgatccggaaccttgacgagaactactacgacccctactacgaccccaccagctccccgtcggagatcgggccgggaatgccggcgaaccaggataccatctatgaagggattggaggacctcggggcgagaaaggccaaaagggagaaccagcgattatcgagccgggcatgctcatcgagggcccgcctggcccagaaggccccgcgggtcttcccggacctccaggaaccatgggtcccactggccaagtcggggaccctggagaaaggggcccccctggacgcccaggccttcctggggccgatggcctgcccggtcctccaggaaccatgctcatgctgcccttccggtttggaggtggcggcgatgcgggctccaaaggccccatggtctcagcccaggagtcccaggcgcaagccattctccagcaggccaggttggcactgaggggaccagctggcccgatgggtctcacagggagacctggccctgtgggtccccctgggagcggaggtttgaagggcgagccgggagacgtggggcctcagggtcctcgaggtgtgcaaggcccgcctggtccggccgggaagcccggaagacggggtcgggctgggagtgatggagccagaggaatgcctggacaaactggccccaagggtgaccggggtttcgacggcctggctgggttgccaggcgagaagggccacaggggtgaccctggtccttccggcccaccaggacctccgggagacgatggagaaaggggtgacgacggagaagttgggcccagggggctgcctggggagcccgggccacgtggtctgcttgggccgaaggggcccccaggtcctcccggacctcccggtgtcacgggtatggacggccagccggggccaaaaggaaatgtgggtccccagggagagcctggccccccaggacagcagggtaatccaggcgcccagggtcttccaggcccccagggtgcaattggtcctccaggagaaaagggtcccttggggaaaccaggccttccaggaatgcccggtgctgacggacccccgggacaccctggcaaagaaggccctccaggagagaaaggaggtcagggtccacctggcccccagggtccgattggctacccaggtcctcgaggagtcaagggggccgatggcatccgtggtctgaagggcacaaagggcgagaagggtgaagacggctttcctgggtttaaaggagacatgggcatcaagggtgatcggggggagatcggcccacccggtcccaggggagaagatggccctgaaggcccaaagggtcgcggaggtcccaatggtgaccccggtcctctgggaccccctggggagaagggaaaactcggagtcccagggttaccagggtatccaggaagacaaggaccaaagggctctattggattccctggatttcctggcgccaatggagagaagggcggcagggggacccctggaaagccaggaccgcgggggcagcgaggcccaacgggtccgaggggtgaaagaggcccccggggcatcactgggaagcctggccccaagggcaactccggaggtgacggcccagctggccctcctggtgaacggggacccaatggaccccaaggacccacaggatttcctggaccaaagggcccccctggccctccaggcaaggatggactcccaggacaccctggacagagaggcgagactggtttccaaggcaagaccggccctccaggcccccccggcgtggtcggccctcagggtcccacgggagaaacgggcccaatgggtgagcgtggccaccctgggccccctggaccccccggtgaacaggggcttccgggccttgctggaaaagaagggacgaagggtgacccaggccctgcaggcctccctgggaaagatggccctccaggattacgtggtttccctggggaccgagggcttcctggtccagtgggagctcttggactgaaaggcaatgaagggccccctggcccaccaggccctgcgggatctccaggggagagaggtccagctggagccgctgggcccatcggaattccagggagacctgggccccagggacccccagggccggcaggagagaaaggggctcctggcgagaaaggcccacaaggcccagctggccgagacggtctccaggggcctgtggggctcccgggtccagctggccctgtgggtccccctggagaagacggagataagggagagatcggggagccggggcagaaaggaagcaagggggacaaaggagaacagggtcctcctgggcctacaggtcctcaaggccccatcggacagccaggcccctctggagctgacggcgagccggggcctcggggccagcagggccttttcgggcagaaaggtgatgaaggtcccagaggctttcctggaccccctgggccagtggggctgcagggtttgccaggacctccaggcgagaagggtgagacaggagacgtgggccagatgggccccccgggtccccctggcccccgaggaccctccggagctccaggtgctgatggcccacaaggtcccccaggtggaataggaaaccctggtgcagtgggagagaagggcgagcctggcgaagcaggtgagcctggccttccgggagaaggcggccccccgggacccaaaggagaaaggggagagaagggcgagtcaggcccttcaggtgctgccggaccccctggacccaaaggccctcccggagatgatggtcccaaaggcagccctggcccagtgggttttcctggagatcctggcccccccggagagcctggccccgcgggtcaagatggtccccctggtgacaaaggagatgatggtgaacccgggcagacgggatcccccggccctactggtgaaccaggtccatcggggcctccaggaaaaaggggtcccccaggccccgcaggccccgaaggcagacagggagagaaaggggccaagggagaagccggcttggaaggccctcctgggaagactggccccatcggcccccagggggcccctgggaagcccggaccggatggccttcgagggatccctggccctgtgggagaacaaggtctcccaggatccccaggcccggacggtccccccggccccatgggtcccccaggacttcccggcctcaaaggagattctggtcccaaaggtgaaaagggtcatccaggcctgatcgggctcatcggtcctccgggtgaacagggtgagaagggcgaccgtggtctccctggcccccagggctcctccggtcctaagggagaacagggtatcactggtccttctggcccgattgggcctcctgggccccctggcctgccgggtccgcctggtccaaaaggtgctaagggctcctcgggtccaactggcccgaagggtgaggcaggccacccaggacccccaggccccccgggccccccgggagaggtcatccagcccctgccaatccaggcatccaggacgcggcggaacatcgacgccagccagctgctggacgacgggaatggcgagaactacgtggactacgcggacggcatggaagagatcttcggctctctcaactctctgaagctggagattgagcagatgaaacggcccctgggcacgcagcagaaccccgcccgcacctgcaaggacctgcagctctgccaccccgacttcccagatggtgaatactgggtcgatcctaaccaaggatgctccagggattccttcaaggtttactgcaacttcacagccggggggtcgacatgcgtcttccctgacaagaagtccgaaggggccagaatcacttcttggcccaaagaaaacccgggctcctggttcagtgaattcaagcgtgggaaactgctctcctatgtggacgccgagggcaaccctgtgggtgtggtacagatgaccttcctgcggctgctgagcgcctctgcccaccagaacgtcacctaccactgctaccagtcagtggcctggcaggacgcagccacgggcagctacgacaaggccctccgcttcctgggctccaacgacgaggagatgtcctatgacaacaacccctacatccgcgccctggtggacggctgtgctaccaagaaaggctaccagaagacggttctggagatcgacacccccaaagtggagcaggtgcccatcgtggacatcatgttcaatgacttcggtgaagcgtcacagaaatttggatttgaagtggggccggcttgcttcatgggctaggagccgccgagcccgggctcccgagagcaacctcgtgacctcagcatgccattcgttcgtgagtgtcccgtgcacgtcctgaccctggacagtgaaggcttctccctcccctcccacctgacttcatctacgcctcggcaccacggggtgtgggaccccagcccggagagaacagagggaaggagccgcgcccccacctggagctgaatcacatgacctagctgcaccccagcgcctgggcccgccccacgctctgtccacacccacgcgccccgggagcggggccatgcctccagccccccagctcgcccgacccatcctgttcgtgaataggtctcaggggttgggggagggactgccagatttggacactatatttttttctaaattcaacttgaagatgtgtatttcccctgaccttcaaaaaatgttccaaggtaagcctcgtaaaggtcatcccaccatcaccaaagcctccgtttttaacaacctccaacacgatccatttagaggccaaatgtcattctgcaggtgccttcccgatggattaaaggtgcttatgtttttgtgagttttaagtaaatatttgtattgtattgttataaatgttaagtgtgcctggctttcaatcatgcacggaaacccagtctcagtcccacggacagaatgggcgaggcatggattctgggttgcagtaccgttctgattagaaataggaagtctccccacccccgccctggccaagaacgtgcaataaattggaagtttgccccggggcagcaagaatttatgctgccattgaaaagcaggtaccagtgccccttttcagacagtttttgattcgctctagactttttttttttttaatagggaaaaaatttgataattttcttttttctacatgcacttaagactaaaacacaggtttggattaattttatttgcttcctttttccgcttttcttcccgcagagcctgatgggagaatgtccagggcagggaaaccacattttttgtaggtgataactcaatgaaaattggtgcttattttttacacttctctcttgtggctctcttgtggtgctatctatctgttttaaggtctccttgaaggcgcactggggaccctggccatgcctcgttctccctgctttctttatcctgttattgcctccacagtctgttgccaaggactctaagatcaatgcacgtcactttcctttccactgggcaggatagccaagcacactccctcctgcgctctcccgccccggtgcgtccactcccgagggctgttatgaggactgggttgtgcctacttgatttgaaaacacacacaagcaataaaaagcctcttcctgcattgtctgtggtgtgaccatagcagattatatttggttcctgaatgtttgtggtgctaatttctgtgtttgttccaagccgttcagtcatgccatgcgctgcctcggtagatggagtaatgtacaatgaactccatgagtctctccagggctgcctgcagcacgtcttttccaagtagcctatttggattcccatctcaaatgtcctggatgcgagcgtcagcggctccagagctcggggcgggtgaggtcccctttggggaaccctttcctggccatcgaggtcggggggctgccgtctgtgggcaggaggacccgaggggcagccaggaaaggcgatctcttcactgtgaaaagttgcccgggtgcagcgccttttccttctaccatgggaaatgcaggctgggcccttggggtgagcctgcggggctctggtgctgtccccgacccccaccaccaccagaatgcagttccagcttaggaagccacaaacaagccacccaggaggaacaaaacaccgccagcgtggattttccaaatttccctggaaagtaagtctcgctcttgccaaagaaaagtctggcttggagagtctctggagcccaggatgccagcatgtgccaatgactgtcaccttcatctcttcaaaagaaaagccatagccgaggactgtcccgcgacccccgtggactgcgtctaggtcatgtgattctgttttcatttctcatcccatccaatttgtccttttctcctgtcattttcttcctctgtggtcccttcaaagttgttataatttgtactgaacttcaaaatgtgtcccgttctccccagaccactctagccacagtatattgcaataaaattacttcttatatttgcagaaattcttttggtgtaattttattttttcctctcaatatatataattggacaaacgctggcaaaaagaaaaaaatggtaagcaaaaaacccaagataaagtttcgaggacatcaggccttttgaaatacaatgtcaaatgacacattgtacggtttcaaaaaatccgctagacatgtcataagttttaactgtaatgcccaggaaaggatatcttaaaatattctaaacttgtgtaacaaaggaataattaactgtaatagtttttcaataaatcgagttgggtgtttccaccgtaaa

SEQ ID NO: 121464 - DNA, 628 bp, Homo sapiens
  Payload ID: 3817
  Gene Symbol: COL5A1
  Gene Name: collagen, type V, alpha 1
  ENST ID: ENST00000371820
  CDS Start-End: 1-628
caggacgcggcggaacatcgacgccagccagctgctggacgacgggaatggcgagaactacgtggactacgcggacggcatggaagagatcttcggctctctcaactctctgaagctggagattgagcagatgaaacggcccctgggcacgcagcagaaccccgcccgcacctgcaaggacctgcagctctgccaccccgacttcccagatggtgaatactgggtcgatcctaaccaaggatgctccagggattccttcaaggtttactgcaacttcacagccggggggtcgacatgcgtcttccctgacaagaagtccgaagggagtaaaatggcccgctggcccaaagagcagccttccacctggtatagtcagtacaagcgggggtccctgctctcctatgtggacgccgagggcaaccctgtgggtgtggtacagatgaccttcctgcggctgctgagcgcctctgcccaccagaacgtcacctaccactgctaccagtcagtggcctggcaggacgcagccacgggcagctacgacaaggccctccgcttcctgggctccaacgacgaggagatgtcctatgacaacaacccctacatccgcgccctggtggacggctgtgct

SEQ ID NO: 121465 - DNA, 8437 bp, Homo sapiens
  Payload ID: 3817
  Gene Symbol: COL5A1
  Gene Name: collagen, type V, alpha 1
  ENST ID: ENST00000618395
  CDS Start-End: 384-5900
ccgcactctccgtccccgcggctggcgcaggacctcactcgagcggagcgcccacggggagcgggtcgcggggcggcggcggcgaggaggaggcgagaaggagttggaggaggaggaggaggaggcgagggcgagctagcccagcggggtcccggccgccccgcgggccaaagtcgagccctcccgcccgtgggcgagcgcgccagccgccccttccagaacagccgccgccacaaagaagaacggggggtgccgaggtccccatgacctcctaaagtggtgcggtccctgctgagtgcgctgcccgggccgtgacccgcgcccctgtgcgtccccgcgcgcctccgagcgcccctgtgcgccccggcccgcgccccgccggcatggacgtccatacccgctggaaagcgcgcagcgcgctccgcccgggcgccccgctgctgcccccgctgctgctgctgctgctgtgggcgccgcctccgagccgcgcagctcagccagcagatctcctgaaggttctagattttcacaacttgcctgatggaataacaaagacaacaggcttttgcgccacgcggcgatcttccaaaggcccggatgtcgcttacagagtcaccaaagacgcgcagctcagcgcacccaccaagcagctgtaccctgcgtctgcatttcccgaggacttctccatcctaacaactgtgaaagccaagaaaggcagccaggccttcctggtctccatctacaacgagcagggtatccagcagattgggctggagctgggccgctctcccgtcttcctctacgaggaccacacggggaagcctggcccggaagactaccccctcttccggggcatcaacctgtcagatggcaagtggcacagaattgctctcagcgtccacaagaaaaatgtcaccttgatcctcgactgtaaaaagaagaccaccaaattcctcgaccgcagcgaccaccccatgatcgacatcaatggcatcatcgtgtttggcacccggatcctggatgaggaggtgtttgagggtgacatccagcagctgctctttgtctcggaccaccgggcagcttatgattactgtgagcactacagccctgactgtgacaccgcagtacctgacaccccacagtcgcaggaccccaatccagatgaatattacacggaaggagacggcgagggtgagacctattactacgaatacccctactacgaagaccccgaagacctagggaaggagcccacccccagcaagaagcccgtggaagctgccaaagaaaccacagaggtccccgaggagctgaccccgacccccacggaagctgctcccatgcctgaaaccagtgaaggggctgggaaggaagaggacgtcggcatcggggactatgactacgtgcccagtgaggactactacacgccctcaccgtatgatgacctcacctatggcgagggggaggagaaccccgaccagcccacagacccaggcgctggggccgaaattcccaccagcaccgccgacacctccaactcctccaatccagctccgcctccaggggaaggtgcggatgacttggagggggagttcactgaggaaacgatccggaaccttgacgagaactactacgacccctactacgaccccaccagctccccgtcggagatcgggccgggaatgccggcgaaccaggataccatctatgaagggattggaggacctcggggcgagaaaggccaaaagggagaaccagcgattatcgagccgggcatgctcatcgagggcccgcctggcccagaaggccccgcgggtcttcccggacctccaggaaccatgggtcccactggccaagtcggggaccctggagaaaggggcccccctggacgcccaggccttcctggggccgatggcctgcccggtcctccaggaaccatgctcatgctgcccttccggtttggaggtggcggcgatgcgggctccaaaggccccatggtctcagcccaggagtcccaggcgcaagccattctccagcaggccaggttggcactgaggggaccagctggcccgatgggtctcacagggagacctggccctgtgggtccccctgggagcggaggtttgaagggcgagccgggagacgtggggcctcagggtcctcgaggtgtgcaaggcccgcctggtccggccgggaagcccggaagacggggtcgggctgggagtgatggagccagaggaatgcctggacaaactggccccaagggtgaccggggtttcgacggcctggctgggttgccaggcgagaagggccacaggggtgaccctggtccttccggcccaccaggacctccgggagacgatggagaaaggggtgacgacggagaagttgggcccagggggctgcctggggagcccgggccacgtggtctgcttgggccgaaggggcccccaggtcctcccggacctcccggtgtcacgggtatggacggccagccggggccaaaaggaaatgtgggtccccagggagagcctggccccccaggacagcagggtaatccaggcgcccagggtcttccaggcccccagggtgcaattggtcctccaggagaaaagggtcccttggggaaaccaggccttccaggaatgcccggtgctgacggacccccgggacaccctggcaaagaaggccctccaggagagaaaggaggtcagggtccacctggcccccagggtccgattggctacccaggtcctcgaggagtcaagggggccgatggcatccgtggtctgaagggcacaaagggcgagaagggtgaagacggctttcctgggtttaaaggagacatgggcatcaagggtgatcggggggagatcggcccacccggtcccaggggagaagatggccctgaaggcccaaagggtcgcggaggtcccaatggtgaccccggtcctctgggaccccctggggagaagggaaaactcggagtcccagggttaccagggtatccaggaagacaaggaccaaagggctctattggattccctggatttcctggcgccaatggagagaagggcggcagggggacccctggaaagccaggaccgcgggggcagcgaggcccaacgggtccgaggggtgaaagaggcccccggggcatcactgggaagcctggccccaagggcaactccggaggtgacggcccagctggccctcctggtgaacggggacccaatggaccccaaggacccacaggatttcctggaccaaagggcccccctggccctccaggcaaggatggactcccaggacaccctggacagagaggcgagactggtttccaaggcaagaccggccctccaggcccccccggcgtggtcggccctcagggtcccacgggagaaacgggcccaatgggtgagcgtggccaccctgggccccctggaccccccggtgaacaggggcttccgggccttgctggaaaagaagggacgaagggtgacccaggccctgcaggcctccctgggaaagatggccctccaggattacgtggtttccctggggaccgagggcttcctggtccagtgggagctcttggactgaaaggcaatgaagggccccctggcccaccaggccctgcgggatctccaggggagagaggtccagctggagccgctgggcccatcggaattccagggagacctgggccccagggacccccagggccggcaggagagaaaggggctcctggcgagaaaggcccacaaggcccagctggccgagacggtctccaggggcctgtggggctcccgggtccagctggccctgtgggtccccctggagaagacggagataagggagagatcggggagccggggcagaaaggaagcaagggggacaaaggagaacagggtcctcctgggcctacaggtcctcaaggccccatcggacagccaggcccctctggagctgacggcgagccggggcctcggggccagcagggccttttcgggcagaaaggtgatgaaggtcccagaggctttcctggaccccctgggccagtggggctgcagggtttgccaggacctccaggcgagaagggtgagacaggagacgtgggccagatgggccccccgggtccccctggcccccgaggaccctccggagctccaggtgctgatggcccacaaggtcccccaggtggaataggaaaccctggtgcagtgggagagaagggcgagcctggcgaagcaggtgagcctggccttccgggagaaggcggccccccgggacccaaaggagaaaggggagagaagggcgagtcaggcccttcaggtgctgccggaccccctggacccaaaggccctcccggagatgatggtcccaaaggcagccctggcccagtgggttttcctggagatcctggcccccccggagagcctggccccgcgggtcaagatggtccccctggtgacaaaggagatgatggtgaacccgggcagacgggatcccccggccctactggtgaaccaggtccatcggggcctccaggaaaaaggggtcccccaggccccgcaggccccgaaggcagacagggagagaaaggggccaagggagaagccggcttggaaggccctcctgggaagactggccccatcggcccccagggggcccctgggaagcccggaccggatggccttcgagggatccctggccctgtgggagaacaaggtctcccaggatccccaggcccggacggtccccccggccccatgggtcccccaggacttcccggcctcaaaggagattctggtcccaaaggtgaaaagggtcatccaggcctgatcgggctcatcggtcctccgggtgaacagggtgagaagggcgaccgtggtctccctggcccccagggctcctccggtcctaagggagaacagggtatcactggtccttctggcccgattgggcctcctgggccccctggcctgccgggtccgcctggtccaaaaggtgctaagggctcctcgggtccaactggcccgaagggtgaggcaggccacccaggacccccaggccccccgggccccccgggagaggtcatccagcccctgccaatccaggcatccaggacgcggcggaacatcgacgccagccagctgctggacgacgggaatggcgagaactacgtggactacgcggacggcatggaagagatcttcggctctctcaactctctgaagctggagattgagcagatgaaacggcccctgggcacgcagcagaaccccgcccgcacctgcaaggacctgcagctctgccaccccgacttcccagatggtgaatactgggtcgatcctaaccaaggatgctccagggattccttcaaggtttactgcaacttcacagccggggggtcgacatgcgtcttccctgacaagaagtccgaagggagtaaaatggcccgctggcccaaagagcagccttccacctggtatagtcagtacaagcgggggtccctgctctcctatgtggacgccgagggcaaccctgtgggtgtggtacagatgaccttcctgcggctgctgagcgcctctgcccaccagaacgtcacctaccactgctaccagtcagtggcctggcaggacgcagccacgggcagctacgacaaggccctccgcttcctgggctccaacgacgaggagatgtcctatgacaacaacccctacatccgcgccctggtggacggctgtgctaccaagaaaggctaccagaagacggttctggagatcgacacccccaaagtggagcaggtgcccatcgtggacatcatgttcaatgacttcggtgaagcgtcacagaaatttggatttgaagtggggccggcttgcttcatgggctaggagccgccgagcccgggctcccgagagcaacctcgtgacctcagcatgccattcgttcgtgagtgtcccgtgcacgtcctgaccctggacagtgaaggcttctccctcccctcccacctgacttcatctacgcctcggcaccacggggtgtgggaccccagcccggagagaacagagggaaggagccgcgcccccacctggagctgaatcacatgacctagctgcaccccagcgcctgggcccgccccacgctctgtccacacccacgcgccccgggagcggggccatgcctccagccccccagctcgcccgacccatcctgttcgtgaataggtctcaggggttgggggagggactgccagatttggacactatatttttttctaaattcaacttgaagatgtgtatttcccctgaccttcaaaaaatgttccaaggtaagcctcgtaaaggtcatcccaccatcaccaaagcctccgtttttaacaacctccaacacgatccatttagaggccaaatgtcattctgcaggtgccttcccgatggattaaaggtgcttatgtttttgtgagttttaagtaaatatttgtattgtattgttataaatgttaagtgtgcctggctttcaatcatgcacggaaacccagtctcagtcccacggacagaatgggcgaggcatggattctgggttgcagtaccgttctgattagaaataggaagtctccccacccccgccctggccaagaacgtgcaataaattggaagtttgccccggggcagcaagaatttatgctgccattgaaaagcaggtaccagtgccccttttcagacagtttttgattcgctctagactttttttttttttaatagggaaaaaatttgataattttcttttttctacatgcacttaagactaaaacacaggtttggattaattttatttgcttcctttttccgcttttcttcccgcagagcctgatgggagaatgtccagggcagggaaaccacattttttgtaggtgataactcaatgaaaattggtgcttattttttacacttctctcttgtggctctcttgtggtgctatctatctgttttaaggtctccttgaaggcgcactggggaccctggccatgcctcgttctccctgctttctttatcctgttattgcctccacagtctgttgccaaggactctaagatcaatgcacgtcactttcctttccactgggcaggatagccaagcacactccctcctgcgctctcccgccccggtgcgtccactcccgagggctgttatgaggactgggttgtgcctacttgatttgaaaacacacacaagcaataaaaagcctcttcctgcattgtctgtggtgtgaccatagcagattatatttggttcctgaatgtttgtggtgctaatttctgtgtttgttccaagccgttcagtcatgccatgcgctgcctcggtagatggagtaatgtacaatgaactccatgagtctctccagggctgcctgcagcacgtcttttccaagtagcctatttggattcccatctcaaatgtcctggatgcgagcgtcagcggctccagagctcggggcgggtgaggtcccctttggggaaccctttcctggccatcgaggtcggggggctgccgtctgtgggcaggaggacccgaggggcagccaggaaaggcgatctcttcactgtgaaaagttgcccgggtgcagcgccttttccttctaccatgggaaatgcaggctgggcccttggggtgagcctgcggggctctggtgctgtccccgacccccaccaccaccagaatgcagttccagcttaggaagccacaaacaagccacccaggaggaacaaaacaccgccagcgtggattttccaaatttccctggaaagtaagtctcgctcttgccaaagaaaagtctggcttggagagtctctggagcccaggatgccagcatgtgccaatgactgtcaccttcatctcttcaaaagaaaagccatagccgaggactgtcccgcgacccccgtggactgcgtctaggtcatgtgattctgttttcatttctcatcccatccaatttgtccttttctcctgtcattttcttcctctgtggtcccttcaaagttgttataatttgtactgaacttcaaaatgtgtcccgttctccccagaccactctagccacagtatattgcaataaaattacttcttatatttgcagaaattcttttggtgtaattttattttttcctctcaatatatataattggacaaacgctggcaaaaagaaaaaaatggtaagcaaaaaacccaagataaagtttcgaggacatcaggccttttgaaatacaatgtcaaatgacacattgtacggtttcaaaaaatccgctagacatgtcataagttttaactgtaatgcccaggaaaggatatcttaaaatattctaaacttgtgtaacaaaggaataattaactgtaatagtttttcaataaatcgagttgggtgtttccaccgt

SEQ ID NO: 121466 - DNA, 6949 bp, Homo sapiens
  Payload ID: 3818
  Gene Symbol: COL5A2
  Gene Name: collagen, type V, alpha 2
  Uniprot ID: P05997
  ENST ID: ENST00000374866
  CDS Start-End: 276-4775
gaccgttgcttggcagacactggatggttatgagcctgaacaagctgaaaaggggcaggaaaagaagtggaggcagcattcttcctatttaaagctgcatcgcttgaaaaaagttttcgcagactgtgctggagctggtgctgaaaaagggggtttgcagaggctgccctggggctggtgctgaaagaagagcccacagctgacttcatggtgctacaataacctcagaatctacttttcactctcaggagaacccacatgtctaatatttagacatgatggcaaactgggcggaagcaagacctctcctcattcttattgttttattagggcaatttgtctcaataaaagcccaggaagaagacgaggatgaaggatatggtgaagaaatagcctgcactcagaatggccagatgtacttaaacagggacatttggaaacctgccccttgtcagatctgtgtctgtgacaatggagccattctctgtgacaagatagaatgccaggatgtgctggactgtgccgaccctgtaacgccccctggggaatgctgtcctgtctgttcacaaacacctggaggtggcaataccaattttggtagaggaagaaagggacaaaagggagaaccaggattagtgcctgttgtaacaggcatacgtggtcgtccaggaccggcaggacctccaggatcacagggaccaagaggagagcgagggccaaaaggaagacctggccctcgtggacctcagggaattgatggagaaccaggtgttcctggtcaacctggtgctccaggacctcctggacatccgtcccacccaggacccgatggcttgagcaggccgttttcagctcaaatggctgggttggatgaaaaatctggacttgggagtcaagtaggactaatgcctggctctgtgggtcctgttggcccaaggggaccacagggtttacaaggacagcaaggtggtgcaggacctacaggacctcctggtgaacctggtgatcctggaccaatgggtccgattggttcacgtggaccagagggccctcctggtaaacctggggaagatggtgaacctggcagaaatggaaatcctggtgaagtgggatttgcaggatctccgggagctcgtggatttcctggggctcctggtcttccaggtctgaagggtcaccgaggacacaaaggtcttgaaggccctaaaggtgaagttggagcacctggttccaagggtgaagctggccccactggtccaatgggtgccatgggtcctctgggtccgaggggaatgccaggagagagagggagacttgggccacagggtgctcctggacaacgaggtgcacatggtatgcctggaaaacctggaccaatgggtcctcttgggataccaggctcttctggttttccaggaaatcctggaatgaagggagaagcaggtcctacaggggcgcgaggccctgaaggtcctcaggggcagagaggtgaaactgggcccccaggtccagttggctctccaggtcttcctggtgcaataggaactgatggtactcctggtgccaaaggcccaacgggctctccaggtacctctggtcctcctggctcagcagggcctcctggatctccaggacctcagggtagcactggtcctcagggaattcgaggccaaccgggtgatccaggagttccaggtttcaaaggagaagctggcccaaaaggggaaccagggccacatggtattcagggtccgataggcccacccggtgaagaaggcaaaagaggtcccagaggtgacccaggaacagttggtcctccagggccagtgggagaaaggggtgctcctggcaatcgtggttttccaggctctgatggtttacctgggccaaagggtgctcaaggagaacggggtcctgtaggttcttcaggacccaaaggaagccagggggatccaggacgtccaggggaacctgggcttccaggtgctcggggtttgacaggaaatcctggtgttcaaggtcctgaaggaaaacttggacctttgggtgcgccaggggaagatggccgtccaggtcctccaggctccataggaatcagagggcagcccgggagcatgggccttccaggccccaaaggtagcagtggtgaccctgggaaacctggagaagcaggaaatgctggagttcctgggcagaggggagctcctggaaaagatggtgaagttggtccttctggtcctgtgggcccgccgggtctagctggtgaaagaggagaacaaggacctccaggccccacaggttttcaggggcttcctggtcctccagggcctcctggagaaggtggaaaaccaggtgatcaaggtgttcctggagatcccggagcagttggcccgttaggacctagaggagaacgaggaaatcctggggaaagaggagaacctgggataactggactccctggtgagaagggaatggctggaggacatggtcctgatggcccaaaaggcagtccaggtccatctgggacccctggagatacaggcccaccaggtcttcaaggtatgccgggagaaagaggaattgcaggaactcctggccccaagggtgacagaggtggcataggagaaaaaggtgctgaaggcacagctggaaatgatggtgcaagaggtcttccaggtcctttgggccctccaggtccggcaggtcctactggagaaaagggtgaacctggtcctcgaggtttagttggccctcctggctcccggggcaatcctggttctcgaggtgaaaatgggccaactggagctgttggttttgccggaccccagggtcctgacggacagcctggagtaaaaggtgaacctggagagccaggacagaagggagatgctggttctcctggaccacaaggtttagcaggatcccctggccctcatggtcctaatggtgttcctggactaaaaggtggtcgaggaacccaaggtccgcctggtgctacaggatttcctggttctgcgggcagagttggacctccaggccctgctggagctccaggacctgcgggacccctaggggaacccgggaaggagggacctccaggtcttcgtggggaccctggctctcatgggcgtgtgggagatcgaggaccagctggcccccctggtggcccaggagacaaaggggacccaggagaagatgggcaacctggtccagatggcccccctggtccagctggaacgaccgggcagagaggaattgttggcatgcctgggcaacgtggagagagaggcatgcccggcctaccaggcccagcgggaacaccaggaaaagtaggaccaactggtgcaacaggagataaaggtccacctggacctgtggggcccccaggctccaatggtcctgtaggggaacctggaccagaaggtccagctggcaatgatggtaccccaggacgggatggtgctgttggagaacgtggtgatcgtggagaccctgggcctgcaggtctgccaggctctcagggtgcccctggaactcctggccctgtgggtgctccaggagatgcaggacaaagaggagatccgggttctcggggtcctataggaccacctggtcgagctgggaaacgtggattacctggaccccaaggacctcgtggtgacaaaggtgatcatggagaccgaggtgacagaggtcagaagggccacagaggctttactggtcttcagggtcttcctggccctcctggtccaaatggtgaacaaggaagtgctggaatccctggaccatttggcccaagaggtcctccaggcccagttggtccttcaggtaaagaaggaaaccctgggccacttgggccaattggacctccaggtgtacgaggcagtgtaggagaagcaggacctgagggccctcctggtgagcctggcccacctggccctccgggtccccctggccaccttacagctgctcttggggatatcatggggcactatgatgaaagcatgccagatccacttcctgagtttactgaagatcaggcggctcctgatgacaaaaacaaaacggacccaggggttcatgctaccctgaagtcactcagtagtcagattgaaaccatgcgcagccccgatggctcgaaaaagcacccagcccgcacgtgtgatgacctaaagctttgccattccgcaaagcagagtggtgaatactggattgatcctaaccaaggatctgttgaagatgcaatcaaagtttactgcaacatggaaacaggagaaacatgtatttcagcaaacccatccagtgtaccacgtaaaacctggtgggccagtaaatctcctgacaataaacctgtttggtatggtcttgatatgaacagagggtctcagttcgcttatggagaccaccaatcacctaatacagccattactcagatgacttttttgcgccttttatcaaaagaagcctcccagaacatcacttacatctgtaaaaacagtgtaggatacatggacgatcaagctaagaacctcaaaaaagctgtggttctcaaaggggcaaatgacttagatatcaaagcagagggaaatattagattccggtatatcgttcttcaagacacttgctctaagcggaatggaaatgtgggcaagactgtctttgaatatagaacacagaatgtggcacgcttgcccatcatagatcttgctcctgtggatgttggcggcacagaccaggaattcggcgttgaaattgggccagtttgttttgtgtaaagtaagccaagacacatcgacaatgagcaccaccatcaatgaccaccgccattcacaagaactttgactgtttgaagttgatcctgagactcttgaagtaatggctgatcctgcatcagcattgtatatatggtcttaagtgcctggcctccttatccttcagaatatttattttacttacaatcctcaagttttaattgattttaaatatttttcaatacaacagtttaggtttaagatgaccaatgacaatgaccacctttgcagaaagtaaactgattgaataaataaatctccgttttcttcaatttatttcagtgtaatgaaaaagttgcttagtatttatgaggaaattcttcttcctggcaggtagcttaaagagtggggtatatagagccacaacacatgtttattttgcttggctgcagttgaaaaatagaaattagtgcccttttgtgacctctcattccaagattgtcaattaaaaatgagtttaaaatgtttaacttgtgatcgagacctacatgcatgtcttgatattgtgtaactataatagagactctttaaggagaatcttaaaaaaaaaaaaacgtttctcactgtcttaaatagaatttttaaatagtatatattcagtggcattttggagaacaaagtgaatttacttcgacttcttaaatttttgtaaaagactataagtttagacatctttctcattcaaatttaaagatatctttctcctcttgatcaatctatcaatattgatagaagtcacactagtatataccatttaatacatttacactttcttatttaagaagatattgaatgcaaaataattgacatatagaactttacaaacatatgtccaaggactctaaattgagactcttccacatgtacaatctcatcatcctgaagcctataatgaagaaaaagatctagaaactgagttgtggagctgactctaatcaaatgtgatgattggaattagaccatttggcctttgaactttcataggaaaaatgacccaacatttcttagcatgagctacctcatctctagaagctgggatggacttactattcttgtttatattttagatactgaaaggtgctatgcttctgttattattccaagactggagataggcagggctaaaaaggtattattatttttcctttaatgatggtgctaaaattcttcctataaaattccttaaaaataaagatggtttaatcactaccattgtgaaaacataactgttagacttcccgtttctgaaagaaagagcatcgttccaatgcttgttcactgttcctctgtcatactgtatctggaatgctttgtaatacttgcatgcttcttagaccagaacatgtaggtccccttgtgtctcaatactttttttttcttaattgcatttgttggctctattttaatttttttcttttaaaataaacagctgggaccatcccaaaagacaagccatgcatacaactttggtcatgtatctctgcaaagcatcaaattaaatgcacgcttttgtcatgtcagtggtttttgttttgtgaaattcctttgaccatattagatctatttcatttccaatagtgaaaaggagatgtggtggtatactttgtttgccatttgtttaaaagatacaacggataccttctatcatgtatgtactggcttataaatgaaaatctatctacaacattacccacaaaggcaacatgacaccaattatcactgcctctgcccttaaaaatgtcagagtagtattattgataaaaagggcaagcaatagatttttcatgactgaataaactgtaataataaaacatatgtctcaaagtgtatcacatatgaatttagcctaattgttttcagtttcattctcaatatttagtttacaacatcattttcccctaaactggttatattttgacctgtatatcttaaatttgagtatttatatgcctaaatacatgtgtgagttttgtttgacttccaagtccaaactataagattatataagttcatatagatgaatcagaaatatgtggtaatactattaagtcacaaacactaacaatttccaactatagaaataacagttcttatttggattttgggaatgctaccaataaaagcctgcccagaccatt

SEQ ID NO: 121467 - DNA, 6399 bp, Homo sapiens
  Payload ID: 3818
  Gene Symbol: COL5A2
  Gene Name: collagen, type V, alpha 2
  ENST ID: ENST00000618828
  CDS Start-End: 906-4244
gaccgttgcttggcagacactggatggttatgagcctgaacaagctgaaaaggggcaggaaaagaagtggaggcagcattcttcctatttaaagctgcatcgcttgaaaaaagttttcgcagactgtgctggagctggtgctgaaaaagggggtttgcagaggctgccctggggctggtgctgaaagaagagcccacagctgacttcatggtgctacaataacctcagaatctacttttcactctcaggagaacccacatgtctaatatttagacatgatggcaaactgggcggaagcaagacctctcctcattcttattgttttattagggcaatttgtctcaataaaagcccaggaagaagacgaggatgaaggatatggtgaagaaatagcctgcactcagaatggccagatgtacttaaacagggacatttggaaacctgccccttgtcagatctgtgtctgtgacaatggagccattctctgtgacaagatagaatgccaggatgtgctggactgtgccgaccctgtaacgccccctggggaatgctgtcctgtctgttcacaaacacctggaggtggcaataccaattttggtagaggaagaaagggacaaaagggagaaccaggattagtgcctgttgtaacaggcatacgtggtcgtccaggaccggcaggacctccaggatcacagggaccaagaggagagcgagggccaaaaggaagacctggccctcgtggacctcagggaattgatggagaaccaggtgttcctggtcaacctggtgctccaggacctcctggacatccgtcccacccaggacccgatggcttgagcaggccgttttcagctcaaatggctgggttggatgaaaaatctggacttgggagtcaagtaggactaatgcctggctctgtgggtcctgttggcccaaggggaccacagggtttacaaggacagcaaggtggtgcaggacctacaggacctcctggtgaacctggtgatcctggaccaatgggtccgattggttcacgtggaccagagggccctcctggtaaacctggggaagatggtgaacctggcagaaatggaaatcctggtgaagtgggatttgcaggatctccgggagctcgtggatttcctggggctcctggtcttccaggtctgaagggtcaccgaggacacaaaggtcttgaaggccctaaaggtgaagttggagcacctggttccaagggtgaagctggccccactggtccaatgggtgacccaggaacagttggtcctccagggccagtgggagaaaggggtgctcctggcaatcgtggttttccaggctctgatggtttacctgggccaaagggtgctcaaggagaacggggtcctgtaggttcttcaggacccaaaggaagccagggggatccaggacgtccaggggaacctgggcttccaggtgctcggggtttgacaggaaatcctggtgttcaaggtcctgaaggaaaacttggacctttgggtgcgccaggggaagatggccgtccaggtcctccaggctccataggaatcagagggcagcccgggagcatgggccttccaggccccaaaggtagcagtggtgaccctgggaaacctggagaagcaggaaatgctggagttcctgggcagaggggagctcctggaaaagatggtgaagttggtccttctggtcctgtgggcccgccgggtctagctggtgaaagaggagaacaaggacctccaggccccacaggttttcaggggcttcctggtcctccagggcctcctggagaaggtggaaaaccaggtgatcaaggtgttcctggagatcccggagcagttggcccgttaggacctagaggagaacgaggaaatcctggggaaagaggagaacctgggataactggactccctggtgagaagggaatggctggaggacatggtcctgatggcccaaaaggcagtccaggtccatctgggacccctggagatacaggcccaccaggtcttcaaggtatgccgggagaaagaggaattgcaggaactcctggccccaagggtgacagaggtggcataggagaaaaaggtgctgaaggcacagctggaaatgatggtgcaagaggtcttccaggtcctttgggccctccaggtccggcaggtcctactggagaaaagggtgaacctggtcctcgaggtttagttggccctcctggctcccggggcaatcctggttctcgaggtgaaaatgggccaactggagctgttggttttgccggaccccagggtcctgacggacagcctggagtaaaaggtgaacctggagagccaggacagaagggagatgctggttctcctggaccacaaggtttagcaggatcccctggccctcatggtcctaatggtgttcctggactaaaaggtggtcgaggaacccaaggtccgcctggtgctacaggatttcctggttctgcgggcagagttggacctccaggccctgctggagctccaggacctgcgggacccctaggggaacccgggaaggagggacctccaggtcttcgtggggaccctggctctcatgggcgtgtgggagatcgaggaccagctggcccccctggtggcccaggagacaaaggggacccaggagaagatgggcaacctggtccagatggcccccctggtccagctggaacgaccgggcagagaggaattgttggcatgcctgggcaacgtggagagagaggcatgcccggcctaccaggcccagcgggaacaccaggaaaagtaggaccaactggtgcaacaggagataaaggtccacctggacctgtggggcccccaggctccaatggtcctgtaggggaacctggaccagaaggtccagctggcaatgatggtaccccaggacgggatggtgctgttggagaacgtggtgatcgtggagaccctgggcctgcaggtctgccaggctctcagggtgcccctggaactcctggccctgtgggtgctccaggagatgcaggacaaagaggagatccgggttctcggggtcctataggaccacctggtcgagctgggaaacgtggattacctggaccccaaggacctcgtggtgacaaaggtgatcatggagaccgaggtgacagaggtcagaagggccacagaggctttactggtcttcagggtcttcctggccctcctggtccaaatggtgaacaaggaagtgctggaatccctggaccatttggcccaagaggtcctccaggcccagttggtccttcaggtaaagaaggaaaccctgggccacttgggccaattggacctccaggtgtacgaggcagtgtaggagaagcaggacctgagggccctcctggtgagcctggcccacctggccctccgggtccccctggccaccttacagctgctcttggggatatcatggggcactatgatgaaagcatgccagatccacttcctgagtttactgaagatcaggcggctcctgatgacaaaaacaaaacggacccaggggttcatgctaccctgaagtcactcagtagtcagattgaaaccatgcgcagccccgatggctcgaaaaagcacccagcccgcacgtgtgatgacctaaagctttgccattccgcaaagcagagtggtgaatactggattgatcctaaccaaggatctgttgaagatgcaatcaaagtttactgcaacatggaaacaggagaaacatgtatttcagcaaacccatccagtgtaccacgtaaaacctggtgggccagtaaatctcctgacaataaacctgtttggtatggtcttgatatgaacagagggtctcagttcgcttatggagaccaccaatcacctaatacagccattactcagatgacttttttgcgccttttatcaaaagaagcctcccagaacatcacttacatctgtaaaaacagtgtaggatacatggacgatcaagctaagaacctcaaaaaagctgtggttctcaaaggggcaaatgacttagatatcaaagcagagggaaatattagattccggtatatcgttcttcaagacacttgctctaagcggaatggaaatgtgggcaagactgtctttgaatatagaacacagaatgtggcacgcttgcccatcatagatcttgctcctgtggatgttggcggcacagaccaggaattcggcgttgaaattgggccagtttgttttgtgtaaagtaagccaagacacatcgacaatgagcaccaccatcaatgaccaccgccattcacaagaactttgactgtttgaagttgatcctgagactcttgaagtaatggctgatcctgcatcagcattgtatatatggtcttaagtgcctggcctccttatccttcagaatatttattttacttacaatcctcaagttttaattgattttaaatatttttcaatacaacagtttaggtttaagatgaccaatgacaatgaccacctttgcagaaagtaaactgattgaataaataaatctccgttttcttcaatttatttcagtgtaatgaaaaagttgcttagtatttatgaggaaattcttcttcctggcaggtagcttaaagagtggggtatatagagccacaacacatgtttattttgcttggctgcagttgaaaaatagaaattagtgcccttttgtgacctctcattccaagattgtcaattaaaaatgagtttaaaatgtttaacttgtgatcgagacctacatgcatgtcttgatattgtgtaactataatagagactctttaaggagaatcttaaaaaaaaaaaaacgtttctcactgtcttaaatagaatttttaaatagtatatattcagtggcattttggagaacaaagtgaatttacttcgacttcttaaatttttgtaaaagactataagtttagacatctttctcattcaaatttaaagatatctttctcctcttgatcaatctatcaatattgatagaagtcacactagtatataccatttaatacatttacactttcttatttaagaagatattgaatgcaaaataattgacatatagaactttacaaacatatgtccaaggactctaaattgagactcttccacatgtacaatctcatcatcctgaagcctataatgaagaaaaagatctagaaactgagttgtggagctgactctaatcaaatgtgatgattggaattagaccatttggcctttgaactttcataggaaaaatgacccaacatttcttagcatgagctacctcatctctagaagctgggatggacttactattcttgtttatattttagatactgaaaggtgctatgcttctgttattattccaagactggagataggcagggctaaaaaggtattattatttttcctttaatgatggtgctaaaattcttcctataaaattccttaaaaataaagatggtttaatcactaccattgtgaaaacataactgttagacttcccgtttctgaaagaaagagcatcgttccaatgcttgttcactgttcctctgtcatactgtatctggaatgctttgtaatacttgcatgcttcttagaccagaacatgtaggtccccttgtgtctcaatactttttttttcttaattgcatttgttggctctattttaatttttttcttttaaaataaacagctgggaccatcccaaaagacaagccatgcatacaactttggtcatgtatctctgcaaagcatcaaattaaatgcacgcttttgtcatgtcagtggtttttgttttgtgaaattcctttgaccatattagatctatttcatttccaatagtgaaaaggagatgtggtggtatactttgtttgccatttgtttaaaagatacaacggataccttctatcatgtatgtactggcttataaatgaaaatctatctacaacattacccacaaaggcaacatgacaccaattatcactgcctctgcccttaaaaatgtcagagtagtattattgataaaaagggcaagcaatagatttttcatgactgaataaactgtaataataaaacatatgtctcaaagtgtatcacatatgaatttagcctaattgttttcagtttcattctcaatatttagtttacaacatcattttcccctaaactggttatattttgacctgtatatcttaaatttgagtatttatatgcctaaatacatgtgtgagttttgtttgacttccaagtccaaactataagattatataagttcatatagatgaatcagaaatatgtggtaatactattaagtcacaaacactaacaatttccaactatagaaataacagttcttatttggattttgggaatgctaccaata

SEQ ID NO: 121468 - DNA, 6174 bp, Homo sapiens
  Payload ID: 3819
  Gene Symbol: COL5A3
  Gene Name: collagen, type V, alpha 3
  Uniprot ID: P25940
  ENST ID: ENST00000264828
  CDS Start-End: 87-5324
gcgagtgactgcaccgagcccgagaagtcgccgcgccccgcagccgccccgactggttccccgccttgcccgtgggccccgccgggatggggaaccgccgggacctgggccagccgcgggccggtctctgcctgctcctggccgcgctgcagcttctgccggggacgcaggccgatcctgtggatgtcctgaaggccctgggtgtgcagggaggccaggctggggtccccgaggggcctggcttctgtccccagaggactccagagggtgaccgggcattcagaattggccaggccagcacgctcggcatccccacgtgggaactctttccagaaggccactttcctgagaacttctccttgctgatcaccttgcggggacagccagccaatcagtctgtcctgctgtccatttatgatgaaaggggtgcccggcagttgggcctggcactggggccagcgctgggtctcctaggtgaccccttccgccccctcccccagcaggtcaacctcacagatggcaggtggcaccgtgtggccgtcagcatagatggtgagatggtgaccctggtagctgactgtgaagctcagccccctgttttgggccatggcccccgcttcatcagcatagctggactcactgtgctggggacccaggaccttggggaaaagactttcgagggagacattcaggagctgctgataagcccagatcctcaggctgccttccaggcttgtgagcggtacctccccgactgtgacaacctggcaccggcagccacagtggctccccagggtgaaccagaaacccctcgtcctcggcggaaggggaagggaaaagggaggaagaaagggcgaggtcgcaaggggaagggcaggaaaaagaacaaggaaatttggacctcaagtccacctcctgactccgcagagaaccagacctccactgacatccccaagacagagactccagctccaaatctgcctccgacccccacgcctttggtcgtcacctccactgtgactactggactcaatgccacgatcctagagaggagcttggaccctgacagtggaaccgagctggggaccctggagaccaaggcagccagggaggatgaagaaggagatgattccaccatgggccctgacttccgggcagcagaatatccatctcggactcagttccagatctttcctggtgctggagagaaaggagcaaaaggagagcccgcagtgattgaaaaggggcagcagtttgagggacctccaggagccccaggaccccaaggggtggttggcccctcaggccctcccggccccccaggattccctggcgaccctggtccaccgggccctgctggcctcccaggaatccccggcattgatgggatccgaggcccaccgggcactgtgatcatgatgccgttccagtttgcaggcggctcctttaaaggccccccagtctcattccagcaggcccaggctcaggcagttctgcagcagactcagctctctatgaaaggcccccctggtccagtggggctcactgggcgcccaggccctgtgggtctccccgggcatccaggtctgaaaggagaggagggagcagaagggccacagggtccccgaggcctgcagggacctcatggaccccctggccgagtgggcaagatgggccgccctggagcagatggagctcggggcctcccaggggacactggacctaagggtgatcgtggcttcgatggcctccctgggctgcctggtgagaagggccaaaggggtgactttggccatgtggggcaacccggtcccccaggagaggatggtgagaggggagcagagggacctccagggcccactggccaggctggggagccgggtccacgaggactgcttggccccagaggctctcctggccccacgggtcgcccgggtgtgactggaattgatggtgctcctggtgccaaaggcaatgtgggtcctccaggagaaccaggccctccgggacagcagggaaaccatgggtcccagggactccccggtccccagggactcattggcactcctggggagaagggtccccctggaaacccaggaattccaggcctcccaggatccgatggccctctgggtcacccaggacatgagggccccacgggagagaaaggggctcagggtccaccagggtcggcaggccctccgggctatcctggacctcggggagtgaagggcacttcaggcaaccggggcctccagggggagaaaggcgagaagggagaggacggcttcccaggcttcaagggcgatgtggggctcaaaggtgatcaggggaaacccggagctccaggtccccggggagaggatggtcctgaggggccgaaggggcaggcggggcaggctggcgaggaggggcccccaggctcagctggggagaagggcaagcttggggtgccaggcctcccaggttatccaggacgccctggacctaagggatctattggatttcccggtcccctgggacccataggagagaaagggaagtcgggaaagacagggcagccaggcctggaaggagagcggggaccaccaggttcccgtggagagagggggcaaccgggtgccacagggcaaccaggccccaagggcgatgtgggccaggatggagcccctgggatccctggagaaaagggcctccctggtctgcaaggccctccaggattccctgggccaaagggcccccctggtcaccaaggtaaagatgggcgaccagggcaccctggacagagaggagaactgggcttccaaggtcagacaggcccgcctggaccagctggtgtcttaggccctcagggaaagacaggagaagtgggacctctaggtgaaagggggcctccaggcccccctggacctcctggtgaacaaggtcttcctggcctggaaggcagagagggggccaagggggaactgggaccaccaggaccccttgggaaagaagggccagctggactcaggggctttcccggccccaaagggggccctggggacccgggacctactggcttaaagggtgataagggccccccagggcccgtgggggccaatggctcccctggtgagcgcggtcctttgggcccagcaggaggcattggacttcctggccaaagtggcagcgaaggccccgttggccctgcaggcaagaaggggtcccggggagaacgtggcccccctggccccactggcaaagatgggatcccagggcccctggggcctctgggaccccctggagctgctgggccttctggcgaggaaggggacaagggggatgtgggtgcccccggacacaaggggagtaaaggcgataaaggagacgcgggcccacctggacaaccagggatacggggtcctgcaggacacccaggtcccccgggagcagacggggctcaggggcgccggggacccccaggcctctttgggcagaaaggagatgacggagtcagaggctttgtgggggtgattggccctcctggactgcaggggctgccaggccctccgggagagaaaggggaggtcggagacgtcgggtccatgggtccccatggagctccaggtcctcggggtccccaaggccccactggatcagagggcactccagggctgcctggaggagttggtcagccaggcgccgtgggtgagaagggtgagcgaggggacgctggagacccagggcctccaggagccccaggcatcccggggcccaagggagacattggtgaaaagggggactcaggcccatctggagctgctggacccccaggcaagaaaggtccccctggagaggatggagccaaagggagcgtgggccccacggggctgcccggagatctagggcccccaggagaccctggagtttcaggcatagatggttccccaggggagaagggagaccctggtgatgttgggggaccgggtccgcctggagcttctggggagcccggcgcccccgggccccccggcaagaggggtccttcaggccacatgggtcgagaaggcagagaaggggagaaaggtgccaagggggagccaggtcctgatgggcccccagggaggacgggtccaatgggggctagagggccccctggacgtgtggggcctgagggtcttcgagggatccctggccctgtgggtgaaccaggcctcctgggagcccctggacagatgggccctcctggccccctggggccctctggcctcccagggctgaagggagacactggccccaagggggaaaagggccacattggattgatcggtctcattggccccccgggagaagctggtgagaaaggagatcaggggttgccaggcgtgcagggaccccctggtcccaagggagaccctggtccccctggtcccattggctctctgggccaccctgggcccccaggtgtggcgggccctctaggacagaaaggctcaaaagggtctccggggtccatgggcccccgtggagacactggacctgcaggcccaccaggccccccgggtgcccctgccgagctgcatgggctgcgcaggcgccggcgcttcgtcccagtcccgcttccagtcgtggagggcggcctggaggaggtgctggcctcgctcacatcgctgagcttggagctggagcagctgcggcgtcctcccggcactgcggagcgcccgggcctcgtgtgccacgagctgcaccgcaaccacccgcacctgcctgatggggaatactggattgaccccaaccagggctgcgcgcgggactcgttcagggttttttgcaacttcacggcgggaggagagacctgcctctatcccgacaagaagtttgagatcgtgaaattggcctcctggtccaaggaaaagcctggaggctggtatagcacattccgtcgagggaagaagttctcctacgtggacgccgacgggtccccagtgaatgtcgtgcagctgaacttcctgaaactgctgagtgccacagctcgccagaacttcacctactcctgccagaatgcagctgcctggctggacgaagccacgggtgactacagccactccgcccgcttccttggcaccaatggagaggagctgtctttcaaccagacgacagcagccactgtcagcgtcccccaggatggctgccggctccggaaaggacagacgaagacccttttcgaattcagctcttctcgagcgggatttctgcccctgtgggatgtggcggccactgactttggccagacgaaccaaaagtttgggtttgaactgggccccgtctgcttcagcagctgagagtgtccggggtgggagggaccatgagggagccccagaatggggtgcatttggtgctgaggctttgaagccaccgtatttttcgttacctgtgactatggagccaatgggatgtgacttcgctcatcacggacagtcattccttctcctttccagggtgctgggggctggggttccctggcccaagggtccagcctcctctcaccccattccaggtggcatactgcagtctggctctttctcccctccctccccacccaagcctcacctccccaccccttgaacccccatgcaatgagcttctaactcagagctgatgaacaaaagcccccccacccccaatgcctgcctcctcactcctccgtcgctgcccttcacaccttttggtgctacccctccccagagttaagcactggatgtctcctgatcccaggctgggacccctacccccaccccctttgatcctttctacttccacggtgaaaggactgaggtcggactacagagggaagagggacttcccttgactgggttgtgtttcttttcctgcctcagcccagctctgcaaatcccctccccctgccccccacctccccaggctcaccttgccatgccaggtggtttggggaccaagatgttgggggggtgaatcaggatcctaatggtgctgccctatttatacctgggtctgtattaaaagggaaagtcccccctgttgtagatttcatctgcttcctccttagggaaggctgggatatgatgagagattccagcccaagcctggccccccaccgccaggccatagggcataatttgcatctcaaatctgagaataaactgatgaactgtg

SEQ ID NO: 121469 - DNA, 4238 bp, Homo sapiens
  Payload ID: 3820
  Gene Symbol: COL6A1
  Gene Name: collagen, type VI, alpha 1
  Uniprot ID: P12109
  ENST ID: ENST00000361866
  CDS Start-End: 115-3201
tccttgccctccgctctcactctggctgggagcagaaggcagcctcggtctctgggcggcggcggcggcccactctgccctggccgcgctgtgtggtgaccgcaggccccagacatgagggcggcccgtgctctgctgcccctgctgctgcaggcctgctggacagccgcgcaggatgagccggagaccccgagggccgtggccttccaggactgccccgtggacctgttctttgtgctggacacctctgagagcgtggccctgaggctgaagccctacggggccctcgtggacaaagtcaagtccttcaccaagcgcttcatcgacaacctgagggacaggtactaccgctgtgaccgaaacctggtgtggaacgcaggcgcgctgcactacagtgacgaggtggagatcatccaaggcctcacgcgcatgcctggcggccgcgacgcactcaaaagcagcgtggacgcggtcaagtactttgggaagggcacctacaccgactgcgctatcaagaaggggctggagcagctcctcgtggggggctcccacctgaaggagaataagtacctgattgtggtgaccgacgggcaccccctggagggctacaaggaaccctgtggggggctggaggatgctgtgaacgaggccaagcacctgggcgtcaaagtcttctcggtggccatcacacccgaccacctggagccgcgtctgagcatcatcgccacggaccacacgtaccggcgcaacttcacggcggctgactggggccagagccgcgacgcagaggaggccatcagccagaccatcgacaccatcgtggacatgatcaaaaataacgtggagcaagtgtgctgctccttcgaatgccagcctgcaagaggacctccggggctccggggcgaccccggctttgagggagaacgaggcaagccggggctcccaggagagaagggagaagccggagatcctggaagacccggggacctcggacctgttgggtaccagggaatgaagggagaaaaagggagccgtggggagaagggctccaggggacccaagggctacaagggagagaagggcaagcgtggcatcgacggggtggacggcgtgaagggggagatggggtacccaggcctgccaggctgcaagggctcgcccgggtttgacggcattcaaggaccccctggccccaagggagaccccggtgcctttggactgaaaggagaaaagggcgagcctggagctgacggggaggcggggagaccagggagctcgggaccatctggagacgagggccagccgggagagcctgggccccccggagagaaaggagaggcgggcgacgaggggaacccaggacctgacggtgcccccggggagcggggtggccctggagagagaggaccacgggggaccccaggcacgcggggaccaagaggagaccctggtgaagctggcccgcagggtgatcagggaagagaaggccccgttggtgtccctggagacccgggcgaggctggccctatcggacctaaaggctaccgaggcgatgagggtcccccagggtccgagggtgccagaggagccccaggacctgccggaccccctggagacccggggctgatgggtgaaaggggagaagacggccccgctggaaatggcaccgagggcttccccggcttccccgggtatccgggcaacaggggcgctcccgggataaacggcacgaagggctaccccggcctcaagggggacgagggagaagccggggaccccggagacgataacaacgacattgcaccccgaggagtcaaaggagcaaaggggtaccggggtcccgagggcccccagggacccccaggacaccaaggaccgcctgggccggacgaatgcgagattttggacatcatcatgaaaatgtgctcttgctgtgaatgcaagtgcggccccatcgacctcctgttcgtgctggacagctcagagagcattggcctgcagaacttcgagattgccaaggacttcgtcgtcaaggtcatcgaccggctgagccgggacgagctggtcaagttcgagccagggcagtcgtacgcgggtgtggtgcagtacagccacagccagatgcaggagcacgtgagcctgcgcagccccagcatccggaacgtgcaggagctcaaggaagccatcaagagcctgcagtggatggcgggcggcaccttcacgggggaggccctgcagtacacgcgggaccagctgctgccgcccagcccgaacaaccgcatcgccctggtcatcactgacgggcgctcagacactcagagggacaccacaccgctcaacgtgctctgcagccccggcatccaggtggtctccgtgggcatcaaagacgtgtttgacttcatcccaggctcagaccagctcaatgtcatttcttgccaaggcctggcaccatcccagggccggcccggcctctcgctggtcaaggagaactatgcagagctgctggaggatgccttcctgaagaatgtcaccgcccagatctgcatagacaagaagtgtccagattacacctgccccatcacgttctcctccccggctgacatcaccatcctgctggacggctccgccagcgtgggcagccacaactttgacaccaccaagcgcttcgccaagcgcctggccgagcgcttcctcacagcgggcaggacggaccccgcccacgacgtgcgggtggcggtggtgcagtacagcggcacgggccagcagcgcccagagcgggcgtcgctgcagttcctgcagaactacacggccctggccagtgccgtcgatgccatggactttatcaacgacgccaccgacgtcaacgatgccctgggctatgtgacccgcttctaccgcgaggcctcgtccggcgctgccaagaagaggctgctgctcttctcagatggcaactcgcagggcgccacgcccgctgccatcgagaaggccgtgcaggaagcccagcgggcaggcatcgagatcttcgtggtggtcgtgggccgccaggtgaatgagccccacatccgcgtcctggtcaccggcaagacggccgagtacgacgtggcctacggcgagagccacctgttccgtgtccccagctaccaggccctgctccgcggtgtcttccaccagacagtctccaggaaggtggcgctgggctagcccaccctgcacgccggcaccaaaccctgtcctcccacccctccccactcatcactaaacagagtaaaatgtgatgcgaattttcccgaccaacctgattcgctagattttttttaaggaaaagcttggaaagccaggacacaacgctgctgcctgctttgtgcagggtcctccggggctcagccctgagttggcatcacctgcgcagggccctctggggctcagccctgagctagtgtcacctgcacagggccctctgaggctcagccctgagctggcgtcacctgtgcagggccctctggggctcagccctgagctggcctcacctgggttccccaccccgggctctcctgccctgccctcctgcccgccctccctcctgcctgcgcagctccttccctaggcacctctgtgctgcatcccaccagcctgagcaagacgccctctcggggcctgtgccgcactagcctccctctcctctgtccccatagctggtttttcccaccaatcctcacctaacagttactttacaattaaactcaaagcaagctcttctcctcagcttggggcagccattggcctctgtctcgttttgggaaaccaaggtcaggaggccgttgcagacataaatctcggcgactcggccccgtctcctgagggtcctgctggtgaccggcctggaccttggccctacagccctggaggccgctgctgaccagcactgaccccgacctcagagagtactcgcaggggcgctggctgcactcaagaccctcgagattaacggtgctaaccccgtctgctcctccctcccgcagagactggggcctggactggacatgagagccccttggtgccacagagggctgtgtcttactagaaacaacgcaaacctctccttcctcagaatagtgatgtgttcgacgttttatcaaaggccccctttctatgttcatgttagttttgctccttctgtgtttttttctgaaccatatccatgttgctgacttttccaaataaaggttttcactcctctc

SEQ ID NO: 121470 - DNA, 3251 bp, Homo sapiens
  Payload ID: 3820
  Gene Symbol: COL6A1
  Gene Name: collagen, type VI, alpha 1
  ENST ID: ENST00000612273
  CDS Start-End: 83-3163
cagaaggcagcctcggtctctgggcggcggcggcggcccactctgccctggccgcgctgtgtggtgaccgcaggccccagacatgagggcggcccgtgctctgctgcccctgctgctgcaggcctgctggacagccgcgcaggatgagccggagaccccgagggccgtggccttccaggactgccccgtggacctgttctttgtgctggacacctctgagagcgtggccctgaggctgaagccctacggggccctcgtggacaaagtcaagtccttcaccaagcgcttcatcgacaacctgagggacaggtactaccgctgtgaccgaaacctggtgtggaacgcaggcgcgctgcactacagtgacgaggtggagatcatccaaggcctcacgcgcatgcctggcggccgcgacgcactcaaaagcagcgtggacgcggtcaagtactttgggaagggcacctacaccgactgcgctatcaagaaggggctggagcagctcctcgtggggggctcccacctgaaggagaataagtacctgattgtggtgaccgacgggcaccccctggagggctacaaggaaccctgtggggggctggaggatgctgtgaacgaggccaagcacctgggcgtcaaagtcttctcggtggccatcacacccgaccacctggagccgcgtctgagcatcatcgccacggaccacacgtaccggcgcaacttcacggcggctgactggggccagagccgcgacgcagaggaggccatcagccagaccatcgacaccatcgtggacatgatcaaaaataacgtggagcaagtgtgctgctccttcgaatgccagcctgcaagaggacctccggggctccggggcgaccccggctttgagggagaacgaggcaagccggggctcccaggagagaagggagaagccggagatcctggaagacccggggacctcggacctgttgggtaccagggaatgaagggagaaaaagggagccgtggggagaagggctccaggggacccaagggctacaagggagagaagggcaagcgtggcatcgacggggtggacggcgtgaagggggagatggggtacccaggcctgccaggctgcaagggctcgcccgggtttgacggcattcaaggaccccctggccccaagggagaccccggtgcctttggactgaaaggagaaaagggcgagcctggagctgacggggaggcggggagaccagggagctcgggaccatctggagacgagggccagccgggagagcctgggccccccggagagaaaggagaggcgggcgacgaggggaacccaggacctgacggtgcccccggggagcggggtggccctggagagagaggaccacgggggaccccaggcacgcggggaccaagaggagaccctggtgaagctggcccgcagggtgatcagggaagagaaggccccgttggtgtccctggagacccgggcgaggctggccctatcggacctaaaggctaccgaggcgatgagggtcccccagggtccgagggtgccagaggagccccaggacctgccggaccccctggagacccggggctgatgggtgaaaggggagaagacggccccgctggaaatggcaccgagggcttccccggcttccccgggtatccgggcaacaggggcgctcccgggataaacggcacgaagggctaccccggcctcaagggggacgagggagaagccggggaccccggagacgataacaacgacattgcaccccgaggagtcaaaggagcaaaggggtaccggggtcccgagggcccccagggacccccaggacaccaaggaccgcctgggccggacgaatgcgagattttggacatcatcatgaaaatgtgctgtgaatgcaagtgcggccccatcgacctcctgttcgtgctggacagctcagagagcattggcctgcagaacttcgagattgccaaggacttcgtcgtcaaggtcatcgaccggctgagccgggacgagctggtcaagttcgagccagggcagtcgtacgcgggtgtggtgcagtacagccacagccagatgcaggagcacgtgagcctgcgcagccccagcatccggaacgtgcaggagctcaaggaagccatcaagagcctgcagtggatggcgggcggcaccttcacgggggaggccctgcagtacacgcgggaccagctgctgccgcccagcccgaacaaccgcatcgccctggtcatcactgacgggcgctcagacactcagagggacaccacaccgctcaacgtgctctgcagccccggcatccaggtggtctccgtgggcatcaaagacgtgtttgacttcatcccaggctcagaccagctcaatgtcatttcttgccaaggcctggcaccatcccagggccggcccggcctctcgctggtcaaggagaactatgcagagctgctggaggatgccttcctgaagaatgtcaccgcccagatctgcatagacaagaagtgtccagattacacctgccccatcacgttctcctccccggctgacatcaccatcctgctggacggctccgccagcgtgggcagccacaactttgacaccaccaagcgcttcgccaagcgcctggccgagcgcttcctcacagcgggcaggacggaccccgcccacgacgtgcgggtggcggtggtgcagtacagcggcacgggccagcagcgcccagagcgggcgtcgctgcagttcctgcagaactacacggccctggccagtgccgtcgatgccatggactttatcaacgacgccaccgacgtcaacgatgccctgggctatgtgacccgcttctaccgcgaggcctcgtccggcgctgccaagaagaggctgctgctcttctcagatggcaactcgcagggcgccacgcccgctgccatcgagaaggccgtgcaggaagcccagcgggcaggcatcgagatcttcgtggtggtcgtgggccgccaggtgaatgagccccacatccgcgtcctggtcaccggcaagacggccgagtacgacgtggcctacggcgagagccacctgttccgtgtccccagctaccaggccctgctccgcggtgtcttccaccagacagtctccaggaaggtggcgctgggctagcccaccctgcacgccggcaccaaaccctgtcctcccacccctccccactcatcactaaacagagtaaaatgtgatgcgaattttcccg

SEQ ID NO: 121471 - DNA, 3461 bp, Homo sapiens
  Payload ID: 3821
  Gene Symbol: COL6A2
  Gene Name: collagen, type VI, alpha 2
  Uniprot ID: P12110
  ENST ID: ENST00000300527
  CDS Start-End: 105-3164
cggccgcggttccctccctgctgcttactcggcgcccgcgcctcgggccgtcgggagcggagcctcctcgggaccaggacttcagggccacaggtgctgccaagatgctccagggcacctgctccgtgctcctgctctggggaatcctgggggccatccaggcccagcagcaggaggtcatctcgccggacactaccgagagaaacaacaactgcccagagaagaccgactgccccatccacgtgtacttcgtgctggacacctcggagagcgtcaccatgcagtcccccacggacatcctgctcttccacatgaagcagttcgtgccgcagttcatcagccagctgcagaacgagttctacctggaccaggtggcgctgagctggcgctacggcggcctgcacttctctgaccaggtggaggtgttcagcccaccgggcagcgaccgggcctccttcatcaagaacctgcagggcatcagctccttccgccgcggcaccttcaccgactgcgcgctggccaacatgacggagcagatccggcaggaccgcagcaagggcaccgtccacttcgccgtggtcatcaccgacggccacgtcaccggcagcccctgcgggggcatcaagctgcaggccgagcgggcccgcgaggagggcatccggctcttcgccgtggcccccaaccagaacctgaaggagcagggcctgcgggacatcgccagcacgccgcacgagctctaccgcaacgactacgccaccatgctgcccgactccaccgagatcgaccaggacaccatcaaccgcatcatcaaggtcatgaaacacgaagcctacggagagtgctacaaggtgagctgcctggaaatccctgggccctctggccccaagggctaccgtggacagaagggtgccaagggcaacatgggtgagccgggagagcctggccagaagggaagacagggagacccgggcatcgaaggccccattggattcccaggacccaagggcgttcctggcttcaaaggagagaagggtgaatttggagccgacggtcgcaagggggcccctggcctggctggcaagaacgggaccgatggacagaagggcaagctggggcgcatcggacctcctggctgcaagggagaccctggaaaccggggccccgacggttacccgggggaagcagggagtccaggggagcgaggagaccaaggcggcaagggggaccctggccgcccaggacgcagagggcccccgggagaaatcggggccaagggaagcaaggggtatcaaggcaacagtggagccccaggaagtcctggtgtgaaaggagccaagggcgggcctgggccccgcggacccaaaggcgagccggggcgcaggggagaccccggcaccaagggcagcccaggcagcgatggccccaagggggagaagggggaccctggccctgaggggccccgcggcctggctggagaggttggcaacaaaggagccaagggagaccgaggcttgcctggacccagaggcccccagggagctcttggggagcccggaaagcagggatctcggggagaccccggtgatgcaggaccccgtggagactcaggacagccaggccccaagggagaccccggcaggcctggattcagctacccaggaccccgaggagcacccggagaaaaaggcgagcccggcccacgcggccccgagggaggccgaggcgactttggcttgaaaggagaacctgggaggaaaggagagaaaggagagcctgcggatcctggtccccctggtgagccaggccctcgggggccaagaggagtcccaggacccgagggtgagcccggcccccctggagaccccggtctcacggagtgtgacgtcatgacctacgtgagggagacctgcgggtgctgcgactgtgagaagcgctgtggcgccctggacgtggtcttcgtcatcgacagctccgagagcattgggtacaccaacttcacactggagaagaacttcgtcatcaacgtggtcaacaggctgggtgccatcgctaaggaccccaagtccgagacagggacgcgtgtgggcgtggtgcagtacagccacgagggcacctttgaggccatccagctggacgacgaacgtatcgactccctgtcgagcttcaaggaggctgtcaagaacctcgagtggattgcgggcggcacctggacaccctcagccctcaagtttgcctacgaccgcctcatcaaggagagccggcgccagaagacacgtgtgtttgcggtggtcatcacggacgggcgccacgaccctcgggacgatgacctcaacttgcgggcgctgtgcgaccgcgacgtcacagtgacggccatcggcatcggggacatgttccacgagaagcacgagagtgaaaacctctactccatcgcctgcgacaagccacagcaggtgcgcaacatgacgctgttctccgacctggtcgctgagaagttcatcgatgacatggaggacgtcctctgcccggaccctcagatcgtgtgcccagaccttccctgccaaacagagctgtccgtggcacagtgcacgcagcggcccgtggacatcgtcttcctgctggacggctccgagcggctgggtgagcagaacttccacaaggcccggcgcttcgtggagcaggtggcgcggcggctgacgctggcccggagggacgacgaccctctcaacgcacgcgtggcgctgctgcagtttggtggccccggcgagcagcaggtggccttcccgctgagccacaacctcacggccatccacgaggcgctggagaccacacaatacctgaactccttctcgcacgtgggcgcaggcgtggtgcacgccatcaatgccatcgtgcgcagcccgcgtggcggggcccggaggcacgcagagctgtccttcgtgttcctcacggacggcgtcacgggcaacgacagtctgcacgagtcggcgcactccatgcgcaagcagaacgtggtacccaccgtgctggccttgggcagcgacgtggacatggacgtgctcaccacgctcagcctgggtgaccgcgccgccgtgttccacgagaaggactatgacagcctggcgcaacccggcttcttcgaccgcttcatccgctggatctgctagcgccgccgcccgggccccgcagtcgagggtcgtgagcccaccccgtccatggtgctaagcgggcccgggtcccacacggccagcaccgctgctcactcggacgacgccctgggcctgcacctctccagctcctcccacggggtccccgtagccccggcccccgcccagccccaggtctccccaggccctccgcaggctgcccggcctccctccccctgcagccatcccaaggctcctgacctacctggcccctgagctctggagcaagccctgacccaataaaggctttgaacccat

SEQ ID NO: 121472 - DNA, 3446 bp, Homo sapiens
  Payload ID: 3821
  Gene Symbol: COL6A2
  Gene Name: collagen, type VI, alpha 2
  Uniprot ID: P12110
  ENST ID: ENST00000310645
  CDS Start-End: 83-2569
gcttactcggcgcccgcgcctcgggccgtcgggagcggagcctcctcgggaccaggacttcagggccacaggtgctgccaagatgctccagggcacctgctccgtgctcctgctctggggaatcctgggggccatccaggcccagcagcaggaggtcatctcgccggacactaccgagagaaacaacaactgcccagagaagaccgactgccccatccacgtgtacttcgtgctggacacctcggagagcgtcaccatgcagtcccccacggacatcctgctcttccacatgaagcagttcgtgccgcagttcatcagccagctgcagaacgagttctacctggaccaggtggcgctgagctggcgctacggcggcctgcacttctctgaccaggtggaggtgttcagcccaccgggcagcgaccgggcctccttcatcaagaacctgcagggcatcagctccttccgccgcggcaccttcaccgactgcgcgctggccaacatgacggagcagatccggcaggaccgcagcaagggcaccgtccacttcgccgtggtcatcaccgacggccacgtcaccggcagcccctgcgggggcatcaagctgcaggccgagcgggcccgcgaggagggcatccggctcttcgccgtggcccccaaccagaacctgaaggagcagggcctgcgggacatcgccagcacgccgcacgagctctaccgcaacgactacgccaccatgctgcccgactccaccgagatcgaccaggacaccatcaaccgcatcatcaaggtcatgaaacacgaagcctacggagagtgctacaaggtgagctgcctggaaatccctgggccctctggccccaagggctaccgtggacagaagggtgccaagggcaacatgggtgagccgggagagcctggccagaagggaagacagggagacccgggcatcgaaggccccattggattcccaggacccaagggcgttcctggcttcaaaggagagaagggtgaatttggagccgacggtcgcaagggggcccctggcctggctggcaagaacgggaccgatggacagaagggcaagctggggcgcatcggacctcctggctgcaagggagaccctggaaaccggggccccgacggttacccgggggaagcagggagtccaggggagcgaggagaccaaggcggcaagggggaccctggccgcccaggacgcagagggcccccgggagaaatcggggccaagggaagcaaggggtatcaaggcaacagtggagccccaggaagtcctggtgtgaaaggagccaagggcgggcctgggccccgcggacccaaaggcgagccggggcgcaggggagaccccggcaccaagggcagcccaggcagcgatggccccaagggggagaagggggaccctggccctgaggggccccgcggcctggctggagaggttggcaacaaaggagccaagggagaccgaggcttgcctggacccagaggcccccagggagctcttggggagcccggaaagcagggatctcggggagaccccggtgatgcaggaccccgtggagactcaggacagccaggccccaagggagaccccggcaggcctggattcagctacccaggaccccgaggagcacccggagaaaaaggcgagcccggcccacgcggccccgagggaggccgaggcgactttggcttgaaaggagaacctgggaggaaaggagagaaaggagagcctgcggatcctggtccccctggtgagccaggccctcgggggccaagaggagtcccaggacccgagggtgagcccggcccccctggagaccccggtctcacggagtgtgacgtcatgacctacgtgagggagacctgcgggtgctgcgactgtgagaagcgctgtggcgccctggacgtggtcttcgtcatcgacagctccgagagcattgggtacaccaacttcacactggagaagaacttcgtcatcaacgtggtcaacaggctgggtgccatcgctaaggaccccaagtccgagacagggacgcgtgtgggcgtggtgcagtacagccacgagggcacctttgaggccatccagctggacgacgaacgtatcgactccctgtcgagcttcaaggaggctgtcaagaacctcgagtggattgcgggcggcacctggacaccctcagccctcaagtttgcctacgaccgcctcatcaaggagagccggcgccagaagacacgtgtgtttgcggtggtcatcacggacgggcgccacgaccctcgggacgatgacctcaacttgcgggcgctgtgcgaccgcgacgtcacagtgacggccatcggcatcggggacatgttccacgagaagcacgagagtgaaaacctctactccatcgcctgcgacaagccacagcaggtgcgcaacatgacgctgttctccgacctggtcgctgagaagttcatcgatgacatggaggacgtcctctgcccggaccctcagatcgtgtgcccagaccttccctgccaaacaggtttggacggagctgttttgtgctgaaaggttttctcggggtccgtggtgtcccccaaaggtgccaccgtgcgggtctcctagctccctgccagcttcctgtccctgtgctcactgcccccacgcctcctgccaaggccgagccacacacccgctccacctgcatttcctctaccgactcgccagcccaaatgccgctcttcactctggcctcgctgagcggctgcccgaggaggagctctaggccgacgcccaccgcaggccttacagtcttctctggacgctcccttgcagatgcaccgtggcctggcggcgagcccccggtcaccttcctccgcacggaagaggggccggacgccaccttccccaggaccattcccctgatccaacagttgctaaacgccacggagctcacgcaggacccggccgcctactcccagctggtggccgtgctggtctacaccgccgagcgggccaagttcgccaccggggtagagcggcaggactggatggagctgttcattgacacctttaagctggtgcacagggacatcgtgggggaccccgagaccgcgctggccctctgctaaagcccgggcacccgcccagccgggctgggccctccctgccacactagcttcccagggctgcccccgacaggctggctctcagtggaggccagagatctggaatcggggtcagcggggctacagtccttccaggggctctggggcagctcccagcctcttcccatgctggtggccaccgtgtcccttgctgcggctgcatcttccagtctctcctccgtcttcctgtggccgctctctttataagaaccctggtcattgaatttaaggcccaccccaagtccagaatgacctcgcaagacccttaactcactccc

SEQ ID NO: 121473 - DNA, 3101 bp, Homo sapiens
  Payload ID: 3821
  Gene Symbol: COL6A2
  Gene Name: collagen, type VI, alpha 2
  Uniprot ID: P12110
  ENST ID: ENST00000397763
  CDS Start-End: 28-2784
gacttcagggccacaggtgctgccaagatgctccagggcacctgctccgtgctcctgctctggggaatcctgggggccatccaggcccagcagcaggaggtcatctcgccggacactaccgagagaaacaacaactgcccagagaagaccgactgccccatccacgtgtacttcgtgctggacacctcggagagcgtcaccatgcagtcccccacggacatcctgctcttccacatgaagcagttcgtgccgcagttcatcagccagctgcagaacgagttctacctggaccaggtggcgctgagctggcgctacggcggcctgcacttctctgaccaggtggaggtgttcagcccaccgggcagcgaccgggcctccttcatcaagaacctgcagggcatcagctccttccgccgcggcaccttcaccgactgcgcgctggccaacatgacggagcagatccggcaggaccgcagcaagggcaccgtccacttcgccgtggtcatcaccgacggccacgtcaccggcagcccctgcgggggcatcaagctgcaggccgagcgggcccgcgaggagggcatccggctcttcgccgtggcccccaaccagaacctgaaggagcagggcctgcgggacatcgccagcacgccgcacgagctctaccgcaacgactacgccaccatgctgcccgactccaccgagatcgaccaggacaccatcaaccgcatcatcaaggtcatgaaacacgaagcctacggagagtgctacaaggtgagctgcctggaaatccctgggccctctggccccaagggctaccgtggacagaagggtgccaagggcaacatgggtgagccgggagagcctggccagaagggaagacagggagacccgggcatcgaaggccccattggattcccaggacccaagggcgttcctggcttcaaaggagagaagggtgaatttggagccgacggtcgcaagggggcccctggcctggctggcaagaacgggaccgatggacagaagggcaagctggggcgcatcggacctcctggctgcaagggagaccctggaaaccggggccccgacggttacccgggggaagcagggagtccaggggagcgaggagaccaaggcggcaagggggaccctggccgcccaggacgcagagggcccccgggagaaatcggggccaagggaagcaaggggtatcaaggcaacagtggagccccaggaagtcctggtgtgaaaggagccaagggcgggcctgggccccgcggacccaaaggcgagccggggcgcaggggagaccccggcaccaagggcagcccaggcagcgatggccccaagggggagaagggggaccctggccctgaggggccccgcggcctggctggagaggttggcaacaaaggagccaagggagaccgaggcttgcctggacccagaggcccccagggagctcttggggagcccggaaagcagggatctcggggagaccccggtgatgcaggaccccgtggagactcaggacagccaggccccaagggagaccccggcaggcctggattcagctacccaggaccccgaggagcacccggagaaaaaggcgagcccggcccacgcggccccgagggaggccgaggcgactttggcttgaaaggagaacctgggaggaaaggagagaaaggagagcctgcggatcctggtccccctggtgagccaggccctcgggggccaagaggagtcccaggacccgagggtgagcccggcccccctggagaccccggtctcacggagtgtgacgtcatgacctacgtgagggagacctgcgggtgctgcgactgtgagaagcgctgtggcgccctggacgtggtcttcgtcatcgacagctccgagagcattgggtacaccaacttcacactggagaagaacttcgtcatcaacgtggtcaacaggctgggtgccatcgctaaggaccccaagtccgagacagggacgcgtgtgggcgtggtgcagtacagccacgagggcacctttgaggccatccagctggacgacgaacgtatcgactccctgtcgagcttcaaggaggctgtcaagaacctcgagtggattgcgggcggcacctggacaccctcagccctcaagtttgcctacgaccgcctcatcaaggagagccggcgccagaagacacgtgtgtttgcggtggtcatcacggacgggcgccacgaccctcgggacgatgacctcaacttgcgggcgctgtgcgaccgcgacgtcacagtgacggccatcggcatcggggacatgttccacgagaagcacgagagtgaaaacctctactccatcgcctgcgacaagccacagcaggtgcgcaacatgacgctgttctccgacctggtcgctgagaagttcatcgatgacatggaggacgtcctctgcccggaccctcagatcgtgtgcccagaccttccctgccaaacagatgcaccgtggcctggcggcgagcccccggtcaccttcctccgcacggaagaggggccggacgccaccttccccaggaccattcccctgatccaacagttgctaaacgccacggagctcacgcaggacccggccgcctactcccagctggtggccgtgctggtctacaccgccgagcgggccaagttcgccaccggggtagagcggcaggactggatggagctgttcattgacacctttaagctggtgcacagggacatcgtgggggaccccgagaccgcgctggccctctgctaaagcccgggcacccgcccagccgggctgggccctccctgccacactagcttcccagggctgcccccgacaggctggctctcagtggaggccagagatctggaatcggggtcagcggggctacagtccttccaggggctctggggcagctcccagcctcttcccatgctggtggccaccgtgtcccttgctgcggctgcatcttccagtctctcctccgtcttcctgtggccgctctctttataagaaccctggtcattgaatttaaggcccaccccaagtccagaatgacctcgcaagacccttaactcactcccgtc

SEQ ID NO: 121474 - DNA, 3430 bp, Homo sapiens
  Payload ID: 3821
  Gene Symbol: COL6A2
  Gene Name: collagen, type VI, alpha 2
  Uniprot ID: P12110
  ENST ID: ENST00000409416
  CDS Start-End: 64-2550
ctgggggtgtctgagcgacccccacccctgttgcaggacttcagggccacaggtgctgccaagatgctccagggcacctgctccgtgctcctgctctggggaatcctgggggccatccaggcccagcagcaggaggtcatctcgccggacactaccgagagaaacaacaactgcccagagaagaccgactgccccatccacgtgtacttcgtgctggacacctcggagagcgtcaccatgcagtcccccacggacatcctgctcttccacatgaagcagttcgtgccgcagttcatcagccagctgcagaacgagttctacctggaccaggtggcgctgagctggcgctacggcggcctgcacttctctgaccaggtggaggtgttcagcccaccgggcagcgaccgggcctccttcatcaagaacctgcagggcatcagctccttccgccgcggcaccttcaccgactgcgcgctggccaacatgacggagcagatccggcaggaccgcagcaagggcaccgtccacttcgccgtggtcatcaccgacggccacgtcaccggcagcccctgcgggggcatcaagctgcaggccgagcgggcccgcgaggagggcatccggctcttcgccgtggcccccaaccagaacctgaaggagcagggcctgcgggacatcgccagcacgccgcacgagctctaccgcaacgactacgccaccatgctgcccgactccaccgagatcgaccaggacaccatcaaccgcatcatcaaggtcatgaaacacgaagcctacggagagtgctacaaggtgagctgcctggaaatccctgggccctctggccccaagggctaccgtggacagaagggtgccaagggcaacatgggtgagccgggagagcctggccagaagggaagacagggagacccgggcatcgaaggccccattggattcccaggacccaagggcgttcctggcttcaaaggagagaagggtgaatttggagccgacggtcgcaagggggcccctggcctggctggcaagaacgggaccgatggacagaagggcaagctggggcgcatcggacctcctggctgcaagggagaccctggaaaccggggccccgacggttacccgggggaagcagggagtccaggggagcgaggagaccaaggcggcaagggggaccctggccgcccaggacgcagagggcccccgggagaaatcggggccaagggaagcaaggggtatcaaggcaacagtggagccccaggaagtcctggtgtgaaaggagccaagggcgggcctgggccccgcggacccaaaggcgagccggggcgcaggggagaccccggcaccaagggcagcccaggcagcgatggccccaagggggagaagggggaccctggccctgaggggccccgcggcctggctggagaggttggcaacaaaggagccaagggagaccgaggcttgcctggacccagaggcccccagggagctcttggggagcccggaaagcagggatctcggggagaccccggtgatgcaggaccccgtggagactcaggacagccaggccccaagggagaccccggcaggcctggattcagctacccaggaccccgaggagcacccggagaaaaaggcgagcccggcccacgcggccccgagggaggccgaggcgactttggcttgaaaggagaacctgggaggaaaggagagaaaggagagcctgcggatcctggtccccctggtgagccaggccctcgggggccaagaggagtcccaggacccgagggtgagcccggcccccctggagaccccggtctcacggagtgtgacgtcatgacctacgtgagggagacctgcgggtgctgcgactgtgagaagcgctgtggcgccctggacgtggtcttcgtcatcgacagctccgagagcattgggtacaccaacttcacactggagaagaacttcgtcatcaacgtggtcaacaggctgggtgccatcgctaaggaccccaagtccgagacagggacgcgtgtgggcgtggtgcagtacagccacgagggcacctttgaggccatccagctggacgacgaacgtatcgactccctgtcgagcttcaaggaggctgtcaagaacctcgagtggattgcgggcggcacctggacaccctcagccctcaagtttgcctacgaccgcctcatcaaggagagccggcgccagaagacacgtgtgtttgcggtggtcatcacggacgggcgccacgaccctcgggacgatgacctcaacttgcgggcgctgtgcgaccgcgacgtcacagtgacggccatcggcatcggggacatgttccacgagaagcacgagagtgaaaacctctactccatcgcctgcgacaagccacagcaggtgcgcaacatgacgctgttctccgacctggtcgctgagaagttcatcgatgacatggaggacgtcctctgcccggaccctcagatcgtgtgcccagaccttccctgccaaacaggtttggacggagctgttttgtgctgaaaggttttctcggggtccgtggtgtcccccaaaggtgccaccgtgcgggtctcctagctccctgccagcttcctgtccctgtgctcactgcccccacgcctcctgccaaggccgagccacacacccgctccacctgcatttcctctaccgactcgccagcccaaatgccgctcttcactctggcctcgctgagcggctgcccgaggaggagctctaggccgacgcccaccgcaggccttacagtcttctctggacgctcccttgcagatgcaccgtggcctggcggcgagcccccggtcaccttcctccgcacggaagaggggccggacgccaccttccccaggaccattcccctgatccaacagttgctaaacgccacggagctcacgcaggacccggccgcctactcccagctggtggccgtgctggtctacaccgccgagcgggccaagttcgccaccggggtagagcggcaggactggatggagctgttcattgacacctttaagctggtgcacagggacatcgtgggggaccccgagaccgcgctggccctctgctaaagcccgggcacccgcccagccgggctgggccctccctgccacactagcttcccagggctgcccccgacaggctggctctcagtggaggccagagatctggaatcggggtcagcggggctacagtccttccaggggctctggggcagctcccagcctcttcccatgctggtggccaccgtgtcccttgctgcggctgcatcttccagtctctcctccgtcttcctgtggccgctctctttataagaaccctggtcattgaatttaaggcccaccccaagtccagaatgacctcgcaagacccttaactcactcccgtc

SEQ ID NO: 121475 - DNA, 919 bp, Homo sapiens
  Payload ID: 3821
  Gene Symbol: COL6A2
  Gene Name: collagen, type VI, alpha 2
  ENST ID: ENST00000436769
  CDS Start-End: 379-919
ggcggctccccagggcggcgggacccgggctgacagcgacccgcagcccctgccgggccgcccacacccgccctgggactccgccggggcgctggtggaaccgctgggcctgggtctccactgctggcaaccgaacggatcggccctctgtggagccgcaggtgtgcgggcgagcggcgcccatccgggctgtgccagcagaaccccggtgcccgcgcctaggacgcccctggagaagggaccttccctttggggtcggaacccagaaaggaggggcctgcgatccgcggagctccttgttcttgggataacacagctctggcttggaggcccccttgcacttcgactctggacttcagggccacaggtgctgccaagatgctccagggcacctgctccgtgctcctgctctggggaatcctgggggccatccaggcccagcagcaggaggtcatctcgccggacactaccgagagaaacaacaactgcccagagaagaccgactgccccatccacgtgtacttcgtgctggacacctcggagagcgtcaccatgcagtcccccacggacatcctgctcttccacatgaagcagttcgtgccgcagttcatcagccagctgcagaacgagttctacctggaccaggtggcgctgagctggcgctacggcggcctgcacttctctgaccaggtggaggtgttcagcccaccgggcagcgaccgggcctccttcatcaagaacctgcagggcatcagctccttccgccgcggcaccttcaccgactgcgcgctggccaacatgacggagcagatccggcaggaccgcagcaagggcaccgtccacttcgccgtggtcatcaccgacggccacgtcaccggcagcccctgcgggggcatcaagctgcaggccgagcgggccc

SEQ ID NO: 121476 - DNA, 750 bp, Homo sapiens
  Payload ID: 3821
  Gene Symbol: COL6A2
  Gene Name: collagen, type VI, alpha 2
  ENST ID: ENST00000413758
  CDS Start-End: 1-750
ggcaacaaaggagccaagggagaccgaggcttgcctggacccagaggcccccagggagctcttggggagcccggaaagcagggatctcggggagaccccggtgatgcaggaccccgtggagactcaggacagccaggccccaagggagaccccggcaggcctggattcagctacccaggaccccgaggagcacccggagaaaaaggcgagcccggcccacgcggccccgagggaggccgaggcgactttggcttgaaaggagaacctgggaggaaaggagagaaaggagagcctgcggatcctggtccccctggtgagccaggccctcgggggccaagaggagtcccaggacccgagggtgagcccggcccccctggagaccccggtctcacggagtgtgacgtcatgacctacgtgagggagacctgcgggtgctgcgggtctgaggtctccccggtaccccccgatgaccctgccacccccccagactgtgagaagcgctgtggcgccctggacgtggtcttcgtcatcgacagctccgagagcattgggtacaccaacttcacactggagaagaacttcgtcatcaacgtggtcaacaggctgggtgccatcgctaaggaccccaagtccgagacagggacgcgtgtgggcgtggtgcagtacagccacgagggcacctttgaggccatccagctggacgacgaacgtatcgactccctgtcgagcttcaaggaggctgtcaagaac

SEQ ID NO: 121477 - DNA, 10749 bp, Homo sapiens
  Payload ID: 3822
  Gene Symbol: COL6A3
  Gene Name: collagen, type VI, alpha 3
  Uniprot ID: P12111
  ENST ID: ENST00000295550
  CDS Start-End: 454-9987
gcttgtagggtgaagacagaattcagagggtgacatcagcctgagcgggggccagaagaaacagagtggaggagtctggtttcatttacagttttgggtcagttctgcagtgaggagggggagaggaggggtccgggagggaggaggaggaggaggaggagctggaggaagccctgactggtatccctggccccagtccagtttggagctcagtcttccaccaaaggccgttcagttctcctgggctccagcctcctgcaaggactgcaagagttttcctccgcagctctgagtctccacttttttggtggagaaaggctgcaaaaagaaaaagagacgcagtgagtgggaaaagtatgcatcctattcaaacctaattgaatcgaggagcccagggacacacgccttcaggtttgctcaggggttcatatttggtgcttagacaaattcaaaatgaggaaacatcggcacttgcccttagtggccgtcttttgcctctttctctcaggctttcctacaactcatgcccagcagcagcaagcagatgtcaaaaatggtgcggctgctgatataatatttctagtggattcctcttggaccattggagaggaacatttccaacttgttcgagagtttctatatgatgttgtaaaatccttagctgtgggagaaaatgatttccattttgctctggtccagttcaacggaaacccacataccgagttcctgttaaatacgtatcgtactaaacaagaagtcctttctcatatttccaacatgtcttatattgggggaaccaatcagactggaaaaggattagaatacataatgcaaagccacctcaccaaggctgctggaagccgggccggtgacggagtccctcaggttatcgtagtgttaactgatggacactcgaaggatggccttgctctgccctcagcggaacttaagtctgctgatgttaacgtgtttgcaattggagttgaggatgcagatgaaggagcgttaaaagaaatagcaagtgaaccgctcaatatgcatatgttcaacctagagaattttacctcacttcatgacatagtaggaaacttagtgtcctgtgtgcattcatccgtgagtccagaaagggctggggacacggaaacccttaaagacatcacagcacaagactctgctgacattattttccttattgatggatcaaacaacaccggaagtgtcaatttcgcagtcattctcgacttccttgtaaatctccttgagaaactcccaattggaactcagcagatccgagtgggggtggtccagtttagcgatgagcccagaaccatgttctccttggacacctactccaccaaggcccaggttctgggtgcagtgaaagccctcgggtttgctggtggggagttggccaatatcggcctcgcccttgatttcgtggtggagaaccacttcacccgggcagggggcagccgcgtggaggaaggggttccccaggtgctggtcctcataagtgccgggccttctagtgacgagattcgctacggggtggtagcactgaagcaggctagcgtgttctcattcggccttggagcccaggccgcctccagggcagagcttcagcacatagctaccgatgacaacttggtgtttactgtcccggaattccgtagctttggggacctccaggagaaattactgccgtacattgttggcgtggcccaaaggcacattgtcttgaaaccgccaaccattgtcacacaagtcattgaagtcaacaagagagacatagtcttcctggtggatggctcatctgcactgggactggccaacttcaatgccatccgagacttcattgctaaagtcatccagaggctggaaatcggacaggatcttatccaggtggcagtggcccagtatgcagacactgtgaggcctgaattttatttcaatacccatccaacaaaaagggaagtcataaccgctgtgcggaaaatgaagcccctggacggctcggccctgtacacgggctctgctctagactttgttcgtaacaacctattcacgagttcagccggctaccgggctgccgaggggattcctaagcttttggtgctgatcacaggtggtaagtccctagatgaaatcagccagcctgcccaggagctgaagagaagcagcataatggcctttgccattgggaacaagggtgccgatcaggctgagctggaagagatcgctttcgactcctccctggtgttcatcccagctgagttccgagccgccccattgcaaggcatgctgcctggcttgctggcacctctcaggaccctctctggaacccctgaagttcactcaaacaaaagggatatcatctttcttttggatggatcagccaacgttggaaaaaccaatttcccttatgtgcgcgactttgtaatgaacctagttaacagccttgatattggaaatgacaatattcgtgttggtttagtgcaatttagtgacactcctgtaacggagttctctttaaacacataccagaccaagtcagatatccttggtcatctgaggcagctgcagctccagggaggttcgggcctgaacacaggctcagccctaagctatgtctatgccaaccacttcacggaagctggcggcagcaggatccgtgaacacgtgccgcagctcctgcttctgctcacagctgggcagtctgaggactcctatttgcaagctgccaacgccttgacacgcgcgggcatcctgactttttgtgtgggagctagccaggcgaataaggcagagcttgagcagattgcttttaacccaagcctggtgtatctcatggatgatttcagctccctgccagctttgcctcagcagctgattcagcccctaaccacatatgttagtggaggtgtggaggaagtaccactcgctcagccagagagcaagcgagacattctgttcctctttgacggctcagccaatcttgtgggccagttccctgttgtccgtgactttctctacaagattatcgatgagctcaatgtgaagccagaggggacccgaattgcggtggctcagtacagcgatgatgtcaaggtggagtcccgttttgatgagcaccagagtaagcctgagatcctgaatcttgtgaagagaatgaagatcaagacgggcaaagccctcaacctgggctacgcgctggactatgcacagaggtacatttttgtgaagtctgctggcagccggatcgaggatggagtgcttcagttcctggtgctgctggtcgcaggaaggtcatctgaccgtgtggatgggccagcaagtaacctgaagcagagtggggttgtgcctttcatcttccaagccaagaacgcagaccctgctgagttagagcagatcgtgctgtctccagcgtttatcctggctgcagagtcgcttcccaagattggagatcttcatccacagatagtgaatctcttaaaatcagtgcacaacggagcaccagcaccagtttcaggtgaaaaggacgtggtgtttctgcttgatggctctgagggcgtcaggagcggcttccctctgttgaaagagtttgtccagagagtggtggaaagcctggatgtgggccaggaccgggtccgcgtggccgtggtgcagtacagcgaccggaccaggcccgagttctacctgaattcatacatgaacaagcaggacgtcgtcaacgctgtccgccagctgaccctgctgggagggccgacccccaacaccggggccgccctggagtttgtcctgaggaacatcctggtcagctctgcgggaagcaggataacagaaggtgtgccccagctgctgatcgtcctcacggccgacaggtctggggatgatgtgcggaacccctccgtggtcgtgaagaggggtggggctgtgcccattggcattggcatcgggaacgctgacatcacagagatgcagaccatctccttcatcccggactttgccgtggccattcccacctttcgccagctggggaccgtccaacaggtcatctctgagagggtgacccagctcacccgcgaggagctgagcaggctgcagccggtgttgcagcctctaccgagcccaggtgttggtggcaagagggacgtggtctttctcatcgatgggtcccaaagtgccgggcctgagttccagtacgttcgcaccctcatagagaggctggttgactacctggacgtgggctttgacaccacccgggtggctgtcatccagttcagcgatgaccccaaggtggagttcctgctgaacgcccattccagcaaggatgaagtgcagaacgcggtgcagcggctgaggcccaagggagggcggcagatcaacgtgggcaatgccctggagtacgtgtccaggaacatcttcaagaggcccctggggagccgcattgaagagggcgtcccgcagttcctggtcctcatctcgtctggaaagtctgacgatgaggtggacgacccggcggtggagctcaagcagtttggcgtggcccctttcacgatcgccaggaacgcagaccaggaggagctggtgaagatctcgctgagccccgaatatgtgttctcggtgagcaccttccgggagctgcccagcctggagcagaaactgctgacgcccatcacgaccctgacctcagagcagatccagaagctcttagccagcactcgctatccacctccagcagttgagagtgatgctgcagacattgtctttctgatcgacagctctgagggagttaggccagatggctttgcacatattcgagattttgttagcaggattgttcgaagactcaacatcggccccagtaaagtgagagttggggtcgtgcagttcagcaatgatgtcttcccagaattctatctgaaaacctacagatcccaggccccggtgctggacgccatacggcgcctgaggctcagaggggggtccccactgaacactggcaaggctctcgaatttgtggcaagaaacctctttgttaagtctgcggggagtcgcatagaagacggggtgccccaacacctggtcctggtcctgggtggaaaatcccaggacgatgtgtccaggttcgcccaggtgatccgttcctcgggcattgtgagtttaggggtaggagaccggaacatcgacagaacagagctgcagaccatcaccaatgaccccagactggtcttcacagtgcgagagttcagagagcttcccaacatagaagaaagaatcatgaactcgtttggaccctccgcagccactcctgcacctccaggggtggacacccctcctccttcacggccagagaagaagaaagcagacattgtgttcctgttggatggttccatcaacttcaggagggacagtttccaggaagtgcttcgttttgtgtctgaaatagtggacacagtttatgaagatggcgactccatccaagtggggcttgtccagtacaactctgaccccactgacgaattcttcctgaaggacttctctaccaagaggcagattattgacgccatcaacaaagtggtctacaaagggggaagacacgccaacactaaggtgggccttgagcacctgcgggtaaaccactttgtgcctgaggcaggcagccgcctggaccagcgggtccctcagattgcctttgtgatcacgggaggaaagtcggtggaagatgcacaggatgtgagcctggccctcacccagaggggggtcaaagtgtttgctgttggagtgaggaatatcgactcggaggaggttggaaagatagcgtccaacagcgccacagcgttccgcgtgggcaacgtccaggagctgtccgaactgagcgagcaagttttggaaactttgcatgatgcgatgcatgaaaccctttgccctggtgtaactgatgctgccaaagcttgtaatctggatgtgattctggggtttgatggttctagagaccagaatgtttttgtggcccagaagggcttcgagtccaaggtggacgccatcttgaacagaatcagccagatgcacagggtcagctgcagcggtggccgctcgcccaccgtgcgtgtgtcagtggtggccaacacgccctcgggcccggtggaggcctttgactttgacgagtaccagccagagatgctcgagaagttccggaacatgcgcagccagcacccctacgtcctcacggaggacaccctgaaggtctacctgaacaagttcagacagtcctcgccggacagcgtgaaggtggtcattcattttactgatggagcagacggagatctggctgatttacacagagcatctgagaacctccgccaagaaggagtccgtgccttgatcctggtgggccttgaacgagtggtcaacttggagcggctaatgcatctggagtttgggcgagggtttatgtatgacaggcccctgaggcttaacttgctggacttggattatgaactagcggagcagcttgacaacattgccgagaaagcttgctgtggggttccctgcaagtgctctgggcagaggggagaccgcgggcccatcggcagcatcgggccaaagggtattcctggagaagacggctaccgaggctatcctggtgatgagggtggacccggtgagcgtggtccgcctggtgtgaacggcactcaaggtttccagggctgcccgggccagagaggagtaaagggctctcggggattcccaggagagaagggcgaagtaggagaaattggactggatggtctggatggtgaagatggagacaaaggattgcctggttcttctggagagaaagggaatcctggaagaaggggtgataaaggacctcgaggagagaaaggagaaagaggagatgttgggattcgaggggacccgggtaacccaggacaagacagccaggagagaggacccaaaggagaaaccggtgacctcggccccatgggtgtcccagggagagatggagtacctggaggacctggagaaactgggaagaatggtggctttggccgaaggggaccccccggagctaagggcaacaagggcggtcctggccagccgggctttgagggagagcaggggaccagaggtgcacagggcccagctggtcctgctggtcctccagggctgataggagaacaaggcatttctggacctcggggaagcggaggtgccgctggtgctcctggagaacgaggcagaaccggtccactgggaagaaagggtgagcccggagagccaggaccaaaaggaggaatcgggaaccggggccctcgtggggagacgggagatgacgggagagacggagttggcagtgaaggacgcagaggcaaaaaaggagaaagaggattccctggatacccaggaccaaagggtaacccaggtgaacctgggctaaatggaacaacaggacccaaaggcatcagaggccgaaggggaaattcgggacctccagggatagttggacagaagggagaccctggctacccaggaccagctggtcccaagggcaacaggggcgactccatcgatcaatgtgccctcatccaaagcatcaaagataaatgcccttgctgttacgggcccctggagtgccccgtcttcccaacagaactagcctttgctttagacacctctgagggagtcaaccaagacactttcggccggatgcgagatgtggtcttgagtattgtgaatgacctgaccattgctgagagcaactgcccacggggggcccgggtggctgtggtcacctacaacaacgaggtgaccacggagatccggtttgctgactccaagaggaagtcggtcctcctggacaagattaagaaccttcaggtggctctgacatccaaacagcagagtctggagactgccatgtcgtttgtggccaggaacacatttaagcgtgtgaggaacggattcctaatgaggaaagtggctgttttcttcagcaacacacccacaagagcatccccacagctcagagaggctgtgctcaagctctcagatgcggggatcacccccttgttccttacaaggcaggaagaccggcagctcatcaacgctttgcagatcaataacacagcagtggggcatgcgcttgtcctgcctgcagggagagacctcacagacttcctggagaatgtcctcacgtgtcatgtttgcttggacatctgcaacatcgacccatcctgtggatttggcagttggaggccttccttcagggacaggagagcggcagggagcgatgtggacatcgacatggctttcatcttagacagcgctgagaccaccaccctgttccagttcaatgagatgaagaagtacatagcgtacctggtcagacaactggacatgagcccagatcccaaggcctcccagcacttcgccagagtggcagttgtgcagcacgcgccctctgagtccgtggacaatgccagcatgccacctgtgaaggtggaattctccctgactgactatggctccaaggagaagctggtggacttcctcagcaggggaatgacacagttgcagggaaccagggccttaggcagtgccattgaatacaccatagagaatgtctttgaaagtgccccaaacccacgggacctgaaaattgtggtcctgatgctgacgggcgaggtgccggagcagcagctggaggaggcccagagagtcatcctgcaggccaaatgcaagggctacttcttcgtggtcctgggcattggcaggaaggtgaacatcaaggaggtatacaccttcgccagtgagccaaacgacgtcttcttcaaattagtggacaagtccaccgagctcaacgaggagcctttgatgcgcttcgggaggctgttgccatccttcgtcagcagtgaaaatgctttttacttgtccccagatatcaggaaacagtgtgattggttccaaggggaccaacccacaaagaaccttgtgaagtttggtcacaaacaagtaaatgttccgaataacgttacttcaagtcctacatccaacccagtgacgacaacgaagccggtgactacgacgaagccggtgaccaccacaacaaagcctgtaaccaccacaacaaagcctgtgactattataaatcagccatctgtgaagccagccgctgcaaagccggcccctgcgaaacctgtggctgccaagcctgtggccacaaagatggccactgttagacccccagtggcggtgaagccagcaacggcagcgaagcctgtagcagcaaagccagcagctgtaagaccccccgctgctgctgctgcaaaaccagtggcgaccaagcctgaggtccctaggccacaggcagccaaaccagctgccaccaagccagccaccactaagcccatggttaagatgtcccgtgaagtccaggtgtttgagataacagagaacagcgccaaactccactgggagagggctgagccccccggtccttatttttatgacctcaccgtcacctcagcccatgatcagtccctggttctgaagcagaacctcacggtcacggaccgcgtcattggaggcctgctcgctgggcagacataccatgtggctgtggtctgctacctgaggtctcaggtcagagccacctaccacggaagtttcagtacaaagaaatctcagcccccacctccacagccagcaaggtcagcttctagttcaaccatcaatctaatggtgagcacagaaccattggctctcactgaaacagatatatgcaagttgccgaaagacgaaggaacttgcagggatttcatattaaaatggtactatgatccaaacaccaaaagctgtgcaagattctggtatggaggttgtggtggaaacgaaaacaaatttggatcacagaaagaatgtgaaaaggtttgcgctcctgtgctcgccaaacccggagtcatcagtgtgatgggaacctaagcgtgggtggccaacatcatatacctcttgaagaagaaggagtcagccatcgccaacttgtctctgtagaagctccgggtgtagattcccttgcactgtatcatttcatgctttgatttacactcgaactcgggagggaacatcctgctgcatgacctatcagtatggtgctaatgtgtctgtggaccctcgctctctgtctccaggcagttctctcgaatactttgaatgttgtgtaacagttagccactgctggtgtttatgtgaacattcctatcaatccaaattccctctggagtttcatgttatgcctgttgcaggcaaatgtaaagtctagaaaataatgcaaatgtcacggctactctatatacttttgcttggttcattttttttcccttttagttaagcatgactttagatgggaagcctgtgtatcgtggagaaacaagagaccaactttttcattccctgcccccaatttcccagactagatttcaagctaattttctttttctgaagcctctaacaaatgatctagttcagaaggaagcaaaatcccttaatctatgtgcaccgttgggaccaatgccttaattaaagaatttaaaaaagttgtaatagagaatatttttggcattcctctaatgttgtgtgttttttttttgtgtgtgctggagggaggggatttaattttaattttaaaatgtttaggaaatttatacaaagaaactttttaataaagtatattgaaagtttcctggg

SEQ ID NO: 121478 - DNA, 8625 bp, Homo sapiens
  Payload ID: 3822
  Gene Symbol: COL6A3
  Gene Name: collagen, type VI, alpha 3
  ENST ID: ENST00000347401
  CDS Start-End: 227-7936
ccgttcagttctcctgggctccagcctcctgcaaggactgcaagagttttcctccgcagctctgagtctccacttttttggtggagaaaggctgcaaaaagaaaaagagacgcagtgagtgggaaaagtatgcatcctattcaaacctaattgaatcgaggagcccagggacacacgccttcaggtttgctcaggggttcatatttggtgcttagacaaattcaaaatgaggaaacatcggcacttgcccttagtggccgtcttttgcctctttctctcaggctttcctacaactcatgcccagcagcagcaagcagtcattgaagtcaacaagagagacatagtcttcctggtggatggctcatctgcactgggactggccaacttcaatgccatccgagacttcattgctaaagtcatccagaggctggaaatcggacaggatcttatccaggtggcagtggcccagtatgcagacactgtgaggcctgaattttatttcaatacccatccaacaaaaagggaagtcataaccgctgtgcggaaaatgaagcccctggacggctcggccctgtacacgggctctgctctagactttgttcgtaacaacctattcacgagttcagccggctaccgggctgccgaggggattcctaagcttttggtgctgatcacaggtggtaagtccctagatgaaatcagccagcctgcccaggagctgaagagaagcagcataatggcctttgccattgggaacaagggtgccgatcaggctgagctggaagagatcgctttcgactcctccctggtgttcatcccagctgagttccgagccgccccattgcaaggcatgctgcctggcttgctggcacctctcaggaccctctctggaacccctgaagagagcaagcgagacattctgttcctctttgacggctcagccaatcttgtgggccagttccctgttgtccgtgactttctctacaagattatcgatgagctcaatgtgaagccagaggggacccgaattgcggtggctcagtacagcgatgatgtcaaggtggagtcccgttttgatgagcaccagagtaagcctgagatcctgaatcttgtgaagagaatgaagatcaagacgggcaaagccctcaacctgggctacgcgctggactatgcacagaggtacatttttgtgaagtctgctggcagccggatcgaggatggagtgcttcagttcctggtgctgctggtcgcaggaaggtcatctgaccgtgtggatgggccagcaagtaacctgaagcagagtggggttgtgcctttcatcttccaagccaagaacgcagaccctgctgagttagagcagatcgtgctgtctccagcgtttatcctggctgcagagtcgcttcccaagattggagatcttcatccacagatagtgaatctcttaaaatcagtgcacaacggagcaccagcaccagtttcaggtgaaaaggacgtggtgtttctgcttgatggctctgagggcgtcaggagcggcttccctctgttgaaagagtttgtccagagagtggtggaaagcctggatgtgggccaggaccgggtccgcgtggccgtggtgcagtacagcgaccggaccaggcccgagttctacctgaattcatacatgaacaagcaggacgtcgtcaacgctgtccgccagctgaccctgctgggagggccgacccccaacaccggggccgccctggagtttgtcctgaggaacatcctggtcagctctgcgggaagcaggataacagaaggtgtgccccagctgctgatcgtcctcacggccgacaggtctggggatgatgtgcggaacccctccgtggtcgtgaagaggggtggggctgtgcccattggcattggcatcgggaacgctgacatcacagagatgcagaccatctccttcatcccggactttgccgtggccattcccacctttcgccagctggggaccgtccaacaggtcatctctgagagggtgacccagctcacccgcgaggagctgagcaggctgcagccggtgttgcagcctctaccgagcccaggtgttggtggcaagagggacgtggtctttctcatcgatgggtcccaaagtgccgggcctgagttccagtacgttcgcaccctcatagagaggctggttgactacctggacgtgggctttgacaccacccgggtggctgtcatccagttcagcgatgaccccaaggtggagttcctgctgaacgcccattccagcaaggatgaagtgcagaacgcggtgcagcggctgaggcccaagggagggcggcagatcaacgtgggcaatgccctggagtacgtgtccaggaacatcttcaagaggcccctggggagccgcattgaagagggcgtcccgcagttcctggtcctcatctcgtctggaaagtctgacgatgaggtggacgacccggcggtggagctcaagcagtttggcgtggcccctttcacgatcgccaggaacgcagaccaggaggagctggtgaagatctcgctgagccccgaatatgtgttctcggtgagcaccttccgggagctgcccagcctggagcagaaactgctgacgcccatcacgaccctgacctcagagcagatccagaagctcttagccagcactcgctatccacctccagcagttgagagtgatgctgcagacattgtctttctgatcgacagctctgagggagttaggccagatggctttgcacatattcgagattttgttagcaggattgttcgaagactcaacatcggccccagtaaagtgagagttggggtcgtgcagttcagcaatgatgtcttcccagaattctatctgaaaacctacagatcccaggccccggtgctggacgccatacggcgcctgaggctcagaggggggtccccactgaacactggcaaggctctcgaatttgtggcaagaaacctctttgttaagtctgcggggagtcgcatagaagacggggtgccccaacacctggtcctggtcctgggtggaaaatcccaggacgatgtgtccaggttcgcccaggtgatccgttcctcgggcattgtgagtttaggggtaggagaccggaacatcgacagaacagagctgcagaccatcaccaatgaccccagactggtcttcacagtgcgagagttcagagagcttcccaacatagaagaaagaatcatgaactcgtttggaccctccgcagccactcctgcacctccaggggtggacacccctcctccttcacggccagagaagaagaaagcagacattgtgttcctgttggatggttccatcaacttcaggagggacagtttccaggaagtgcttcgttttgtgtctgaaatagtggacacagtttatgaagatggcgactccatccaagtggggcttgtccagtacaactctgaccccactgacgaattcttcctgaaggacttctctaccaagaggcagattattgacgccatcaacaaagtggtctacaaagggggaagacacgccaacactaaggtgggccttgagcacctgcgggtaaaccactttgtgcctgaggcaggcagccgcctggaccagcgggtccctcagattgcctttgtgatcacgggaggaaagtcggtggaagatgcacaggatgtgagcctggccctcacccagaggggggtcaaagtgtttgctgttggagtgaggaatatcgactcggaggaggttggaaagatagcgtccaacagcgccacagcgttccgcgtgggcaacgtccaggagctgtccgaactgagcgagcaagttttggaaactttgcatgatgcgatgcatgaaaccctttgccctggtgtaactgatgctgccaaagcttgtaatctggatgtgattctggggtttgatggttctagagaccagaatgtttttgtggcccagaagggcttcgagtccaaggtggacgccatcttgaacagaatcagccagatgcacagggtcagctgcagcggtggccgctcgcccaccgtgcgtgtgtcagtggtggccaacacgccctcgggcccggtggaggcctttgactttgacgagtaccagccagagatgctcgagaagttccggaacatgcgcagccagcacccctacgtcctcacggaggacaccctgaaggtctacctgaacaagttcagacagtcctcgccggacagcgtgaaggtggtcattcattttactgatggagcagacggagatctggctgatttacacagagcatctgagaacctccgccaagaaggagtccgtgccttgatcctggtgggccttgaacgagtggtcaacttggagcggctaatgcatctggagtttgggcgagggtttatgtatgacaggcccctgaggcttaacttgctggacttggattatgaactagcggagcagcttgacaacattgccgagaaagcttgctgtggggttccctgcaagtgctctgggcagaggggagaccgcgggcccatcggcagcatcgggccaaagggtattcctggagaagacggctaccgaggctatcctggtgatgagggtggacccggtgagcgtggtccgcctggtgtgaacggcactcaaggtttccagggctgcccgggccagagaggagtaaagggctctcggggattcccaggagagaagggcgaagtaggagaaattggactggatggtctggatggtgaagatggagacaaaggattgcctggttcttctggagagaaagggaatcctggaagaaggggtgataaaggacctcgaggagagaaaggagaaagaggagatgttgggattcgaggggacccgggtaacccaggacaagacagccaggagagaggacccaaaggagaaaccggtgacctcggccccatgggtgtcccagggagagatggagtacctggaggacctggagaaactgggaagaatggtggctttggccgaaggggaccccccggagctaagggcaacaagggcggtcctggccagccgggctttgagggagagcaggggaccagaggtgcacagggcccagctggtcctgctggtcctccagggctgataggagaacaaggcatttctggacctcggggaagcggaggtgccgctggtgctcctggagaacgaggcagaaccggtccactgggaagaaagggtgagcccggagagccaggaccaaaaggaggaatcgggaaccggggccctcgtggggagacgggagatgacgggagagacggagttggcagtgaaggacgcagaggcaaaaaaggagaaagaggattccctggatacccaggaccaaagggtaacccaggtgaacctgggctaaatggaacaacaggacccaaaggcatcagaggccgaaggggaaattcgggacctccagggatagttggacagaagggagaccctggctacccaggaccagctggtcccaagggcaacaggggcgactccatcgatcaatgtgccctcatccaaagcatcaaagataaatgccctttccacgggcccctggagtgccccgtcttcccaacagaactagcctttgctttagacacctctgagggagtcaaccaagacactttcggccggatgcgagatgtggtcttgagtattgtgaatgacctgaccattgctgagagcaactgcccacggggggcccgggtggctgtggtcacctacaacaacgaggtgaccacggagatccggtttgctgactccaagaggaagtcggtcctcctggacaagattaagaaccttcaggtggctctgacatccaaacagcagagtctggagactgccatgtcgtttgtggccaggaacacatttaagcgtgtgaggaacggattcctaatgaggaaagtggctgttttcttcagcaacacacccacaagagcatccccacagctcagagaggctgtgctcaagctctcagatgcggggatcacccccttgttccttacaaggcaggaagaccggcagctcatcaacgctttgcagatcaataacacagcagtggggcatgcgcttgtcctgcctgcagggagagacctcacagacttcctggagaatgtcctcacgtgtcatgtttgcttggacatctgcaacatcgacccatcctgtggatttggcagttggaggccttccttcagggacaggagagcggcagggagcgatgtggacatcgacatggctttcatcttagacagcgctgagaccaccaccctgttccagttcaatgagatgaagaagtacatagcgtacctggtcagacaactggacatgagcccagatcccaaggcctcccagcacttcgccagagtggcagttgtgcagcacgcgccctctgagtccgtggacaatgccagcatgccacctgtgaaggtggaattctccctgactgactatggctccaaggagaagctggtggacttcctcagcaggggaatgacacagttgcagggaaccagggccttaggcagtgccattgaatacaccatagagaatgtctttgaaagtgccccaaacccacgggacctgaaaattgtggtcctgatgctgacgggcgaggtgccggagcagcagctggaggaggcccagagagtcatcctgcaggccaaatgcaagggctacttcttcgtggtcctgggcattggcaggaaggtgaacatcaaggaggtatacaccttcgccagtgagccaaacgacgtcttcttcaaattagtggacaagtccaccgagctcaacgaggagcctttgatgcgcttcgggaggctgttgccatccttcgtcagcagtgaaaatgctttttacttgtccccagatatcaggaaacagtgtgattggttccaaggggaccaacccacaaagaaccttgtgaagtttggtcacaaacaagtaaatgttccgaataacgttacttcaagtcctacatccaacccagtgacgacaacgaagccggtgactacgacgaagccggtgaccaccacaacaaagcctgtaaccaccacaacaaagcctgtgactattataaatcagccatctgtgaagccagccgctgcaaagccggcccctgcgaaacctgtggctgccaagcctgtggccacaaagatggccactgttagacccccagtggcggtgaagccagcaacggcagcgaagcctgtagcagcaaagccagcagctgtaagaccccccgctgctgctgctgcaaaaccagtggcgaccaagcctgaggtccctaggccacaggcagccaaaccagctgccaccaagccagccaccactaagcccatggttaagatgtcccgtgaagtccaggtgtttgagataacagagaacagcgccaaactccactgggagagggctgagccccccggtccttatttttatgacctcaccgtcacctcagcccatgatcagtccctggttctgaagcagaacctcacggtcacggaccgcgtcattggaggcctgctcgctgggcagacataccatgtggctgtggtctgctacctgaggtctcaggtcagagccacctaccacggaagtttcagtacaaagaaatctcagcccccacctccacagccagcaaggtcagcttctagttcaaccatcaatctaatggtgagcacagaaccattggctctcactgaaacagatatatgcaagttgccgaaagacgaaggaacttgcagggatttcatattaaaatggtactatgatccaaacaccaaaagctgtgcaagattctggtatggaggttgtggtggaaacgaaaacaaatttggatcacagaaagaatgtgaaaaggtttgcgctcctgtgctcgccaaacccggagtcatcagtgtgatgggaacctaagcgtgggtggccaacatcatatacctcttgaagaagaaggagtcagccatcgccaacttgtctctgtagaagctccgggtgtagattcccttgcactgtatcatttcatgctttgatttacactcgaactcgggagggaacatcctgctgcatgacctatcagtatggtgctaatgtgtctgtggaccctcgctctctgtctccaggcagttctctcgaatactttgaatgttgtgtaacagttagccactgctggtgtttatgtgaacattcctatcaatccaaattccctctggagtttcatgttatgcctgttgcaggcaaatgtaaagtctagaaaataatgcaaatgtcacggctactctatatacttttgcttggttcattttttttcccttttagttaagcatgactttagatgggaagcctgtgtatcgtggagaaacaagagaccaactttttcattccctgcccccaatttcccagactagatttcaagctaattttctttttctgaagcctctaacaaatgatctagttcagaaggaagcaaaatcccttaatctatgtgcaccgttgggaccaatgccttaattaaagaatttaaaaaagttgtaatagagaatatttttggcattcctctaatgttgtgtgttttttttttgtgtgtgctggagggaggggattta

SEQ ID NO: 121479 - DNA, 9963 bp, Homo sapiens
  Payload ID: 3822
  Gene Symbol: COL6A3
  Gene Name: collagen, type VI, alpha 3
  Uniprot ID: P12111
  ENST ID: ENST00000353578
  CDS Start-End: 286-9201
aagccctgactggtatccctggccccagtccagtttggagctcagtcttccaccaaaggccgttcagttctcctgggctccagcctcctgcaaggactgcaagagttttcctccgcagctctgagtctccacttttttggtggagaaaggctgcaaaaagaaaaagagacgcagtgagtgggaaaagtatgcatcctattcaaacctaattgaatcgaggagcccagggacacacgccttcaggtttgctcaggggttcatatttggtgcttagacaaattcaaaatgaggaaacatcggcacttgcccttagtggccgtcttttgcctctttctctcaggctttcctacaactcatgcccagcagcagcaagcagcacaagactctgctgacattattttccttattgatggatcaaacaacaccggaagtgtcaatttcgcagtcattctcgacttccttgtaaatctccttgagaaactcccaattggaactcagcagatccgagtgggggtggtccagtttagcgatgagcccagaaccatgttctccttggacacctactccaccaaggcccaggttctgggtgcagtgaaagccctcgggtttgctggtggggagttggccaatatcggcctcgcccttgatttcgtggtggagaaccacttcacccgggcagggggcagccgcgtggaggaaggggttccccaggtgctggtcctcataagtgccgggccttctagtgacgagattcgctacggggtggtagcactgaagcaggctagcgtgttctcattcggccttggagcccaggccgcctccagggcagagcttcagcacatagctaccgatgacaacttggtgtttactgtcccggaattccgtagctttggggacctccaggagaaattactgccgtacattgttggcgtggcccaaaggcacattgtcttgaaaccgccaaccattgtcacacaagtcattgaagtcaacaagagagacatagtcttcctggtggatggctcatctgcactgggactggccaacttcaatgccatccgagacttcattgctaaagtcatccagaggctggaaatcggacaggatcttatccaggtggcagtggcccagtatgcagacactgtgaggcctgaattttatttcaatacccatccaacaaaaagggaagtcataaccgctgtgcggaaaatgaagcccctggacggctcggccctgtacacgggctctgctctagactttgttcgtaacaacctattcacgagttcagccggctaccgggctgccgaggggattcctaagcttttggtgctgatcacaggtggtaagtccctagatgaaatcagccagcctgcccaggagctgaagagaagcagcataatggcctttgccattgggaacaagggtgccgatcaggctgagctggaagagatcgctttcgactcctccctggtgttcatcccagctgagttccgagccgccccattgcaaggcatgctgcctggcttgctggcacctctcaggaccctctctggaacccctgaagttcactcaaacaaaagggatatcatctttcttttggatggatcagccaacgttggaaaaaccaatttcccttatgtgcgcgactttgtaatgaacctagttaacagccttgatattggaaatgacaatattcgtgttggtttagtgcaatttagtgacactcctgtaacggagttctctttaaacacataccagaccaagtcagatatccttggtcatctgaggcagctgcagctccagggaggttcgggcctgaacacaggctcagccctaagctatgtctatgccaaccacttcacggaagctggcggcagcaggatccgtgaacacgtgccgcagctcctgcttctgctcacagctgggcagtctgaggactcctatttgcaagctgccaacgccttgacacgcgcgggcatcctgactttttgtgtgggagctagccaggcgaataaggcagagcttgagcagattgcttttaacccaagcctggtgtatctcatggatgatttcagctccctgccagctttgcctcagcagctgattcagcccctaaccacatatgttagtggaggtgtggaggaagtaccactcgctcagccagagagcaagcgagacattctgttcctctttgacggctcagccaatcttgtgggccagttccctgttgtccgtgactttctctacaagattatcgatgagctcaatgtgaagccagaggggacccgaattgcggtggctcagtacagcgatgatgtcaaggtggagtcccgttttgatgagcaccagagtaagcctgagatcctgaatcttgtgaagagaatgaagatcaagacgggcaaagccctcaacctgggctacgcgctggactatgcacagaggtacatttttgtgaagtctgctggcagccggatcgaggatggagtgcttcagttcctggtgctgctggtcgcaggaaggtcatctgaccgtgtggatgggccagcaagtaacctgaagcagagtggggttgtgcctttcatcttccaagccaagaacgcagaccctgctgagttagagcagatcgtgctgtctccagcgtttatcctggctgcagagtcgcttcccaagattggagatcttcatccacagatagtgaatctcttaaaatcagtgcacaacggagcaccagcaccagtttcaggtgaaaaggacgtggtgtttctgcttgatggctctgagggcgtcaggagcggcttccctctgttgaaagagtttgtccagagagtggtggaaagcctggatgtgggccaggaccgggtccgcgtggccgtggtgcagtacagcgaccggaccaggcccgagttctacctgaattcatacatgaacaagcaggacgtcgtcaacgctgtccgccagctgaccctgctgggagggccgacccccaacaccggggccgccctggagtttgtcctgaggaacatcctggtcagctctgcgggaagcaggataacagaaggtgtgccccagctgctgatcgtcctcacggccgacaggtctggggatgatgtgcggaacccctccgtggtcgtgaagaggggtggggctgtgcccattggcattggcatcgggaacgctgacatcacagagatgcagaccatctccttcatcccggactttgccgtggccattcccacctttcgccagctggggaccgtccaacaggtcatctctgagagggtgacccagctcacccgcgaggagctgagcaggctgcagccggtgttgcagcctctaccgagcccaggtgttggtggcaagagggacgtggtctttctcatcgatgggtcccaaagtgccgggcctgagttccagtacgttcgcaccctcatagagaggctggttgactacctggacgtgggctttgacaccacccgggtggctgtcatccagttcagcgatgaccccaaggtggagttcctgctgaacgcccattccagcaaggatgaagtgcagaacgcggtgcagcggctgaggcccaagggagggcggcagatcaacgtgggcaatgccctggagtacgtgtccaggaacatcttcaagaggcccctggggagccgcattgaagagggcgtcccgcagttcctggtcctcatctcgtctggaaagtctgacgatgaggtggacgacccggcggtggagctcaagcagtttggcgtggcccctttcacgatcgccaggaacgcagaccaggaggagctggtgaagatctcgctgagccccgaatatgtgttctcggtgagcaccttccgggagctgcccagcctggagcagaaactgctgacgcccatcacgaccctgacctcagagcagatccagaagctcttagccagcactcgctatccacctccagcagttgagagtgatgctgcagacattgtctttctgatcgacagctctgagggagttaggccagatggctttgcacatattcgagattttgttagcaggattgttcgaagactcaacatcggccccagtaaagtgagagttggggtcgtgcagttcagcaatgatgtcttcccagaattctatctgaaaacctacagatcccaggccccggtgctggacgccatacggcgcctgaggctcagaggggggtccccactgaacactggcaaggctctcgaatttgtggcaagaaacctctttgttaagtctgcggggagtcgcatagaagacggggtgccccaacacctggtcctggtcctgggtggaaaatcccaggacgatgtgtccaggttcgcccaggtgatccgttcctcgggcattgtgagtttaggggtaggagaccggaacatcgacagaacagagctgcagaccatcaccaatgaccccagactggtcttcacagtgcgagagttcagagagcttcccaacatagaagaaagaatcatgaactcgtttggaccctccgcagccactcctgcacctccaggggtggacacccctcctccttcacggccagagaagaagaaagcagacattgtgttcctgttggatggttccatcaacttcaggagggacagtttccaggaagtgcttcgttttgtgtctgaaatagtggacacagtttatgaagatggcgactccatccaagtggggcttgtccagtacaactctgaccccactgacgaattcttcctgaaggacttctctaccaagaggcagattattgacgccatcaacaaagtggtctacaaagggggaagacacgccaacactaaggtgggccttgagcacctgcgggtaaaccactttgtgcctgaggcaggcagccgcctggaccagcgggtccctcagattgcctttgtgatcacgggaggaaagtcggtggaagatgcacaggatgtgagcctggccctcacccagaggggggtcaaagtgtttgctgttggagtgaggaatatcgactcggaggaggttggaaagatagcgtccaacagcgccacagcgttccgcgtgggcaacgtccaggagctgtccgaactgagcgagcaagttttggaaactttgcatgatgcgatgcatgaaaccctttgccctggtgtaactgatgctgccaaagcttgtaatctggatgtgattctggggtttgatggttctagagaccagaatgtttttgtggcccagaagggcttcgagtccaaggtggacgccatcttgaacagaatcagccagatgcacagggtcagctgcagcggtggccgctcgcccaccgtgcgtgtgtcagtggtggccaacacgccctcgggcccggtggaggcctttgactttgacgagtaccagccagagatgctcgagaagttccggaacatgcgcagccagcacccctacgtcctcacggaggacaccctgaaggtctacctgaacaagttcagacagtcctcgccggacagcgtgaaggtggtcattcattttactgatggagcagacggagatctggctgatttacacagagcatctgagaacctccgccaagaaggagtccgtgccttgatcctggtgggccttgaacgagtggtcaacttggagcggctaatgcatctggagtttgggcgagggtttatgtatgacaggcccctgaggcttaacttgctggacttggattatgaactagcggagcagcttgacaacattgccgagaaagcttgctgtggggttccctgcaagtgctctgggcagaggggagaccgcgggcccatcggcagcatcgggccaaagggtattcctggagaagacggctaccgaggctatcctggtgatgagggtggacccggtgagcgtggtccgcctggtgtgaacggcactcaaggtttccagggctgcccgggccagagaggagtaaagggctctcggggattcccaggagagaagggcgaagtaggagaaattggactggatggtctggatggtgaagatggagacaaaggattgcctggttcttctggagagaaagggaatcctggaagaaggggtgataaaggacctcgaggagagaaaggagaaagaggagatgttgggattcgaggggacccgggtaacccaggacaagacagccaggagagaggacccaaaggagaaaccggtgacctcggccccatgggtgtcccagggagagatggagtacctggaggacctggagaaactgggaagaatggtggctttggccgaaggggaccccccggagctaagggcaacaagggcggtcctggccagccgggctttgagggagagcaggggaccagaggtgcacagggcccagctggtcctgctggtcctccagggctgataggagaacaaggcatttctggacctcggggaagcggaggtgccgctggtgctcctggagaacgaggcagaaccggtccactgggaagaaagggtgagcccggagagccaggaccaaaaggaggaatcgggaaccggggccctcgtggggagacgggagatgacgggagagacggagttggcagtgaaggacgcagaggcaaaaaaggagaaagaggattccctggatacccaggaccaaagggtaacccaggtgaacctgggctaaatggaacaacaggacccaaaggcatcagaggccgaaggggaaattcgggacctccagggatagttggacagaagggagaccctggctacccaggaccagctggtcccaagggcaacaggggcgactccatcgatcaatgtgccctcatccaaagcatcaaagataaatgcccttgctgttacgggcccctggagtgccccgtcttcccaacagaactagcctttgctttagacacctctgagggagtcaaccaagacactttcggccggatgcgagatgtggtcttgagtattgtgaatgacctgaccattgctgagagcaactgcccacggggggcccgggtggctgtggtcacctacaacaacgaggtgaccacggagatccggtttgctgactccaagaggaagtcggtcctcctggacaagattaagaaccttcaggtggctctgacatccaaacagcagagtctggagactgccatgtcgtttgtggccaggaacacatttaagcgtgtgaggaacggattcctaatgaggaaagtggctgttttcttcagcaacacacccacaagagcatccccacagctcagagaggctgtgctcaagctctcagatgcggggatcacccccttgttccttacaaggcaggaagaccggcagctcatcaacgctttgcagatcaataacacagcagtggggcatgcgcttgtcctgcctgcagggagagacctcacagacttcctggagaatgtcctcacgtgtcatgtttgcttggacatctgcaacatcgacccatcctgtggatttggcagttggaggccttccttcagggacaggagagcggcagggagcgatgtggacatcgacatggctttcatcttagacagcgctgagaccaccaccctgttccagttcaatgagatgaagaagtacatagcgtacctggtcagacaactggacatgagcccagatcccaaggcctcccagcacttcgccagagtggcagttgtgcagcacgcgccctctgagtccgtggacaatgccagcatgccacctgtgaaggtggaattctccctgactgactatggctccaaggagaagctggtggacttcctcagcaggggaatgacacagttgcagggaaccagggccttaggcagtgccattgaatacaccatagagaatgtctttgaaagtgccccaaacccacgggacctgaaaattgtggtcctgatgctgacgggcgaggtgccggagcagcagctggaggaggcccagagagtcatcctgcaggccaaatgcaagggctacttcttcgtggtcctgggcattggcaggaaggtgaacatcaaggaggtatacaccttcgccagtgagccaaacgacgtcttcttcaaattagtggacaagtccaccgagctcaacgaggagcctttgatgcgcttcgggaggctgttgccatccttcgtcagcagtgaaaatgctttttacttgtccccagatatcaggaaacagtgtgattggttccaaggggaccaacccacaaagaaccttgtgaagtttggtcacaaacaagtaaatgttccgaataacgttacttcaagtcctacatccaacccagtgacgacaacgaagccggtgactacgacgaagccggtgaccaccacaacaaagcctgtaaccaccacaacaaagcctgtgactattataaatcagccatctgtgaagccagccgctgcaaagccggcccctgcgaaacctgtggctgccaagcctgtggccacaaagatggccactgttagacccccagtggcggtgaagccagcaacggcagcgaagcctgtagcagcaaagccagcagctgtaagaccccccgctgctgctgctgcaaaaccagtggcgaccaagcctgaggtccctaggccacaggcagccaaaccagctgccaccaagccagccaccactaagcccatggttaagatgtcccgtgaagtccaggtgtttgagataacagagaacagcgccaaactccactgggagagggctgagccccccggtccttatttttatgacctcaccgtcacctcagcccatgatcagtccctggttctgaagcagaacctcacggtcacggaccgcgtcattggaggcctgctcgctgggcagacataccatgtggctgtggtctgctacctgaggtctcaggtcagagccacctaccacggaagtttcagtacaaagaaatctcagcccccacctccacagccagcaaggtcagcttctagttcaaccatcaatctaatggtgagcacagaaccattggctctcactgaaacagatatatgcaagttgccgaaagacgaaggaacttgcagggatttcatattaaaatggtactatgatccaaacaccaaaagctgtgcaagattctggtatggaggttgtggtggaaacgaaaacaaatttggatcacagaaagaatgtgaaaaggtttgcgctcctgtgctcgccaaacccggagtcatcagtgtgatgggaacctaagcgtgggtggccaacatcatatacctcttgaagaagaaggagtcagccatcgccaacttgtctctgtagaagctccgggtgtagattcccttgcactgtatcatttcatgctttgatttacactcgaactcgggagggaacatcctgctgcatgacctatcagtatggtgctaatgtgtctgtggaccctcgctctctgtctccaggcagttctctcgaatactttgaatgttgtgtaacagttagccactgctggtgtttatgtgaacattcctatcaatccaaattccctctggagtttcatgttatgcctgttgcaggcaaatgtaaagtctagaaaataatgcaaatgtcacggctactctatatacttttgcttggttcattttttttcccttttagttaagcatgactttagatgggaagcctgtgtatcgtggagaaacaagagaccaactttttcattccctgcccccaatttcccagactagatttcaagctaattttctttttctgaagcctctaacaaatgatctagttcagaaggaagcaaaatcccttaatctatgtgcaccgttgggaccaatgccttaattaaagaatttaaaaaagttgtaatagagaatatttttggcattcctctaatgttgtgtgttttttttttgtgtgtgctggagggaggggatttaattttaattttaaaatgtttaggaaatttatacaaagaaactttttaataaagtatattgaaagtttcctggg

SEQ ID NO: 121480 - DNA, 3464 bp, Homo sapiens
  Payload ID: 3822
  Gene Symbol: COL6A3
  Gene Name: collagen, type VI, alpha 3
  Uniprot ID: P12111
  ENST ID: ENST00000392003
  CDS Start-End: 286-3396
aagccctgactggtatccctggccccagtccagtttggagctcagtcttccaccaaaggccgttcagttctcctgggctccagcctcctgcaaggactgcaagagttttcctccgcagctctgagtctccacttttttggtggagaaaggctgcaaaaagaaaaagagacgcagtgagtgggaaaagtatgcatcctattcaaacctaattgaatcgaggagcccagggacacacgccttcaggtttgctcaggggttcatatttggtgcttagacaaattcaaaatgaggaaacatcggcacttgcccttagtggccgtcttttgcctctttctctcaggctttcctacaactcatgcccagcagcagcaagcagtcattgaagtcaacaagagagacatagtcttcctggtggatggctcatctgcactgggactggccaacttcaatgccatccgagacttcattgctaaagtcatccagaggctggaaatcggacaggatcttatccaggtggcagtggcccagtatgcagacactgtgaggcctgaattttatttcaatacccatccaacaaaaagggaagtcataaccgctgtgcggaaaatgaagcccctggacggctcggccctgtacacgggctctgctctagactttgttcgtaacaacctattcacgagttcagccggctaccgggctgccgaggggattcctaagcttttggtgctgatcacaggtggtaagtccctagatgaaatcagccagcctgcccaggagctgaagagaagcagcataatggcctttgccattgggaacaagggtgccgatcaggctgagctggaagagatcgctttcgactcctccctggtgttcatcccagctgagttccgagccgccccattgcaaggcatgctgcctggcttgctggcacctctcaggaccctctctggaacccctgaagttcactcaaacaaaagggatatcatctttcttttggatggatcagccaacgttggaaaaaccaatttcccttatgtgcgcgactttgtaatgaacctagttaacagccttgatattggaaatgacaatattcgtgttggtttagtgcaatttagtgacactcctgtaacggagttctctttaaacacataccagaccaagtcagatatccttggtcatctgaggcagctgcagctccagggaggttcgggcctgaacacaggctcagccctaagctatgtctatgccaaccacttcacggaagctggcggcagcaggatccgtgaacacgtgccgcagctcctgcttctgctcacagctgggcagtctgaggactcctatttgcaagctgccaacgccttgacacgcgcgggcatcctgactttttgtgtgggagctagccaggcgaataaggcagagcttgagcagattgcttttaacccaagcctggtgtatctcatggatgatttcagctccctgccagctttgcctcagcagctgattcagcccctaaccacatatgttagtggaggtgtggaggaagtaccactcgctcagccagagagcaagcgagacattctgttcctctttgacggctcagccaatcttgtgggccagttccctgttgtccgtgactttctctacaagattatcgatgagctcaatgtgaagccagaggggacccgaattgcggtggctcagtacagcgatgatgtcaaggtggagtcccgttttgatgagcaccagagtaagcctgagatcctgaatcttgtgaagagaatgaagatcaagacgggcaaagccctcaacctgggctacgcgctggactatgcacagaggtacatttttgtgaagtctgctggcagccggatcgaggatggagtgcttcagttcctggtgctgctggtcgcaggaaggtcatctgaccgtgtggatgggccagcaagtaacctgaagcagagtggggttgtgcctttcatcttccaagccaagaacgcagaccctgctgagttagagcagatcgtgctgtctccagcgtttatcctggctgcagagtcgcttcccaagattggagatcttcatccacagatagtgaatctcttaaaatcagtgcacaacggagcaccagcaccagtttcaggtgaaaaggacgtggtgtttctgcttgatggctctgagggcgtcaggagcggcttccctctgttgaaagagtttgtccagagagtggtggaaagcctggatgtgggccaggaccgggtccgcgtggccgtggtgcagtacagcgaccggaccaggcccgagttctacctgaattcatacatgaacaagcaggacgtcgtcaacgctgtccgccagctgaccctgctgggagggccgacccccaacaccggggccgccctggagtttgtcctgaggaacatcctggtcagctctgcgggaagcaggataacagaaggtgtgccccagctgctgatcgtcctcacggccgacaggtctggggatgatgtgcggaacccctccgtggtcgtgaagaggggtggggctgtgcccattggcattggcatcgggaacgctgacatcacagagatgcagaccatctccttcatcccggactttgccgtggccattcccacctttcgccagctggggaccgtccaacaggtcatctctgagagggtgacccagctcacccgcgaggagctgagcaggctgcagccggtgttgcagcctctaccgagcccaggtgttggtggcaagagggacgtggtctttctcatcgatgggtcccaaagtgccgggcctgagttccagtacgttcgcaccctcatagagaggctggttgactacctggacgtgggctttgacaccacccgggtggctgtcatccagttcagcgatgaccccaaggtggagttcctgctgaacgcccattccagcaaggatgaagtgcagaacgcggtgcagcggctgaggcccaagggagggcggcagatcaacgtgggcaatgccctggagtacgtgtccaggaacatcttcaagaggcccctggggagccgcattgaagagggcgtcccgcagttcctggtcctcatctcgtctggaaagtctgacgatgaggtggacgacccggcggtggagctcaagcagtttggcgtggcccctttcacgatcgccaggaacgcagaccaggaggagctggtgaagatctcgctgagccccgaatatgtgttctcggtgagcaccttccgggagctgcccagcctggagcagaaactgctgacgcccatcacgaccctgacctcagagcagatccagaagctcttagccagcactcgctatccacctccaggtgagatgggggcgtcggaggttctccttggagcattttccatatgaaaaataacaggctcaaaggccatggtactcataataaattaaattaaaataaaggttgtatgccctta

SEQ ID NO: 121481 - DNA, 4037 bp, Homo sapiens
  Payload ID: 3822
  Gene Symbol: COL6A3
  Gene Name: collagen, type VI, alpha 3
  Uniprot ID: P12111
  ENST ID: ENST00000392004
  CDS Start-End: 256-3969
cagtttggagctcagtcttccaccaaaggccgttcagttctcctgggctccagcctcctgcaaggactgcaagagttttcctccgcagctctgagtctccacttttttggtggagaaaggctgcaaaaagaaaaagagacgcagtgagtgggaaaagtatgcatcctattcaaacctaattgaatcgaggagcccagggacacacgccttcaggtttgctcaggggttcatatttggtgcttagacaaattcaaaatgaggaaacatcggcacttgcccttagtggccgtcttttgcctctttctctcaggctttcctacaactcatgcccagcagcagcaagcagcacaagactctgctgacattattttccttattgatggatcaaacaacaccggaagtgtcaatttcgcagtcattctcgacttccttgtaaatctccttgagaaactcccaattggaactcagcagatccgagtgggggtggtccagtttagcgatgagcccagaaccatgttctccttggacacctactccaccaaggcccaggttctgggtgcagtgaaagccctcgggtttgctggtggggagttggccaatatcggcctcgcccttgatttcgtggtggagaaccacttcacccgggcagggggcagccgcgtggaggaaggggttccccaggtgctggtcctcataagtgccgggccttctagtgacgagattcgctacggggtggtagcactgaagcaggctagcgtgttctcattcggccttggagcccaggccgcctccagggcagagcttcagcacatagctaccgatgacaacttggtgtttactgtcccggaattccgtagctttggggacctccaggagaaattactgccgtacattgttggcgtggcccaaaggcacattgtcttgaaaccgccaaccattgtcacacaagtcattgaagtcaacaagagagacatagtcttcctggtggatggctcatctgcactgggactggccaacttcaatgccatccgagacttcattgctaaagtcatccagaggctggaaatcggacaggatcttatccaggtggcagtggcccagtatgcagacactgtgaggcctgaattttatttcaatacccatccaacaaaaagggaagtcataaccgctgtgcggaaaatgaagcccctggacggctcggccctgtacacgggctctgctctagactttgttcgtaacaacctattcacgagttcagccggctaccgggctgccgaggggattcctaagcttttggtgctgatcacaggtggtaagtccctagatgaaatcagccagcctgcccaggagctgaagagaagcagcataatggcctttgccattgggaacaagggtgccgatcaggctgagctggaagagatcgctttcgactcctccctggtgttcatcccagctgagttccgagccgccccattgcaaggcatgctgcctggcttgctggcacctctcaggaccctctctggaacccctgaagttcactcaaacaaaagggatatcatctttcttttggatggatcagccaacgttggaaaaaccaatttcccttatgtgcgcgactttgtaatgaacctagttaacagccttgatattggaaatgacaatattcgtgttggtttagtgcaatttagtgacactcctgtaacggagttctctttaaacacataccagaccaagtcagatatccttggtcatctgaggcagctgcagctccagggaggttcgggcctgaacacaggctcagccctaagctatgtctatgccaaccacttcacggaagctggcggcagcaggatccgtgaacacgtgccgcagctcctgcttctgctcacagctgggcagtctgaggactcctatttgcaagctgccaacgccttgacacgcgcgggcatcctgactttttgtgtgggagctagccaggcgaataaggcagagcttgagcagattgcttttaacccaagcctggtgtatctcatggatgatttcagctccctgccagctttgcctcagcagctgattcagcccctaaccacatatgttagtggaggtgtggaggaagtaccactcgctcagccagagagcaagcgagacattctgttcctctttgacggctcagccaatcttgtgggccagttccctgttgtccgtgactttctctacaagattatcgatgagctcaatgtgaagccagaggggacccgaattgcggtggctcagtacagcgatgatgtcaaggtggagtcccgttttgatgagcaccagagtaagcctgagatcctgaatcttgtgaagagaatgaagatcaagacgggcaaagccctcaacctgggctacgcgctggactatgcacagaggtacatttttgtgaagtctgctggcagccggatcgaggatggagtgcttcagttcctggtgctgctggtcgcaggaaggtcatctgaccgtgtggatgggccagcaagtaacctgaagcagagtggggttgtgcctttcatcttccaagccaagaacgcagaccctgctgagttagagcagatcgtgctgtctccagcgtttatcctggctgcagagtcgcttcccaagattggagatcttcatccacagatagtgaatctcttaaaatcagtgcacaacggagcaccagcaccagtttcaggtgaaaaggacgtggtgtttctgcttgatggctctgagggcgtcaggagcggcttccctctgttgaaagagtttgtccagagagtggtggaaagcctggatgtgggccaggaccgggtccgcgtggccgtggtgcagtacagcgaccggaccaggcccgagttctacctgaattcatacatgaacaagcaggacgtcgtcaacgctgtccgccagctgaccctgctgggagggccgacccccaacaccggggccgccctggagtttgtcctgaggaacatcctggtcagctctgcgggaagcaggataacagaaggtgtgccccagctgctgatcgtcctcacggccgacaggtctggggatgatgtgcggaacccctccgtggtcgtgaagaggggtggggctgtgcccattggcattggcatcgggaacgctgacatcacagagatgcagaccatctccttcatcccggactttgccgtggccattcccacctttcgccagctggggaccgtccaacaggtcatctctgagagggtgacccagctcacccgcgaggagctgagcaggctgcagccggtgttgcagcctctaccgagcccaggtgttggtggcaagagggacgtggtctttctcatcgatgggtcccaaagtgccgggcctgagttccagtacgttcgcaccctcatagagaggctggttgactacctggacgtgggctttgacaccacccgggtggctgtcatccagttcagcgatgaccccaaggtggagttcctgctgaacgcccattccagcaaggatgaagtgcagaacgcggtgcagcggctgaggcccaagggagggcggcagatcaacgtgggcaatgccctggagtacgtgtccaggaacatcttcaagaggcccctggggagccgcattgaagagggcgtcccgcagttcctggtcctcatctcgtctggaaagtctgacgatgaggtggacgacccggcggtggagctcaagcagtttggcgtggcccctttcacgatcgccaggaacgcagaccaggaggagctggtgaagatctcgctgagccccgaatatgtgttctcggtgagcaccttccgggagctgcccagcctggagcagaaactgctgacgcccatcacgaccctgacctcagagcagatccagaagctcttagccagcactcgctatccacctccaggtgagatgggggcgtcggaggttctccttggagcattttccatatgaaaaataacaggctcaaaggccatggtactcataataaattaaattaaaataaaggttgtatgccctta

SEQ ID NO: 121482 - DNA, 8916 bp, Homo sapiens
  Payload ID: 3822
  Gene Symbol: COL6A3
  Gene Name: collagen, type VI, alpha 3
  Uniprot ID: P12111
  ENST ID: ENST00000409809
  CDS Start-End: 1-8916
atgaggaaacatcggcacttgcccttagtggccgtcttttgcctctttctctcaggctttcctacaactcatgcccagcagcagcaagcagcacaagactctgctgacattattttccttattgatggatcaaacaacaccggaagtgtcaatttcgcagtcattctcgacttccttgtaaatctccttgagaaactcccaattggaactcagcagatccgagtgggggtggtccagtttagcgatgagcccagaaccatgttctccttggacacctactccaccaaggcccaggttctgggtgcagtgaaagccctcgggtttgctggtggggagttggccaatatcggcctcgcccttgatttcgtggtggagaaccacttcacccgggcagggggcagccgcgtggaggaaggggttccccaggtgctggtcctcataagtgccgggccttctagtgacgagattcgctacggggtggtagcactgaagcaggctagcgtgttctcattcggccttggagcccaggccgcctccagggcagagcttcagcacatagctaccgatgacaacttggtgtttactgtcccggaattccgtagctttggggacctccaggagaaattactgccgtacattgttggcgtggcccaaaggcacattgtcttgaaaccgccaaccattgtcacacaagtcattgaagtcaacaagagagacatagtcttcctggtggatggctcatctgcactgggactggccaacttcaatgccatccgagacttcattgctaaagtcatccagaggctggaaatcggacaggatcttatccaggtggcagtggcccagtatgcagacactgtgaggcctgaattttatttcaatacccatccaacaaaaagggaagtcataaccgctgtgcggaaaatgaagcccctggacggctcggccctgtacacgggctctgctctagactttgttcgtaacaacctattcacgagttcagccggctaccgggctgccgaggggattcctaagcttttggtgctgatcacaggtggtaagtccctagatgaaatcagccagcctgcccaggagctgaagagaagcagcataatggcctttgccattgggaacaagggtgccgatcaggctgagctggaagagatcgctttcgactcctccctggtgttcatcccagctgagttccgagccgccccattgcaaggcatgctgcctggcttgctggcacctctcaggaccctctctggaacccctgaagttcactcaaacaaaagggatatcatctttcttttggatggatcagccaacgttggaaaaaccaatttcccttatgtgcgcgactttgtaatgaacctagttaacagccttgatattggaaatgacaatattcgtgttggtttagtgcaatttagtgacactcctgtaacggagttctctttaaacacataccagaccaagtcagatatccttggtcatctgaggcagctgcagctccagggaggttcgggcctgaacacaggctcagccctaagctatgtctatgccaaccacttcacggaagctggcggcagcaggatccgtgaacacgtgccgcagctcctgcttctgctcacagctgggcagtctgaggactcctatttgcaagctgccaacgccttgacacgcgcgggcatcctgactttttgtgtgggagctagccaggcgaataaggcagagcttgagcagattgcttttaacccaagcctggtgtatctcatggatgatttcagctccctgccagctttgcctcagcagctgattcagcccctaaccacatatgttagtggaggtgtggaggaagtaccactcgctcagccagagagcaagcgagacattctgttcctctttgacggctcagccaatcttgtgggccagttccctgttgtccgtgactttctctacaagattatcgatgagctcaatgtgaagccagaggggacccgaattgcggtggctcagtacagcgatgatgtcaaggtggagtcccgttttgatgagcaccagagtaagcctgagatcctgaatcttgtgaagagaatgaagatcaagacgggcaaagccctcaacctgggctacgcgctggactatgcacagaggtacatttttgtgaagtctgctggcagccggatcgaggatggagtgcttcagttcctggtgctgctggtcgcaggaaggtcatctgaccgtgtggatgggccagcaagtaacctgaagcagagtggggttgtgcctttcatcttccaagccaagaacgcagaccctgctgagttagagcagatcgtgctgtctccagcgtttatcctggctgcagagtcgcttcccaagattggagatcttcatccacagatagtgaatctcttaaaatcagtgcacaacggagcaccagcaccagtttcaggtgaaaaggacgtggtgtttctgcttgatggctctgagggcgtcaggagcggcttccctctgttgaaagagtttgtccagagagtggtggaaagcctggatgtgggccaggaccgggtccgcgtggccgtggtgcagtacagcgaccggaccaggcccgagttctacctgaattcatacatgaacaagcaggacgtcgtcaacgctgtccgccagctgaccctgctgggagggccgacccccaacaccggggccgccctggagtttgtcctgaggaacatcctggtcagctctgcgggaagcaggataacagaaggtgtgccccagctgctgatcgtcctcacggccgacaggtctggggatgatgtgcggaacccctccgtggtcgtgaagaggggtggggctgtgcccattggcattggcatcgggaacgctgacatcacagagatgcagaccatctccttcatcccggactttgccgtggccattcccacctttcgccagctggggaccgtccaacaggtcatctctgagagggtgacccagctcacccgcgaggagctgagcaggctgcagccggtgttgcagcctctaccgagcccaggtgttggtggcaagagggacgtggtctttctcatcgatgggtcccaaagtgccgggcctgagttccagtacgttcgcaccctcatagagaggctggttgactacctggacgtgggctttgacaccacccgggtggctgtcatccagttcagcgatgaccccaaggtggagttcctgctgaacgcccattccagcaaggatgaagtgcagaacgcggtgcagcggctgaggcccaagggagggcggcagatcaacgtgggcaatgccctggagtacgtgtccaggaacatcttcaagaggcccctggggagccgcattgaagagggcgtcccgcagttcctggtcctcatctcgtctggaaagtctgacgatgaggtggacgacccggcggtggagctcaagcagtttggcgtggcccctttcacgatcgccaggaacgcagaccaggaggagctggtgaagatctcgctgagccccgaatatgtgttctcggtgagcaccttccgggagctgcccagcctggagcagaaactgctgacgcccatcacgaccctgacctcagagcagatccagaagctcttagccagcactcgctatccacctccagcagttgagagtgatgctgcagacattgtctttctgatcgacagctctgagggagttaggccagatggctttgcacatattcgagattttgttagcaggattgttcgaagactcaacatcggccccagtaaagtgagagttggggtcgtgcagttcagcaatgatgtcttcccagaattctatctgaaaacctacagatcccaggccccggtgctggacgccatacggcgcctgaggctcagaggggggtccccactgaacactggcaaggctctcgaatttgtggcaagaaacctctttgttaagtctgcggggagtcgcatagaagacggggtgccccaacacctggtcctggtcctgggtggaaaatcccaggacgatgtgtccaggttcgcccaggtgatccgttcctcgggcattgtgagtttaggggtaggagaccggaacatcgacagaacagagctgcagaccatcaccaatgaccccagactggtcttcacagtgcgagagttcagagagcttcccaacatagaagaaagaatcatgaactcgtttggaccctccgcagccactcctgcacctccaggggtggacacccctcctccttcacggccagagaagaagaaagcagacattgtgttcctgttggatggttccatcaacttcaggagggacagtttccaggaagtgcttcgttttgtgtctgaaatagtggacacagtttatgaagatggcgactccatccaagtggggcttgtccagtacaactctgaccccactgacgaattcttcctgaaggacttctctaccaagaggcagattattgacgccatcaacaaagtggtctacaaagggggaagacacgccaacactaaggtgggccttgagcacctgcgggtaaaccactttgtgcctgaggcaggcagccgcctggaccagcgggtccctcagattgcctttgtgatcacgggaggaaagtcggtggaagatgcacaggatgtgagcctggccctcacccagaggggggtcaaagtgtttgctgttggagtgaggaatatcgactcggaggaggttggaaagatagcgtccaacagcgccacagcgttccgcgtgggcaacgtccaggagctgtccgaactgagcgagcaagttttggaaactttgcatgatgcgatgcatgaaaccctttgccctggtgtaactgatgctgccaaagcttgtaatctggatgtgattctggggtttgatggttctagagaccagaatgtttttgtggcccagaagggcttcgagtccaaggtggacgccatcttgaacagaatcagccagatgcacagggtcagctgcagcggtggccgctcgcccaccgtgcgtgtgtcagtggtggccaacacgccctcgggcccggtggaggcctttgactttgacgagtaccagccagagatgctcgagaagttccggaacatgcgcagccagcacccctacgtcctcacggaggacaccctgaaggtctacctgaacaagttcagacagtcctcgccggacagcgtgaaggtggtcattcattttactgatggagcagacggagatctggctgatttacacagagcatctgagaacctccgccaagaaggagtccgtgccttgatcctggtgggccttgaacgagtggtcaacttggagcggctaatgcatctggagtttgggcgagggtttatgtatgacaggcccctgaggcttaacttgctggacttggattatgaactagcggagcagcttgacaacattgccgagaaagcttgctgtggggttccctgcaagtgctctgggcagaggggagaccgcgggcccatcggcagcatcgggccaaagggtattcctggagaagacggctaccgaggctatcctggtgatgagggtggacccggtgagcgtggtccgcctggtgtgaacggcactcaaggtttccagggctgcccgggccagagaggagtaaagggctctcggggattcccaggagagaagggcgaagtaggagaaattggactggatggtctggatggtgaagatggagacaaaggattgcctggttcttctggagagaaagggaatcctggaagaaggggtgataaaggacctcgaggagagaaaggagaaagaggagatgttgggattcgaggggacccgggtaacccaggacaagacagccaggagagaggacccaaaggagaaaccggtgacctcggccccatgggtgtcccagggagagatggagtacctggaggacctggagaaactgggaagaatggtggctttggccgaaggggaccccccggagctaagggcaacaagggcggtcctggccagccgggctttgagggagagcaggggaccagaggtgcacagggcccagctggtcctgctggtcctccagggctgataggagaacaaggcatttctggacctcggggaagcggaggtgccgctggtgctcctggagaacgaggcagaaccggtccactgggaagaaagggtgagcccggagagccaggaccaaaaggaggaatcgggaaccggggccctcgtggggagacgggagatgacgggagagacggagttggcagtgaaggacgcagaggcaaaaaaggagaaagaggattccctggatacccaggaccaaagggtaacccaggtgaacctgggctaaatggaacaacaggacccaaaggcatcagaggccgaaggggaaattcgggacctccagggatagttggacagaagggagaccctggctacccaggaccagctggtcccaagggcaacaggggcgactccatcgatcaatgtgccctcatccaaagcatcaaagataaatgcccttgctgttacgggcccctggagtgccccgtcttcccaacagaactagcctttgctttagacacctctgagggagtcaaccaagacactttcggccggatgcgagatgtggtcttgagtattgtgaatgacctgaccattgctgagagcaactgcccacggggggcccgggtggctgtggtcacctacaacaacgaggtgaccacggagatccggtttgctgactccaagaggaagtcggtcctcctggacaagattaagaaccttcaggtggctctgacatccaaacagcagagtctggagactgccatgtcgtttgtggccaggaacacatttaagcgtgtgaggaacggattcctaatgaggaaagtggctgttttcttcagcaacacacccacaagagcatccccacagctcagagaggctgtgctcaagctctcagatgcggggatcacccccttgttccttacaaggcaggaagaccggcagctcatcaacgctttgcagatcaataacacagcagtggggcatgcgcttgtcctgcctgcagggagagacctcacagacttcctggagaatgtcctcacgtgtcatgtttgcttggacatctgcaacatcgacccatcctgtggatttggcagttggaggccttccttcagggacaggagagcggcagggagcgatgtggacatcgacatggctttcatcttagacagcgctgagaccaccaccctgttccagttcaatgagatgaagaagtacatagcgtacctggtcagacaactggacatgagcccagatcccaaggcctcccagcacttcgccagagtggcagttgtgcagcacgcgccctctgagtccgtggacaatgccagcatgccacctgtgaaggtggaattctccctgactgactatggctccaaggagaagctggtggacttcctcagcaggggaatgacacagttgcagggaaccagggccttaggcagtgccattgaatacaccatagagaatgtctttgaaagtgccccaaacccacgggacctgaaaattgtggtcctgatgctgacgggcgaggtgccggagcagcagctggaggaggcccagagagtcatcctgcaggccaaatgcaagggctacttcttcgtggtcctgggcattggcaggaaggtgaacatcaaggaggtatacaccttcgccagtgagccaaacgacgtcttcttcaaattagtggacaagtccaccgagctcaacgaggagcctttgatgcgcttcgggaggctgttgccatccttcgtcagcagtgaaaatgctttttacttgtccccagatatcaggaaacagtgtgattggttccaaggggaccaacccacaaagaaccttgtgaagtttggtcacaaacaagtaaatgttccgaataacgttacttcaagtcctacatccaacccagtgacgacaacgaagccggtgactacgacgaagccggtgaccaccacaacaaagcctgtaaccaccacaacaaagcctgtgactattataaatcagccatctgtgaagccagccgctgcaaagccggcccctgcgaaacctgtggctgccaagcctgtggccacaaagatggccactgttagacccccagtggcggtgaagccagcaacggcagcgaagcctgtagcagcaaagccagcagctgtaagaccccccgctgctgctgctgcaaaaccagtggcgaccaagcctgaggtccctaggccacaggcagccaaaccagctgccaccaagccagccaccactaagcccatggttaagatgtcccgtgaagtccaggtgtttgagataacagagaacagcgccaaactccactgggagagggctgagccccccggtccttatttttatgacctcaccgtcacctcagcccatgatcagtccctggttctgaagcagaacctcacggtcacggaccgcgtcattggaggcctgctcgctgggcagacataccatgtggctgtggtctgctacctgaggtctcaggtcagagccacctaccacggaagtttcagtacaaagaaatctcagcccccacctccacagccagcaaggtcagcttctagttcaaccatcaatctaatggtgagcacagaaccattggctctcactgaaacagatatatgcaagttgccgaaagacgaaggaacttgcagggatttcatattaaaatggtactatgatccaaacaccaaaagctgtgcaagattctggtatggaggttgtggtggaaacgaaaacaaatttggatcacagaaagaatgtgaaaaggtttgcgctcctgtgctcgccaaacccggagtcatcagtgtgatgggaacctaa

SEQ ID NO: 121483 - DNA, 2379 bp, Homo sapiens
  Payload ID: 3822
  Gene Symbol: COL6A3
  Gene Name: collagen, type VI, alpha 3
  ENST ID: ENST00000433762
  CDS Start-End: 256-2379
cagtttggagctcagtcttccaccaaaggccgttcagttctcctgggctccagcctcctgcaaggactgcaagagttttcctccgcagctctgagtctccacttttttggtggagaaaggctgcaaaaagaaaaagagacgcagtgagtgggaaaagtatgcatcctattcaaacctaattgaatcgaggagcccagggacacacgccttcaggtttgctcaggggttcatatttggtgcttagacaaattcaaaatgaggaaacatcggcacttgcccttagtggccgtcttttgcctctttctctcaggctttcctacaactcatgcccagcagcagcaagcagatgtcaaaaatggtgcggctgctgatataatatttctagtggattcctcttggaccattggagaggaacatttccaacttgttcgagagtttctatatgatgttgtaaaatccttagctgtgggagaaaatgatttccattttgctctggtccagttcaacggaaacccacataccgagttcctgttaaatacgtatcgtactaaacaagaagtcctttctcatatttccaacatgtcttatattgggggaaccaatcagactggaaaaggattagaatacataatgcaaagccacctcaccaaggctgctggaagccgggccggtgacggagtccctcaggttatcgtagtgttaactgatggacactcgaaggatggccttgctctgccctcagcggaacttaagtctgctgatgttaacgtgtttgcaattggagttgaggatgcagatgaaggagcgttaaaagaaatagcaagtgaaccgctcaatatgcatatgttcaacctagagaattttacctcacttcatgacatagtaggaaacttagtgtcctgtgtgcattcatccgtgagtccagaaagggctggggacacggaaacccttaaagacatcacagcacaagactctgctgacattattttccttattgatggatcaaacaacaccggaagtgtcaatttcgcagtcattctcgacttccttgtaaatctccttgagaaactcccaattggaactcagcagatccgagtgggggtggtccagtttagcgatgagcccagaaccatgttctccttggacacctactccaccaaggcccaggttctgggtgcagtgaaagccctcgggtttgctggtggggagttggccaatatcggcctcgcccttgatttcgtggtggagaaccacttcacccgggcagggggcagccgcgtggaggaaggggttccccaggtgctggtcctcataagtgccgggccttctagtgacgagattcgctacggggtggtagcactgaagcaggctagcgtgttctcattcggccttggagcccaggccgcctccagggcagagcttcagcacatagctaccgatgacaacttggtgtttactgtcccggaattccgtagctttggggacctccaggagaaattactgccgtacattgttggcgtggcccaaaggcacattgtcttgaaaccgccaaccattgtcacacaagtcattgaagtcaacaagagagacatagtcttcctggtggatggctcatctgcactgggactggccaacttcaatgccatccgagacttcattgctaaagtcatccagaggctggaaatcggacaggatcttatccaggtggcagtggcccagtatgcagacactgtgaggcctgaattttatttcaatacccatccaacaaaaagggaagtcataaccgctgtgcggaaaatgaagcccctggacggctcggccctgtacacgggctctgctctagactttgttcgtaacaacctattcacgagttcagccggctaccgggctgccgaggggattcctaagcttttggtgctgatcacaggtggtaagtccctagatgaaatcagccagcctgcccaggagctgaagagaagcagcataatggcctttgccattgggaacaagggtgccgatcaggctgagctggaagagatcgctttcgactcctccctggtgttcatcccagctgagttccgagccgccccattgcaaggcatgctgcctggcttgctggcacctctcaggaccctctctggaacccctgaagagagcaagcgagacattctgttcctctttgacggctcagccaatcttgtgggccagttccctgttgtccgtgactttctctacaagattatcgatgagctcaatgtgaagccagaggggacccgaattgcggtggctcagtacagcgatgatgtcaaggtggagtcccgttttgatgagcaccagagtaagcctgagatcctgaatcttgtgaagagaatgaagatc

SEQ ID NO: 121484 - DNA, 8628 bp, Homo sapiens
  Payload ID: 3822
  Gene Symbol: COL6A3
  Gene Name: collagen, type VI, alpha 3
  Uniprot ID: P12111
  ENST ID: ENST00000472056
  CDS Start-End: 227-7939
ccgttcagttctcctgggctccagcctcctgcaaggactgcaagagttttcctccgcagctctgagtctccacttttttggtggagaaaggctgcaaaaagaaaaagagacgcagtgagtgggaaaagtatgcatcctattcaaacctaattgaatcgaggagcccagggacacacgccttcaggtttgctcaggggttcatatttggtgcttagacaaattcaaaatgaggaaacatcggcacttgcccttagtggccgtcttttgcctctttctctcaggctttcctacaactcatgcccagcagcagcaagcagtcattgaagtcaacaagagagacatagtcttcctggtggatggctcatctgcactgggactggccaacttcaatgccatccgagacttcattgctaaagtcatccagaggctggaaatcggacaggatcttatccaggtggcagtggcccagtatgcagacactgtgaggcctgaattttatttcaatacccatccaacaaaaagggaagtcataaccgctgtgcggaaaatgaagcccctggacggctcggccctgtacacgggctctgctctagactttgttcgtaacaacctattcacgagttcagccggctaccgggctgccgaggggattcctaagcttttggtgctgatcacaggtggtaagtccctagatgaaatcagccagcctgcccaggagctgaagagaagcagcataatggcctttgccattgggaacaagggtgccgatcaggctgagctggaagagatcgctttcgactcctccctggtgttcatcccagctgagttccgagccgccccattgcaaggcatgctgcctggcttgctggcacctctcaggaccctctctggaacccctgaagagagcaagcgagacattctgttcctctttgacggctcagccaatcttgtgggccagttccctgttgtccgtgactttctctacaagattatcgatgagctcaatgtgaagccagaggggacccgaattgcggtggctcagtacagcgatgatgtcaaggtggagtcccgttttgatgagcaccagagtaagcctgagatcctgaatcttgtgaagagaatgaagatcaagacgggcaaagccctcaacctgggctacgcgctggactatgcacagaggtacatttttgtgaagtctgctggcagccggatcgaggatggagtgcttcagttcctggtgctgctggtcgcaggaaggtcatctgaccgtgtggatgggccagcaagtaacctgaagcagagtggggttgtgcctttcatcttccaagccaagaacgcagaccctgctgagttagagcagatcgtgctgtctccagcgtttatcctggctgcagagtcgcttcccaagattggagatcttcatccacagatagtgaatctcttaaaatcagtgcacaacggagcaccagcaccagtttcaggtgaaaaggacgtggtgtttctgcttgatggctctgagggcgtcaggagcggcttccctctgttgaaagagtttgtccagagagtggtggaaagcctggatgtgggccaggaccgggtccgcgtggccgtggtgcagtacagcgaccggaccaggcccgagttctacctgaattcatacatgaacaagcaggacgtcgtcaacgctgtccgccagctgaccctgctgggagggccgacccccaacaccggggccgccctggagtttgtcctgaggaacatcctggtcagctctgcgggaagcaggataacagaaggtgtgccccagctgctgatcgtcctcacggccgacaggtctggggatgatgtgcggaacccctccgtggtcgtgaagaggggtggggctgtgcccattggcattggcatcgggaacgctgacatcacagagatgcagaccatctccttcatcccggactttgccgtggccattcccacctttcgccagctggggaccgtccaacaggtcatctctgagagggtgacccagctcacccgcgaggagctgagcaggctgcagccggtgttgcagcctctaccgagcccaggtgttggtggcaagagggacgtggtctttctcatcgatgggtcccaaagtgccgggcctgagttccagtacgttcgcaccctcatagagaggctggttgactacctggacgtgggctttgacaccacccgggtggctgtcatccagttcagcgatgaccccaaggtggagttcctgctgaacgcccattccagcaaggatgaagtgcagaacgcggtgcagcggctgaggcccaagggagggcggcagatcaacgtgggcaatgccctggagtacgtgtccaggaacatcttcaagaggcccctggggagccgcattgaagagggcgtcccgcagttcctggtcctcatctcgtctggaaagtctgacgatgaggtggacgacccggcggtggagctcaagcagtttggcgtggcccctttcacgatcgccaggaacgcagaccaggaggagctggtgaagatctcgctgagccccgaatatgtgttctcggtgagcaccttccgggagctgcccagcctggagcagaaactgctgacgcccatcacgaccctgacctcagagcagatccagaagctcttagccagcactcgctatccacctccagcagttgagagtgatgctgcagacattgtctttctgatcgacagctctgagggagttaggccagatggctttgcacatattcgagattttgttagcaggattgttcgaagactcaacatcggccccagtaaagtgagagttggggtcgtgcagttcagcaatgatgtcttcccagaattctatctgaaaacctacagatcccaggccccggtgctggacgccatacggcgcctgaggctcagaggggggtccccactgaacactggcaaggctctcgaatttgtggcaagaaacctctttgttaagtctgcggggagtcgcatagaagacggggtgccccaacacctggtcctggtcctgggtggaaaatcccaggacgatgtgtccaggttcgcccaggtgatccgttcctcgggcattgtgagtttaggggtaggagaccggaacatcgacagaacagagctgcagaccatcaccaatgaccccagactggtcttcacagtgcgagagttcagagagcttcccaacatagaagaaagaatcatgaactcgtttggaccctccgcagccactcctgcacctccaggggtggacacccctcctccttcacggccagagaagaagaaagcagacattgtgttcctgttggatggttccatcaacttcaggagggacagtttccaggaagtgcttcgttttgtgtctgaaatagtggacacagtttatgaagatggcgactccatccaagtggggcttgtccagtacaactctgaccccactgacgaattcttcctgaaggacttctctaccaagaggcagattattgacgccatcaacaaagtggtctacaaagggggaagacacgccaacactaaggtgggccttgagcacctgcgggtaaaccactttgtgcctgaggcaggcagccgcctggaccagcgggtccctcagattgcctttgtgatcacgggaggaaagtcggtggaagatgcacaggatgtgagcctggccctcacccagaggggggtcaaagtgtttgctgttggagtgaggaatatcgactcggaggaggttggaaagatagcgtccaacagcgccacagcgttccgcgtgggcaacgtccaggagctgtccgaactgagcgagcaagttttggaaactttgcatgatgcgatgcatgaaaccctttgccctggtgtaactgatgctgccaaagcttgtaatctggatgtgattctggggtttgatggttctagagaccagaatgtttttgtggcccagaagggcttcgagtccaaggtggacgccatcttgaacagaatcagccagatgcacagggtcagctgcagcggtggccgctcgcccaccgtgcgtgtgtcagtggtggccaacacgccctcgggcccggtggaggcctttgactttgacgagtaccagccagagatgctcgagaagttccggaacatgcgcagccagcacccctacgtcctcacggaggacaccctgaaggtctacctgaacaagttcagacagtcctcgccggacagcgtgaaggtggtcattcattttactgatggagcagacggagatctggctgatttacacagagcatctgagaacctccgccaagaaggagtccgtgccttgatcctggtgggccttgaacgagtggtcaacttggagcggctaatgcatctggagtttgggcgagggtttatgtatgacaggcccctgaggcttaacttgctggacttggattatgaactagcggagcagcttgacaacattgccgagaaagcttgctgtggggttccctgcaagtgctctgggcagaggggagaccgcgggcccatcggcagcatcgggccaaagggtattcctggagaagacggctaccgaggctatcctggtgatgagggtggacccggtgagcgtggtccgcctggtgtgaacggcactcaaggtttccagggctgcccgggccagagaggagtaaagggctctcggggattcccaggagagaagggcgaagtaggagaaattggactggatggtctggatggtgaagatggagacaaaggattgcctggttcttctggagagaaagggaatcctggaagaaggggtgataaaggacctcgaggagagaaaggagaaagaggagatgttgggattcgaggggacccgggtaacccaggacaagacagccaggagagaggacccaaaggagaaaccggtgacctcggccccatgggtgtcccagggagagatggagtacctggaggacctggagaaactgggaagaatggtggctttggccgaaggggaccccccggagctaagggcaacaagggcggtcctggccagccgggctttgagggagagcaggggaccagaggtgcacagggcccagctggtcctgctggtcctccagggctgataggagaacaaggcatttctggacctcggggaagcggaggtgccgctggtgctcctggagaacgaggcagaaccggtccactgggaagaaagggtgagcccggagagccaggaccaaaaggaggaatcgggaaccggggccctcgtggggagacgggagatgacgggagagacggagttggcagtgaaggacgcagaggcaaaaaaggagaaagaggattccctggatacccaggaccaaagggtaacccaggtgaacctgggctaaatggaacaacaggacccaaaggcatcagaggccgaaggggaaattcgggacctccagggatagttggacagaagggagaccctggctacccaggaccagctggtcccaagggcaacaggggcgactccatcgatcaatgtgccctcatccaaagcatcaaagataaatgcccttgctgttacgggcccctggagtgccccgtcttcccaacagaactagcctttgctttagacacctctgagggagtcaaccaagacactttcggccggatgcgagatgtggtcttgagtattgtgaatgacctgaccattgctgagagcaactgcccacggggggcccgggtggctgtggtcacctacaacaacgaggtgaccacggagatccggtttgctgactccaagaggaagtcggtcctcctggacaagattaagaaccttcaggtggctctgacatccaaacagcagagtctggagactgccatgtcgtttgtggccaggaacacatttaagcgtgtgaggaacggattcctaatgaggaaagtggctgttttcttcagcaacacacccacaagagcatccccacagctcagagaggctgtgctcaagctctcagatgcggggatcacccccttgttccttacaaggcaggaagaccggcagctcatcaacgctttgcagatcaataacacagcagtggggcatgcgcttgtcctgcctgcagggagagacctcacagacttcctggagaatgtcctcacgtgtcatgtttgcttggacatctgcaacatcgacccatcctgtggatttggcagttggaggccttccttcagggacaggagagcggcagggagcgatgtggacatcgacatggctttcatcttagacagcgctgagaccaccaccctgttccagttcaatgagatgaagaagtacatagcgtacctggtcagacaactggacatgagcccagatcccaaggcctcccagcacttcgccagagtggcagttgtgcagcacgcgccctctgagtccgtggacaatgccagcatgccacctgtgaaggtggaattctccctgactgactatggctccaaggagaagctggtggacttcctcagcaggggaatgacacagttgcagggaaccagggccttaggcagtgccattgaatacaccatagagaatgtctttgaaagtgccccaaacccacgggacctgaaaattgtggtcctgatgctgacgggcgaggtgccggagcagcagctggaggaggcccagagagtcatcctgcaggccaaatgcaagggctacttcttcgtggtcctgggcattggcaggaaggtgaacatcaaggaggtatacaccttcgccagtgagccaaacgacgtcttcttcaaattagtggacaagtccaccgagctcaacgaggagcctttgatgcgcttcgggaggctgttgccatccttcgtcagcagtgaaaatgctttttacttgtccccagatatcaggaaacagtgtgattggttccaaggggaccaacccacaaagaaccttgtgaagtttggtcacaaacaagtaaatgttccgaataacgttacttcaagtcctacatccaacccagtgacgacaacgaagccggtgactacgacgaagccggtgaccaccacaacaaagcctgtaaccaccacaacaaagcctgtgactattataaatcagccatctgtgaagccagccgctgcaaagccggcccctgcgaaacctgtggctgccaagcctgtggccacaaagatggccactgttagacccccagtggcggtgaagccagcaacggcagcgaagcctgtagcagcaaagccagcagctgtaagaccccccgctgctgctgctgcaaaaccagtggcgaccaagcctgaggtccctaggccacaggcagccaaaccagctgccaccaagccagccaccactaagcccatggttaagatgtcccgtgaagtccaggtgtttgagataacagagaacagcgccaaactccactgggagagggctgagccccccggtccttatttttatgacctcaccgtcacctcagcccatgatcagtccctggttctgaagcagaacctcacggtcacggaccgcgtcattggaggcctgctcgctgggcagacataccatgtggctgtggtctgctacctgaggtctcaggtcagagccacctaccacggaagtttcagtacaaagaaatctcagcccccacctccacagccagcaaggtcagcttctagttcaaccatcaatctaatggtgagcacagaaccattggctctcactgaaacagatatatgcaagttgccgaaagacgaaggaacttgcagggatttcatattaaaatggtactatgatccaaacaccaaaagctgtgcaagattctggtatggaggttgtggtggaaacgaaaacaaatttggatcacagaaagaatgtgaaaaggtttgcgctcctgtgctcgccaaacccggagtcatcagtgtgatgggaacctaagcgtgggtggccaacatcatatacctcttgaagaagaaggagtcagccatcgccaacttgtctctgtagaagctccgggtgtagattcccttgcactgtatcatttcatgctttgatttacactcgaactcgggagggaacatcctgctgcatgacctatcagtatggtgctaatgtgtctgtggaccctcgctctctgtctccaggcagttctctcgaatactttgaatgttgtgtaacagttagccactgctggtgtttatgtgaacattcctatcaatccaaattccctctggagtttcatgttatgcctgttgcaggcaaatgtaaagtctagaaaataatgcaaatgtcacggctactctatatacttttgcttggttcattttttttcccttttagttaagcatgactttagatgggaagcctgtgtatcgtggagaaacaagagaccaactttttcattccctgcccccaatttcccagactagatttcaagctaattttctttttctgaagcctctaacaaatgatctagttcagaaggaagcaaaatcccttaatctatgtgcaccgttgggaccaatgccttaattaaagaatttaaaaaagttgtaatagagaatatttttggcattcctctaatgttgtgtgttttttttttgtgtgtgctggagggaggggattta

SEQ ID NO: 121485 - DNA, 652 bp, Homo sapiens
  Payload ID: 3822
  Gene Symbol: COL6A3
  Gene Name: collagen, type VI, alpha 3
  ENST ID: ENST00000491233
  CDS Start-End: 1-522
ccaattggaactcagcagatccgagtgggggtggtccagtttagcgatgagcccagaaccatgttctccttggacacctactccaccaaggcccaggttctgggtgcagtgaaagccctcgggtttgctggtggggagttggccaatatcggcctcgcccttgatttcgtggtggagaaccacttcacccgggcagggggcagccgcgtggaggaaggggttccccaggtgctggtcctcataagtgccgggccttctagtgacgagattcgctacggggtggtagcactgaagcaggctagcgtgttctcattcggccttggagcccaggccgcctccagggcagagcttcagcacatagctaccgatgacaacttggtgtttactgtcccggaattccgtagctttggggacctccaggagaaattactgccgtacattgttggcgtggcccaaaggcacattgtcttgaaaccgccaaccattgtcacacaagagtatgggctcaatgaaaattggtgaatggataccgaggctcctataagactctgattatcatctgcaaccaatcatctaaattttcttgggtgaaataacacattgttacaactcttatttgctaactttataaataaagtctgggtctacaaga

SEQ ID NO: 121486 - DNA, 9214 bp, Homo sapiens
  Payload ID: 3823
  Gene Symbol: COL6A5
  Gene Name: collagen, type VI, alpha 5
  ENST ID: ENST00000265379
  CDS Start-End: 495-8330
aaatggcgattcctctgtctaagtagtagaagtgaccgcagctcggctgctagtaaagattgcccttggtttctgagaaattctgactccctaagttcatttggcagccggcggcttctctgaaacaaagccagcaaacagctggagcgtctctggacactcacattaaaacttgtgaagagttaaaagccccagggaagagccaggccaagggcacgggtcagcgccggcttaaaagaccctctcagggcacgaggcgttcgctgcgggaatccacctgcagctgtgcggcgcggaccagggcgtgcggcgcggaccagggcttccggcgcgcgctctatccaactgcgccgcgggcgcccgagaggcgcgcgtttactgcgctcaggagctcggtgcagcctcttctggagagttgggggcggtttccagggtccggagtgtcccctgaccccgggaaagctggaacaaaagtaaaaatcttcactaacaaaatgaagatcttgctaattatatttgtcctaatcatttggactgaaacattggcagaccagagcccagggccaggccctgtgtatgcagatgtcgtgtttctggtggacagctccgatcacctgggacctaagtcattcccattcgtgaaaacgttcatcaacaaaatgatcaacagtctccccatagaggccaacaaataccgtgtagccctggcccagtacagcgacgagtttcacagtgaattccatctgagcaccttcaaaggcagaagccccatgctgaaccacctcaagaagaactttcagttcattggcgggtccctgcagataggaaaggctcttcaggaggctcataggacctacttctctgcacccataaatgggagagacaggaaacagtttcccccaattttggtggtcctggcttcggctgagtctgaggatgaagtggaagaggcttcgaaagccctgcagaaagacggggtgaaaattatctccgtgggggtgcagaaagcttctgaggaaaatctgaaggccatggccacatcccatttccatttcaaccttcggacaatcagagacctcagcacattttcccaaaacatgacacagatcatcaaggatgtaaccaagtataaggagggagccgtcgatgctgatatgcaagttcacttccccatatcctgtcagaaagattcactcgctgacctcgtgttcctggtggatgagtcacttgggaccggaggaaatttaaggcatcttcagaccttccttgagaacattaccagctccatggatgtgaaggaaaattgcatgcgacttggactgatgagttacagcaatagtgccaagactatttcttttcttaaatcaagcacaacccaatctgaatttcagcagcaaatcaagaatctttctatccaagttgggaaatccaatacaggggctgccattgatcagatgagaagagacggcttctcagagtcatatggcagcagaagagcacaaggagtgcctcagattgcagttctggtcacccacagaccatcagatgatgaggtgcatgatgctgcgctgaaccttcgactggaggatgtaaacgtgtttgccttgagcatccaaggggctaacaatacccagttagaagaaatagtgtcttatcctccagaacagacaatttccacgctgaagtcctatgcagacttagaaacttacagtacaaagttcctgaaaaagctccagaatgaaatatggtcccaaatttctacttatgctgaacaaaggaatcttgataaaactggctgtgtggatacaaaagaggctgatatccacttcctcattgatggctcaagcagcatccaggagaaacagtttgagcaaatcaagagatttatgttggaagtgacagaaatgtttagcattggcccagacaaagtccgagttggagttgtgcagtattcagatgacacagaagtggaattttatatcactgactattctaatgatattgacttaagaaaggctatttttaacattaagcaactaactggtggaacttatactgggaaagctctggattacatactgcaaataataaaaaatggaatgaaggatagaatgagcaaggttccctgttacctcattgtgttgactgatgggatgtccacagacagagtcgtggaacctgctaagagactaagggctgagcaaatcactgttcatgcagttggcattggggcagctaataaaatagaactgcaagaaattgctgggaaagaagaaagggttagctttgggcagaactttgatgctttgaaaagcataaaaaatgaagtcgttcgtgaaatctgcgctgaaaaaggatgtgaagacatgaaggccgacatcatgtttctggtggacagttcttggagtataggaaatgaaaattttaggaaaatgaaaatcttcatgaaaaacctgttaactaaaattcaaattggtgcagacaaaacccagattggtgttgttcagttcagtgataaaactaaggaagagttccagcttaatagatattttacacagcaagaaatttctgatgcaatagatagaatgtctctcatcaatgaaggcactttaactggaaaggcactaaattttgtaggtcaatacttcacccactccaagggggcccgtttgggggccaaaaaatttctcatcctcatcacagatggagtagcgcaggatgatgtgagagatcctgctagaattcttcggggcaaagatgtgaccatcttctctgtaggagtatacaatgccaatagatctcagctagaagagatcagtggggatagcagcctagtttttcatgttgagaacttcgatcatctaaaggcactagaaaggaaacttatctttcgtgtgtgtgctctccatgattgtaaaaggattacactactagacgttgtgtttgtgctggatcattcaggtagcataaaaaaacaatatcaagatcacatgattaacctaactatccatttggtgaagaaagcagatgttggcagggaccgagttcagtttggagccctcaaatactctgaccaacctaacatccttttctaccttaatacatactcgaacagatcagcaataattgagaatctgcggaagcgcagggacactggagggaacacctacactgccaaggctctcaagcacgcaaatgccctgtttacagaggaacatggcagccgcatcaagcaaaatgtgaagcagatgctgattgtcatcaccgatggggaatcccatgaccatgatcagctcaatgacacagcattggaactgagaaacaaaggcatcaccatctttgcagtgggtgtaggaaaggccaaccaaaaggaacttgagggtatggcagggaataaaaacaatactatctatgtagataattttgacaaactgaaagatgttttcacacttgttcaagaacgtatgtgtactgaagcaccagaggtctgtcatcttcaggaagctgacgtgattttcctttgcgatggctctgacagggtatctaattcagattttgtaaccatgacaactttcttgtcagacttaatcgataattttgacattcagtctcaaagaatgaaaattggtatggctcaatttggaagcaactaccagagtattattgagttgaaaaactctctgactaaaacccagtggaagactcaaattcagaatgtctccaagagcggtggatttccaagaattgactttgcccttaaaaaagtgagcaatatgtttaatctacatgctggtgggagaagaaatgctggtgtcccccaaactttggttgttatcacatctggagatcctcgctatgatgtggcagatgcagtaaaaaccctgaaggaccttggaatttgtgtcctggttttgggcataggagatgtttataaggaacatctcctgccaataacaggcaattctgaaaaaataatcacttttcaagactttgataaattaaagaatgtggatgtgaaaaaaagaatcatccgtgaaatctgccagagctgtgggaaaaccaattgctttatggacatagtggttgggtttgacatctccactcatgtgcaggggcagcctttgttccagggccacccccagctggaatcctacctcccaggcatcttagaagacatcagctctatcaagggggtgagctgtggggctggcacagaggcacaggtgagcttggcgtttaaggtgaacagtgaccaaggattccctgccaagttccaaatctatcagaaagcagtgtttgacagcttgctgcaagtcaacgtcagtgggccaactcatctgaacgcacagttcttgcggtctctttgggacacatttaaggataaatctgcatcccggggccaggtgctgcttattttttcagacggtctccagagtgaaagcaacataatgcttgaaaatcaatcagacaggctcagagaagcaggacttgatgctctgctggtagtgtcccttaacacaactgctcatcatgagttttctagctttgaatttggaaaaagattcgattacaggactcatctgactattggaatgagagaactgggcaaaaaactatcacagtacctgggaaatattgcagagaggacttgctgctgtacattctgcaaatgtccaggaattccaggacctcatgggacccgaggactacaagccatgaagggttctcaaggtctgaaaggcagcagaggacacaggggagaggatggaaaccctggagtacgaggagacacaggaccccaaggagacaaagggattgcaggatgtccaggggcgtggggtcagaagggactcaaaggattttctggacctaagggaggtcatggagacgatgggattgatggacttgatggggaagagggctgtcatggatttcctggaataaaaggagaaaaaggtgatccaggatctcagggcagcccaggttccagaggtgcccctgggcagtatggagagaagggcttcccaggggatccgggtaatccaggacaaaacaataacatcaaaggacaaaagggctccaaaggagaacaaggaagacaaggtagaagtggacagaaaggggtgcaaggcagtcctagttccagaggcagcaggggaagagaaggtcaaaggggactccgaggtgtctcaggagaaccaggaaatcctggacctacaggcacattgggagctgaaggattacaaggcccacaggggtcacagggaaatcctggcagaaaaggagaaaaaggaagccaggggcagaaaggacctcagggttctcctgggctaatgggagctaaagggagcactggaagacctggacttttggggaaaaaaggagagcctggacttcctggagatctagggccagtggggcaaactgggcagcgaggaagacagggagattctggcatcccaggctacggtcagatgggacgaaaaggagtaaagggcccaagaggattccctggagatgcggggcagaagggtgatattggtaatcctggaattcctgggggacctggacccaaaggatttaggggactagcactcactgtaggcttgaaaggtgaagagggatctcgaggactcccaggccctcctggacagagaggcattaaaggcatggcagggcagcctgtatattctcaatgtgatctgatccggtttttgcgggaacatagtcttttcaaaaatgcatatccaacagagctagtatttgctctggacaattcctacgatgtcacagaagagagctttaataaaacacgggacatcatcacttccattgtcaatgaccttaacatcagggaaaataactgtcctgtgggagcaagagttgccatggtttcctataactcaggcaccagctatctcatccgctggtctgactacaataggaagaagcagctcctccagcagctttcccaaataaaatatcaagacaccacagagccccgagatgttggtaatgcaatgaggtttgtgacccgcaacgtgttcaagcggacgtatgcaggagccaacgtgaggagagttgctgtgttttttagcaatggtcaaacagccagtaggtcatccatcatcacggccaccatggagtttagtgccctggatatcagtccaacagtctttgcttttgatgagagagttttccttgaagcttttgggtttgacaacactggaacatttcaggtgattccagttcctccaaatggggaaaatcaaacattagaaagacttcggcgctgtgcactttgctatgataaatgttttccaaatgcttgcattcgagaggctttcttacctgaagattcatacatggatgtagtcttcctcatagacaattctcggaatatagcaaaggatgagtttaaggctgtgaaagccttggtgagctcagtgattgacaacttcaacattgcttcagaccctttaatctcagactctggtgataggattgctttgttgagctattctccttgggaaagttccaggagaaagatgggtacagtaaaaacagagtttgatttcatcacttatgacaaccaactcctaatgaagaatcacatccagacttccttccaacagctaaatggagaagcaacaattggtcgtgccctactgtggaccactgaaaatctttttccagaaacaccctatctaagaaaacacaaggtcatctttgtggtctcagctggagaaaattatgagagaaaagaatttgtaaaaatgatggctttgagggctaagtgtcaaggctacgtcatatttgtgatttctctgggctctacacgtaaggatgacatggaggagttagccagctacccacttgatcaacacctgatacagcttgggagaatacataaaccagatctgaattatattgcgaagttcttaaagccatttttatactcggtcaggcggggattcaatcagtacccaccaccgatgcttgaggatgcctgtagactcatcaatttaggaggagagaatattcaaaatgatggtttccaatttgttactgagctacaagaggattttttgggaggtaatggcttcattggccaagaattaaattctgggagagaatcaccttttgtaaagacggaagacaatggaagtgactatttggtttaccttccaagccaaatgtttgagccacaaaaattaatgatcaattatgaaaaagatcaaaaatctgcagaaattgcaagtctcacttctggacatgaaaattatggcagaaaagaagaaccagatcatacttatgaacctggagatgtctctcttcaagaatattacatggatgtggctttcctcatagatgcttcccaaagagtaggaagtgatgagtttaaggaagtaaaagcttttataacctcagtgcttgattactttcacattgcccccactccactgacctccaccttaggagacagggttgctgtcctgagctactctcctccaggctatatgcctaacactgaagaatgccctgtctacctggaatttgatttggttacttataacagtatacaccaaatgaaacatcatctccaagactctcaacagctcaatggagatgtttttattggccatgccttgcagtggacaattgacaatgtctttgtaggaacccccaatctgaggaaaaacaaagttatctttgtaatatctgctggcgaaaccaactctttagacaaagacgtcttaaggaatgtgtctctgagagccaagtgtcaaggctactccatatttgtgttttcctttggccctaaacacaatgacaaagaattagaagaattagccagccaccctctggatcatcacttggtccaacttggccgaacccacaagccagattggaactatatcatcaagtttgtcaagccatttgtccatttaatcagacgtgccatcaacaaatatcccaccgaagatatgaaagccacatgtgttaacatgacctctcccaacccagagaacggtggcacagaaaacactgtattacttcttcctgggatatatgaaataaagacagaaaatggtgatctgtttgatgaatttgattcccaggcacaacatctccttgtattagggaacaatcatagtagtggttctgagacagctactgatttgatgcagaagttatatctgctcttttcaactgagaaactggcaatgaaagacaaggaaaaagcacatttagaagaaatttcagctctagtggttgataaacagcaagaaaaagaagataaggaaatggaagctacagacatctgaagcatcttacctaagaattcagtaattaatccaatactttcgtcatagtgattcatactctatgtttatagaacatggtgaagatacaaggtcatcataggagaaaagaagatagctccactgacatgtataatcccatgtggttctaaccagaatgtataatcatctgttagaggtactgtggtaaatgacagggacttttcacaaaaacaattggctaatagcatgctaaatttgttctccatctcaaatcttgaggagaagaattttcggagtgaagacatcagtaagaagacctgacaaaccaggaatgatttcatttctcctgagaactggggaaaccgacctataagagttaacttttctttgaaagctctgcacagttcaggcatcaattttgatgatgtatctgcctgtaaaagattgtcattattttcaacacatctgtatctcagattggactcctctaaaagcatttggaattggaatttcctaggaatatcttctactaattcttaaaactggaaagccatgcccatgtcatcggttctggggtgaccctaacatttcatctagcagtgattgtcttctaaaacccacctgtcaggctgctatgacccatagttaatgctttctcttcaccaggacattgacaaaagaatggaattggtgaaaaagaaaaaagtgataagaggctaattttatgaaccatattttttgctgtaatcttttgtttaaattttagcagctttgctttgtgtatactgaatttttgcagcaaaagaattacggaaaagcacagatactctatatgaccagagatgttcttgggaattacaatgtagcaagagataatttctaaaataaaaacaagtctgacttgg

SEQ ID NO: 121487 - DNA, 9226 bp, Homo sapiens
  Payload ID: 3823
  Gene Symbol: COL6A5
  Gene Name: collagen, type VI, alpha 5
  Uniprot ID: A8TX70
  ENST ID: ENST00000312481
  CDS Start-End: 495-8342
aaatggcgattcctctgtctaagtagtagaagtgaccgcagctcggctgctagtaaagattgcccttggtttctgagaaattctgactccctaagttcatttggcagccggcggcttctctgaaacaaagccagcaaacagctggagcgtctctggacactcacattaaaacttgtgaagagttaaaagccccagggaagagccaggccaagggcacgggtcagcgccggcttaaaagaccctctcagggcacgaggcgttcgctgcgggaatccacctgcagctgtgcggcgcggaccagggcgtgcggcgcggaccagggcttccggcgcgcgctctatccaactgcgccgcgggcgcccgagaggcgcgcgtttactgcgctcaggagctcggtgcagcctcttctggagagttgggggcggtttccagggtccggagtgtcccctgaccccgggaaagctggaacaaaagtaaaaatcttcactaacaaaatgaagatcttgctaattatatttgtcctaatcatttggactgaaacattggcagaccagagcccagggccaggccctgtgtatgcagatgtcgtgtttctggtggacagctccgatcacctgggacctaagtcattcccattcgtgaaaacgttcatcaacaaaatgatcaacagtctccccatagaggccaacaaataccgtgtagccctggcccagtacagcgacgagtttcacagtgaattccatctgagcaccttcaaaggcagaagccccatgctgaaccacctcaagaagaactttcagttcattggcgggtccctgcagataggaaaggctcttcaggaggctcataggacctacttctctgcacccataaatgggagagacaggaaacagtttcccccaattttggtggtcctggcttcggctgagtctgaggatgaagtggaagaggcttcgaaagccctgcagaaagacggggtgaaaattatctccgtgggggtgcagaaagcttctgaggaaaatctgaaggccatggccacatcccatttccatttcaaccttcggacaatcagagacctcagcacattttcccaaaacatgacacagatcatcaaggatgtaaccaagtataaggagggagccgtcgatgctgatatgcaagttcacttccccatatcctgtcagaaagattcactcgctgacctcgtgttcctggtggatgagtcacttgggaccggaggaaatttaaggcatcttcagaccttccttgagaacattaccagctccatggatgtgaaggaaaattgcatgcgacttggactgatgagttacagcaatagtgccaagactatttcttttcttaaatcaagcacaacccaatctgaatttcagcagcaaatcaagaatctttctatccaagttgggaaatccaatacaggggctgccattgatcagatgagaagagacggcttctcagagtcatatggcagcagaagagcacaaggagtgcctcagattgcagttctggtcacccacagaccatcagatgatgaggtgcatgatgctgcgctgaaccttcgactggaggatgtaaacgtgtttgccttgagcatccaaggggctaacaatacccagttagaagaaatagtgtcttatcctccagaacagacaatttccacgctgaagtcctatgcagacttagaaacttacagtacaaagttcctgaaaaagctccagaatgaaatatggtcccaaatttctacttatgctgaacaaaggaatcttgataaaactggctgtgtggatacaaaagaggctgatatccacttcctcattgatggctcaagcagcatccaggagaaacagtttgagcaaatcaagagatttatgttggaagtgacagaaatgtttagcattggcccagacaaagtccgagttggagttgtgcagtattcagatgacacagaagtggaattttatatcactgactattctaatgatattgacttaagaaaggctatttttaacattaagcaactaactggtggaacttatactgggaaagctctggattacatactgcaaataataaaaaatggaatgaaggatagaatgagcaaggttccctgttacctcattgtgttgactgatgggatgtccacagacagagtcgtggaacctgctaagagactaagggctgagcaaatcactgttcatgcagttggcattggggcagctaataaaatagaactgcaagaaattgctgggaaagaagaaagggttagctttgggcagaactttgatgctttgaaaagcataaaaaatgaagtcgttcgtgaaatctgcgctgaaaaaggatgtgaagacatgaaggccgacatcatgtttctggtggacagttcttggagtataggaaatgaaaattttaggaaaatgaaaatcttcatgaaaaacctgttaactaaaattcaaattggtgcagacaaaacccagattggtgttgttcagttcagtgataaaactaaggaagagttccagcttaatagatattttacacagcaagaaatttctgatgcaatagatagaatgtctctcatcaatgaaggcactttaactggaaaggcactaaattttgtaggtcaatacttcacccactccaagggggcccgtttgggggccaaaaaatttctcatcctcatcacagatggagtagcgcaggatgatgtgagagatcctgctagaattcttcggggcaaagatgtgaccatcttctctgtaggagtatacaatgccaatagatctcagctagaagagatcagtggggatagcagcctagtttttcatgttgagaacttcgatcatctaaaggcactagaaaggaaacttatctttcgtgtgtgtgctctccatgattgtaaaaggattacactactagacgttgtgtttgtgctggatcattcaggtagcataaaaaaacaatatcaagatcacatgattaacctaactatccatttggtgaagaaagcagatgttggcagggaccgagttcagtttggagccctcaaatactctgaccaacctaacatccttttctaccttaatacatactcgaacagatcagcaataattgagaatctgcggaagcgcagggacactggagggaacacctacactgccaaggctctcaagcacgcaaatgccctgtttacagaggaacatggcagccgcatcaagcaaaatgtgaagcagatgctgattgtcatcaccgatggggaatcccatgaccatgatcagctcaatgacacagcattggaactgagaaacaaaggcatcaccatctttgcagtgggtgtaggaaaggccaaccaaaaggaacttgagggtatggcagggaataaaaacaatactatctatgtagataattttgacaaactgaaagatgttttcacacttgttcaagaacgtatgtgtactgaagcaccagaggtctgtcatcttcaggaagctgacgtgattttcctttgcgatggctctgacagggtatctaattcagattttgtaaccatgacaactttcttgtcagacttaatcgataattttgacattcagtctcaaagaatgaaaattggtatggctcaatttggaagcaactaccagagtattattgagttgaaaaactctctgactaaaacccagtggaagactcaaattcagaatgtctccaagagcggtggatttccaagaattgactttgcccttaaaaaagtgagcaatatgtttaatctacatgctggtgggagaagaaatgctggtgtcccccaaactttggttgttatcacatctggagatcctcgctatgatgtggcagatgcagtaaaaaccctgaaggaccttggaatttgtgtcctggttttgggcataggagatgtttataaggaacatctcctgccaataacaggcaattctgaaaaaataatcacttttcaagactttgataaattaaagaatgtggatgtgaaaaaaagaatcatccgtgaaatctgccagagctgtgggaaaaccaattgctttatggacatagtggttgggtttgacatctccactcatgtgcaggggcagcctttgttccagggccacccccagctggaatcctacctcccaggcatcttagaagacatcagctctatcaagggggtgagctgtggggctggcacagaggcacaggtgagcttggcgtttaaggtgaacagtgaccaaggattccctgccaagttccaaatctatcagaaagcagtgtttgacagcttgctgcaagtcaacgtcagtgggccaactcatctgaacgcacagttcttgcggtctctttgggacacatttaaggataaatctgcatcccggggccaggtgctgcttattttttcagacggtctccagagtgaaagcaacataatgcttgaaaatcaatcagacaggctcagagaagcaggacttgatgctctgctggtagtgtcccttaacacaactgctcatcatgagttttctagctttgaatttggaaaaagattcgattacaggactcatctgactattggaatgagagaactgggcaaaaaactatcacagtacctgggaaatattgcagagaggacttgctgctgtacattctgcaaatgtccaggaattccaggacctcatgggacccgaggactacaagccatgaagggttctcaaggtctgaaaggcagcagaggacacaggggagaggatggaaaccctggagtacgaggagacacaggaccccaaggagacaaagggattgcaggatgtccaggggcgtggggtcagaagggactcaaaggattttctggacctaagggaggtcatggagacgatgggattgatggacttgatggggaagagggctgtcatggatttcctggaataaaaggagaaaaaggtgatccaggatctcagggcagcccaggttccagaggtgcccctgggcagtatggagagaagggcttcccaggggatccgggtaatccaggacaaaacaataacatcaaaggacaaaagggctccaaaggagaacaaggaagacaaggtagaagtggacagaaaggggtgcaaggcagtcctagttccagaggcagcaggggaagagaaggtcaaaggggactccgaggtgtctcaggagaaccaggaaatcctggacctacaggcacattgggagctgaaggattacaaggcccacaggggtcacagggaaatcctggcagaaaaggagaaaaaggaagccaggggcagaaaggacctcagggttctcctgggctaatgggagctaaagggagcactggaagacctggacttttggggaaaaaaggagagcctggacttcctggagatctagggccagtggggcaaactgggcagcgaggaagacagggagattctggcatcccaggctacggtcagatgggacgaaaaggagtaaagggcccaagaggattccctggagatgcggggcagaagggtgatattggtaatcctggaattcctgggggacctggacccaaaggatttaggggactagcactcactgtaggcttgaaaggtgaagagggatctcgaggactcccaggccctcctggacagagaggcattaaaggcatggcagggcagcctgtatattctcaatgtgatctgatccggtttttgcgggaacatagtccttgctggaaagaaaaatgtccagcatatccaacagagctagtatttgctctggacaattcctacgatgtcacagaagagagctttaataaaacacgggacatcatcacttccattgtcaatgaccttaacatcagggaaaataactgtcctgtgggagcaagagttgccatggtttcctataactcaggcaccagctatctcatccgctggtctgactacaataggaagaagcagctcctccagcagctttcccaaataaaatatcaagacaccacagagccccgagatgttggtaatgcaatgaggtttgtgacccgcaacgtgttcaagcggacgtatgcaggagccaacgtgaggagagttgctgtgttttttagcaatggtcaaacagccagtaggtcatccatcatcacggccaccatggagtttagtgccctggatatcagtccaacagtctttgcttttgatgagagagttttccttgaagcttttgggtttgacaacactggaacatttcaggtgattccagttcctccaaatggggaaaatcaaacattagaaagacttcggcgctgtgcactttgctatgataaatgttttccaaatgcttgcattcgagaggctttcttacctgaagattcatacatggatgtagtcttcctcatagacaattctcggaatatagcaaaggatgagtttaaggctgtgaaagccttggtgagctcagtgattgacaacttcaacattgcttcagaccctttaatctcagactctggtgataggattgctttgttgagctattctccttgggaaagttccaggagaaagatgggtacagtaaaaacagagtttgatttcatcacttatgacaaccaactcctaatgaagaatcacatccagacttccttccaacagctaaatggagaagcaacaattggtcgtgccctactgtggaccactgaaaatctttttccagaaacaccctatctaagaaaacacaaggtcatctttgtggtctcagctggagaaaattatgagagaaaagaatttgtaaaaatgatggctttgagggctaagtgtcaaggctacgtcatatttgtgatttctctgggctctacacgtaaggatgacatggaggagttagccagctacccacttgatcaacacctgatacagcttgggagaatacataaaccagatctgaattatattgcgaagttcttaaagccatttttatactcggtcaggcggggattcaatcagtacccaccaccgatgcttgaggatgcctgtagactcatcaatttaggaggagagaatattcaaaatgatggtttccaatttgttactgagctacaagaggattttttgggaggtaatggcttcattggccaagaattaaattctgggagagaatcaccttttgtaaagacggaagacaatggaagtgactatttggtttaccttccaagccaaatgtttgagccacaaaaattaatgatcaattatgaaaaagatcaaaaatctgcagaaattgcaagtctcacttctggacatgaaaattatggcagaaaagaagaaccagatcatacttatgaacctggagatgtctctcttcaagaatattacatggatgtggctttcctcatagatgcttcccaaagagtaggaagtgatgagtttaaggaagtaaaagcttttataacctcagtgcttgattactttcacattgcccccactccactgacctccaccttaggagacagggttgctgtcctgagctactctcctccaggctatatgcctaacactgaagaatgccctgtctacctggaatttgatttggttacttataacagtatacaccaaatgaaacatcatctccaagactctcaacagctcaatggagatgtttttattggccatgccttgcagtggacaattgacaatgtctttgtaggaacccccaatctgaggaaaaacaaagttatctttgtaatatctgctggcgaaaccaactctttagacaaagacgtcttaaggaatgtgtctctgagagccaagtgtcaaggctactccatatttgtgttttcctttggccctaaacacaatgacaaagaattagaagaattagccagccaccctctggatcatcacttggtccaacttggccgaacccacaagccagattggaactatatcatcaagtttgtcaagccatttgtccatttaatcagacgtgccatcaacaaatatcccaccgaagatatgaaagccacatgtgttaacatgacctctcccaacccagagaacggtggcacagaaaacactgtattacttcttcctgggatatatgaaataaagacagaaaatggtgatctgtttgatgaatttgattcccaggcacaacatctccttgtattagggaacaatcatagtagtggttctgagacagctactgatttgatgcagaagttatatctgctcttttcaactgagaaactggcaatgaaagacaaggaaaaagcacatttagaagaaatttcagctctagtggttgataaacagcaagaaaaagaagataaggaaatggaagctacagacatctgaagcatcttacctaagaattcagtaattaatccaatactttcgtcatagtgattcatactctatgtttatagaacatggtgaagatacaaggtcatcataggagaaaagaagatagctccactgacatgtataatcccatgtggttctaaccagaatgtataatcatctgttagaggtactgtggtaaatgacagggacttttcacaaaaacaattggctaatagcatgctaaatttgttctccatctcaaatcttgaggagaagaattttcggagtgaagacatcagtaagaagacctgacaaaccaggaatgatttcatttctcctgagaactggggaaaccgacctataagagttaacttttctttgaaagctctgcacagttcaggcatcaattttgatgatgtatctgcctgtaaaagattgtcattattttcaacacatctgtatctcagattggactcctctaaaagcatttggaattggaatttcctaggaatatcttctactaattcttaaaactggaaagccatgcccatgtcatcggttctggggtgaccctaacatttcatctagcagtgattgtcttctaaaacccacctgtcaggctgctatgacccatagttaatgctttctcttcaccaggacattgacaaaagaatggaattggtgaaaaagaaaaaagtgataagaggctaattttatgaaccatattttttgctgtaatcttttgtttaaattttagcagctttgctttgtgtatactgaatttttgcagcaaaagaattacggaaaagcacagatactctatatgaccagagatgttcttgggaattacaatgtagcaagagataatttctaaaataaaaacaagtctgacttgg

SEQ ID NO: 121488 - DNA, 1770 bp, Homo sapiens
  Payload ID: 3823
  Gene Symbol: COL6A5
  Gene Name: collagen, type VI, alpha 5
  ENST ID: ENST00000373157
  CDS Start-End: 1-1674
attggtcgtgccctactgtggaccactgaaaatctttttccagaaacaccctatctaagaaaacacaaggtcatctttgtggtctcagctggagaaaattatgagagaaaagaatttgtaaaaatgatggctttgagggctaagtgtcaaggctacgtcatatttgtgatttctctgggctctacacgtaaggatgacatggaggagttagccagctacccacttgatcaacacctgatacagcttgggagaatacataaaccagatctgaattatattgcgaagttcttaaagccatttttatactcggtcaggcggggattcaatcagtacccaccaccgatgcttgaggatgcctgtagactcatcaatttaggaggagagaatattcaaaatgatggtttccaatttgttactgagctacaagaggattttttgggaggtaatggcttcattggccaagaattaaattctgggagagaatcaccttttgtaaagacggaagacaatggaagtgactatttggtttaccttccaagccaaatgtttgagccacaaaaattaatgatcaattatgaaaaagatcaaaaatctgcagaaattgcaagtctcacttctggacatgaaaattatggcagaaaagaagaaccagatcatacttatgaacctggagatgtctctcttcaagaatattacatggatgtggctttcctcatagatgcttcccaaagagtaggaagtgatgagtttaaggaagtaaaagcttttataacctcagtgcttgattactttcacattgcccccactccactgacctccaccttaggagacagggttgctgtcctgagctactctcctccaggctatatgcctaacactgaagaatgccctgtctacctggaatttgatttggttacttataacagtatacaccaaatgaaacatcatctccaagactctcaacagctcaatggagatgtttttattggccatgccttgcagtggacaattgacaatgtctttgtaggaacccccaatctgaggaaaaacaaagttatctttgtaatatctgctggcgaaaccaactctttagacaaagacgtcttaaggaatgtgtctctgagagccaagtgtcaaggctactccatatttgtgttttcctttggccctaaacacaatgacaaagaattagaagaattagccagccaccctctggatcatcacttggtccaacttggccgaacccacaagccagattggaactatatcatcaagtttgtcaagccatttgtccatttaatcagacgtgccatcaacaaatatcccaccgaagatatgaaagccacatgtgttaacatgacctctcccaacccagagaacggtggcacagaaaacactgtattacttcttcctgggatatatgaaataaagacagaaaatggtgatctgtttgatgaatttgattcccaggcacaacatctccttgtattagggaacaatcatagtagtggttctgagacagctactgatttgatgcagaagttatatctgctcttttcaactgagaaactggcaatgaaagacaaggaaaaagcacatttagaagaaatttcagctctagtggttgataaacagcaagaaaaagaagatggtgaagatacaaggtcatcataggagaaaagaagatagctccactgacatgtataatcccatgtggttctaaccagaatgtataatcatctgttagaggtactgtggtaaatgacaggg

SEQ ID NO: 121489 - DNA, 3138 bp, Homo sapiens
  Payload ID: 3823
  Gene Symbol: COL6A5
  Gene Name: collagen, type VI, alpha 5
  ENST ID: ENST00000512836
  CDS Start-End: 1-2335
agaaaaatgtccagcatatccaacagagctagtatttgctctggacaattcctacgatgtcacagaagagagctttaataaaacacgggacatcatcacttccattgtcaatgaccttaacatcagggaaaataactgtcctgtgggagcaagagttgccatggtttcctataactcaggcaccagctatctcatccgctggtctgactacaataggaagaagcagctcctccagcagctttcccaaataaaatatcaagacaccacagagccccgagatgttggtaatgcaatgaggtttgtgacccgcaacgtgttcaagcggacgtatgcaggagccaacgtgaggagagttgctgtgttttttagcaatggtcaaacagccagtaggtcatccatcatcacggccaccatggagtttagtgccctggatatcagtccaacagtctttgcttttgatgagagagttttccttgaagcttttgggtttgacaacactggaacatttcaggtgattccagttcctccaaatggggaaaatcaaacattagaaagacttcggcgctgtgcactttgctatgataaatgttttccaaatgcttgcattcgagaggctttcttacctgaagattcatacatggatgtagtcttcctcatagacaattctcggaatatagcaaaggatgagtttaaggctgtgaaagccttggtgagctcagtgattgacaacttcaacattgcttcagaccctttaatctcagactctggtgataggattgctttgttgagctattctccttgggaaagttccaggagaaagatgggtacagtaaaaacagagtttgatttcatcacttatgacaaccaactcctaatgaagaatcacatccagacttccttccaacagctaaatggagaagcaacaattggtcgtgccctactgtggaccactgaaaatctttttccagaaacaccctatctaagaaaacacaaggtcatctttgtggtctcagctggagaaaattatgagagaaaagaatttgtaaaaatgatggctttgagggctaagtgtcaaggctacgtcatatttgtgatttctctgggctctacacgtaaggatgacatggaggagttagccagctacccacttgatcaacacctgatacagcttgggagaatacataaaccagatctgaattatattgcgaagttcttaaagccatttttatactcggtcaggcggggattcaatcagtacccaccaccgatgcttgaggatgcctgtagactcatcaatttaggaggagagaatattcaaaatgatggtttccaatttgttactgagctacaagaggattttttgggaggtaatggcttcattggccaagaattaaattctgggagagaatcaccttttgtaaagacggaagacaatggaagtgactatttggtttaccttccaagccaaatgtttgagccacaaaaattaatgatcaattatgaaaaagatcaaaaatctgcagaaattgcaagtctcacttctggacatgaaaattatggcagaaaagaagaaccagatcatacttatgaacctggagatgtctctcttcaagaatattacatggatgtggctttcctcatagatgcttcccaaagagtaggaagtgatgagtttaaggaagtaaaagcttttataacctcagtgcttgattactttcacattgcccccactccactgacctccaccttaggagacagggttgctgtcctgagctactctcctccaggctatatgcctaacactgaagaatgccctgtctacctggaatttgatttggttacttataacagtatacaccaaatgaaacatcatctccaagactctcaacagctcaatggagatgtttttattggccatgccttgcagtggacaattgacaatgtctttgtaggaacccccaatctgaggaaaaacaaagttatctttgtaatatctgctggcgaaaccaactctttagacaaagacgtcttaaggaatgtgtctctgagagccaagtgtcaaggctactccatatttgtgttttcctttggccctaaacacaatgacaaagaattagaagaattagccagccaccctctggatcatcacttggtccaacttggccgaacccacaagccagattggaactatatcatcaagtttgtcaagccatttgtccatttaatcagacgtgccatcaacaaatatcccaccgaagatatgaaagccacatgtgttaacatgacctctcccaacccagagaacggtggcacagaaaacactgtattatggtgaagatacaaggtcatcataggagaaaagaagatagctccactgacatgtataatcccatgtggttctaaccagaatgtataatcatctgttagaggtactgtggtaaatgacagggacttttcacaaaaacaattggctaatagcatgctaaatttgttctccatctcaaatcttgaggagaagaattttcggagtgaagacatcagtaagaagacctgacaaaccaggaatgatttcatttctcctgagaactggggaaaccgacctataagagttaacttttctttgaaagctctgcacagttcaggcatcaattttgatgatgtatctgcctgtaaaagattgtcattattttcaacacatctgtatctcagattggactcctctaaaagcatttggaattggaatttcctaggaatatcttctactaattcttaaaactggaaagccatgcccatgtcatcggttctggggtgaccctaacatttcatctagcagtgattgtcttctaaaacccacctgtcaggctgctatgacccatagttaatgctttctcttcaccaggacattgacaaaagaatggaattggtgaaaaagaaaaaagtgataagaggctaattttatgaaccatattttttgctgtaatcttttgtttaaattttagcagctttgctttgtgtatactgaatttttgcagcaaaagaattacggaaaagcacagatactctatatgaccagagatgttcttgggaattacaatgtagcaagagataatttctaaaataaaaacaagtctgacttgg

SEQ ID NO: 121490 - DNA, 1780 bp, Homo sapiens
  Payload ID: 3823
  Gene Symbol: COL6A5
  Gene Name: collagen, type VI, alpha 5
  ENST ID: ENST00000512482
  CDS Start-End: 1-1332
aatcagtacccaccaccgatgcttgaggatgcctgtagactcatcaatttaggaggagagaatattcaaaatgatggtttccaatttgttactgagctacaagaggattttttgggaggtaatggcttcattggccaagaattaaattctgggagagaatcaccttttgtaaagacggaagacaatggaagtgactatttggtttaccttccaagccaaatgtttgagccacaaaaattaatgatcaattatgaaaaagatcaaaaatctgcagaaattgcaagtctcacttctggacatgaaaattatggcagaaaagaagaaccagatcatacttatgaacctggagatgtctctcttcaagaatattacatggatgtggctttcctcatagatgcttcccaaagagtaggaagtgatgagtttaaggaagtaaaagcttttataacctcagtgcttgattactttcacattgcccccactccactgacctccaccttaggagacagggttgctgtcctgagctactctcctccaggctatatgcctaacactgaagaatgccctgtctacctggaatttgatttggttacttataacagtatacaccaaatgaaacatcatctccaagactctcaacagctcaatggagatgtttttattggccatgccttgcagtggacaattgacaatgtctttgtaggaacccccaatctgaggaaaaacaaagttatctttgtaatatctgctggcgaaaccaactctttagacaaagacgtcttaaggaatgtgtctctgagagccaagtgtcaaggctactccatatttgtgttttcctttggccctaaacacaatgacaaagaattagaagaattagccagccaccctctggatcatcacttggtccaacttggccgaacccacaagccagattggaactatatcatcaagtttgtcaagccatttgtccatttaatcagacgtgccatcaacaaatatcccaccgaagatatgaaagccacatgtgttaacatgacctctcccaacccagagaacggtggcacagaaaacactgtattacttcttcctgggatatatgaaataaagacagaaaatggtgatctgtttgatgaatttgattcccaggcacaacatctccttgtattagggaacaatcatagtagtggttctgagacagctactgatttgatgcagaagttatatctgctcttttcaactgagaaactggcaatgaaagacaaggaaaaagcacatttagaagaaatttcagctctagtggttgataaacagcaagaaaaagaagatctctagccagcagcttgggttagttatatttggccagccctgctccctgaagccaatctgagtctcttcagaaaatatcagcttgtctttttcttgcactcatgaaagcttaatgactgagaatcactgagttgtactttgtctttttgcagataaggaaatggaagctacagacatctgaagcatcttacctaagaattcagtaattaatccaatactttcgtcatagtgattcatactctatgtttatagaacgtaagtttaccttaaagttaggccatgaaacagaaataatacaatctatctctgagttgttgaaaagttgaagatgatgcatataaagctcaaagtacacactatgcgtggaatataatcaactagtattatccctatttgaattatctaagtttgatcatctatttgacaattaaaaatataaatccattatatcaaa

SEQ ID NO: 121491 - DNA, 9581 bp, Homo sapiens
  Payload ID: 3824
  Gene Symbol: COL6A6
  Gene Name: collagen, type VI, alpha 6
  Uniprot ID: A6NMZ7
  ENST ID: ENST00000358511
  CDS Start-End: 32-6823
atttgaagttgaagatttttcaggtcataatatgatgttgctaattttgttcctcgtgataatttgttcccatatttctgtgaaccaagattccggccctgagtatgcagatgttgtgtttttggtggacagctctgatcgcctgggatccaagtccttcccatttgtgaaaatgttcatcaccaaaatgatcagcagtctccccatagaggccgacaaataccgtgtggccctggcccagtacagtgataaacttcacagtgaattccacctgagcaccttcaaaggcaggagccccatgctgaaccacctaaggaagaactttggattcattggcgggtccctgcagataggaaaggctcttcaggaggctcacaggacttatttctctgcacccgcaaatgggagagacaagaaacagtttcccccaattctagtggtcctggcttcatctgagtctgaggataatgtggaagaggcatcaaaggccctgcggaaagacggagtgaaaatcatctctgtaggggtgcagaaagcttctgaggaaaacctgaaggccatggccacgtctcagtttcatttcaaccttcggacagtcagagacctcagcatgttttcccaaaacatgacacacatcatcaaggatgtaataaagtacaaggagggagcagttgatgacatctttgtagaagcttgccaaggcccttctatggccgatgttgtgttcctattggatatgtcaatcaatggaagtgaggagaactttgactatcttaaaggattcttggaagaaagtgtatctgcccttgacataaaggaaaattgcatgagggttggccttgtggcctatagcaatgagacaaaagtgataaattcactgagcatgggcataaataagtcagaggttctccagcatatacagaacctttctccccgaactgggaaggcctatactggagctgccatcaaaaagctcaggaaggaagtttttagtgcacggaatggcagtcggaagaatcagggggtgccccagattgccgtgctggtgacccaccgagattcagaagacaacgtgacaaaagcagctgttaacctccgacgggagggtgtgaccatcttcaccctgggcatagagggcgccagcgacacccagttggaaaagatagcatcccaccctgctgagcagtatgtctccaaactgaagaccttcgctgacctggctgctcacaaccagacatttctgaagaagctgcggaaccaaataacacacacagtctctgtcttttcagagaggactgaaacgctcaaatctggttgtgtggacactgaggaagcagacatctatctgcttatcgatggctcagggagcacccaggccacagatttccatgaaatgaagacgttcctgtcagaggtggtagggatgttcaacattgctccccataaggtgcgggttggggccgttcagtatgctgacagctgggacttggaatttgagatcaataaatactccaacaagcaggatttgggaaaggccattgagaatatcaggcagatgggtgggaatacaaacacaggcgcagcactgaatttcacactgagtctgttgcaaaaagcaaagaagcagcgaggaaacaaagttccatgccaccttgttgtcctgacaaatggcatgtccaaggatagcatcttggagcctgcaaacagactgagagaagagcacatccgagtttatgctatcgggatcaaggaggccaaccaaacacagctgagagaaattgcaggagaggaaaagagagtgtattacgtgcatgactttgatgcattgaaagacataagaaaccaagttgttcaagaaatctgtactgaagaagcttgcaaagagatgaaagctgacatcatgtttctggtggacagttctggaagtataggacctgaaaacttcagcaaaatgaaaacatttatgaaaaacctggtgagcaagtctcagattggaccagatcgggtgcaaattggtgtagtccagttcagcgacatcaataaggaagagtttcagctcaacagattcatgtcccaaagcgacatttcaaatgcaatagaccaaatggctcacattggacaaaccaccctgactggtagtgccctgagctttgtgtctcagtacttcagccccaccaagggcgcccggcccaacatcagaaagtttctcatcctcatcacggatggtgaagctcaggacatagtaaaggaaccagcagtagtgcttcggcaagaaggtgtaatcatctattctgtgggagtgtttggctccaatgtcacccagcttgaggagatcagtgggaggcccgagatggttttttatgttgagaattttgacattctgcagcgcattgaagatgatcttgtttttggaatatgcagcccccgtgaagaatgcaagcggattgaagttttagacgttgtgtttgtcattgatagctctggcagtattgactatgatgagtataatatcatgaaggattttatgattggcttagtgaaaaaagctgatgtgggcaagaatcaggtccggtttggggctctgaagtatgctgatgacccagaggtgctgttttatctggatgactttggcacaaaactggaggtaatttcagtgctccagaatgaccaagccatgggtggcagtacttatactgctgaggcactgggcttctcagaccacatgttcactgaagcccggggcagccgcctgaacaagggggtcccccaagtcctcattgtgatcaccgatggggaatcccatgatgctgataaactcaatgccacggcaaaggccttgcgggacaaaggcattcttgtcctggctgtggggattgatggtgccaatcccgtggagctgttagccatggcaggatcaagcgacaagtacttcttcgtggagacttttggaggtctgaagggaatattttcagatgtgacagccagtgtctgcaactcttcaaaagtagattgtgaaattgacaaagtagatcttgttttccttatggatggttcaactagcattcagccaaatgacttcaagaaaatgaaggaatttctggcatctgttgttcaagactttgatgtcagcctcaacagagtgcgaataggagcggcccagtttagcgatacctatcacccggagtttccactgggaactttcataggtgaaaaagagatatcatttcagattgaaaacatcaagcagatctttggaaacacacacatcggtgctgcactcagggaggtggaacattacttcaggccagacatgggcagcaggataaatacaggtaccccacaggtgctgctggtccttacagatggccagtcccaagacgaggtggcccaggccgcggaagccctgagacacagaggtatcgacatctactccgtgggcattggggatgtggatgaccagcagctcattcagatcaccgggactgcagagaaaaaactgacagtgcacaacttcgatgaactgaagaaggtcaataaaaggatcgttcgcaacatctgtaccacagcgggtgaaagcaactgtttcgtggatgttgtggtgggatttgatgtctcaactcaggagaaagggcagactttgcttgaaggtcagccttggatggaaacctaccttcaagacatcttacgtgccatcagctccctcaatggagtaagctgtgaggtgggcacagagactcaggtcagtgtggcttttcaagtgaccaatgccatggaaaaatattctcccaagtttgagatctacagtgaaaacatactgaatagcttgaaggatataacagttaaaggaccatctcttctcaatgcaaacctcttggattctctatgggatacatttcagaataaatcagctgctcgaggaaaggtggtccttttattttcagatggattggatgatgatgttgagaaacttgaacaaaaatctgatgaacttagaaaagaaggcctgaatgccctcataactgttgctctggatggacctgctgattcaagtgacttggctgatcttccctatattgaatttgggaaaggatttgagtacaggacacagctctctattggcatgagagaacttggaagccggctgtcaaagcagctggtcaatgttgctgaaaggacatgctgctgtttgttctgcaagtgcattggaggagatggcacaatgggagatcctggaccaccagggaaaaggggacctccaggttttaaaggcagtgaaggctacctgggagaggagggaatcgctggagaaagaggagcccctggaccagtgggagagcaaggtactaagggatgctatggcaccaaaggtcctaagggaaacagaggactaaatggacaggagggagaagttggggaaaatggaattgacggattaaacggagaacagggtgataatggtcttcctggaagaaaaggagaaaagggagatgagggatctcagggaagcccagggaagagagggactcctggtgaccgtggagcaaagggcctgcgaggggatcccggagctcctggagttgacagtagcatagaaggacccacaggcttgaaaggagaacgtggaagacaaggcagaagaggctggccaggcccccccgggacaccaggctccagaagaaagacagcagctcatggcagaaggggacatacaggcccacagggaacagcaggcatcccaggaccagatggacttgaaggctccctgggacttaagggccctcagggcccaagaggagaggctggtgtgaaaggagaaaaaggaggtgtgggaagtaaaggtccccaggggcctccaggacccggaggagaggcagggaatcaaggccgtttgggaagccaaggaaataaaggagaacctggagatctgggagaaaaaggagctgttggctttcctggtcctcgtggcttgcagggcaatgatggcagtccaggttatggtagtgtcggacgcaagggagcaaagggacaagaaggattccctggagaaagtggacctaagggtgagattggggaccctggtggtccaggagagactgggctgaagggagctagaggcaaaatgatatctgctgggcttccaggagagatgggatcccctggggaaccaggacctcctggacgtaagggtgtgaaaggagccaaaggcttggcttcattttctacatgtgagctcattcagtatgtgcgagaccgcagtcctggcaggcatggaaaaccggaatgcccagtgcacccaaccgagttggtgtttgccctggaccactcccgggatgtcactgagcaggaatttgagcggatgaaggagatgatggctttcctggtgagagacattaaggtccgggagaacagctgccccgtgggagcgcacatcgccatcctctcctataactcccacgccaggcaccttgtgcgcttctcagacgcctacaagaagagtcaacttctcagagaaattgaaactattccttatgagagatcctctgccagcagggagattggcagagcaatgcggtttatttccaggaatgtcttcaagcggacgcttccgggggcacacacgagaaaaatcgccacatttttcagcagcggtcagtccgcggatgcccactccatcaccacggctgccatggagttcggcgcgcttgaaatcattcccgtggtgatcactttcagcaacgtgccctcggtcaggcgcgcatttgcgattgacgacactggcacatttcaagtaatagtggttccctccggggccgactacataccagcattagagagactccagcggtgcactttctgctatgatgtgtgcaagccagatgcttcttgtgaccaagccagaccaccccctgtgcagtcttacatggatgctgctttccttctggatgcctcccggaacatgggaagtgctgaatttgaagacataagagccttccttggagcactattagatcactttgaaatcaccccagagccggagacttctgtcactggagaccgggtggccctattgagccatgctccccccgacttcctacccaacactcagaagagtccagttagagctgagttcaatcttaccacctacagaagtaagcgcctcatgaagaggcatgtgcacgagtcagttaaacaactaaatggagatgcttttattggtcatgccttacagtggactctggacaatgtatttttaagtacacccaatctgagaagaaacaaagtcatatttgtgatatctgctggggaaaccagccacttagatggggaaatcttaaagaaggaatccttgcgagccaaatgtcagggatatgccttatttgtgttttcccttggccctatttgggatgacaaggaactggaggatctcgccagccaccctttggatcaccacctggtccagcttggccgaattcataaacctgaccacagttatggtgtgaagtttgtgaagtcctttataaactcaatcaggcgtgcaatcaacaaatatccaccaataaacttaaaaataaagtgcaacagacttaactctatagatccaaagcagcccccacgaccattccgaagctttgttcctggaccacttaaagctaccctcaaagaagatgtattacagaaggcaaaattctttcaagataaaaaatatctttcaagagtagcaagaagtggcagagatgatgctattcaaaattttatgagaagcacctcccatacctttaagaatggaaggatgatagaaagtgctcccaaacaacatgattaaaaaaatgcttgaacaacttagccttaggaagcatggtaagactctggacttaaatagtaactaaatctgctgccagaactcaagcaacagtttgtaggttatcaggtgacttgaccccctgcattcattggtattaagatatatcttgttcatttatttgaccactcctgacaattccagcactctacgactgatatgtcgaagaactgtttcattagaagacagaagaatgaaagaagtgttttgaaaagtctaatggagatataatttgaaggtaaaatttatatgatgtatgcatatgtgtacatgggtcaatgttaattcttttatctctgtccagttcattttctgcaaacccatcctcctttcctaatttagtaatgtctaatgctcatctatttagtcaaagttattttttaatgttttaagctactccaaaatttatcctagaaatggatgctgtttatatgtcgtatttttttaaaacgtgaccttctattccacttaaacacaccactgtgggagttgtttgcttggactgatgagaagagggtaattttctccatctctaaatcctcctgaactcactgaaaaactcattaattcccgcagaacataaattattgcttttgagctggaagttttctcttcattaggaagcttactgccattttgatggagcttgaagcccccattttgatggacttctagtctgtctttcctgttatggtcatttattaattttcactaatccatatattctttagacaaggagagtcaagaaactacttgtcatagatgaagctctgagttacttttacccatcaggtagctgtttagtcaataataaacagcaccaaaacaggattagcagagctcttaaaaacagccttaaatacacactgagtttagaaaaatgtaagaaaatcattgttttaatctacaaattcatatgcagttgcagagatgcaaaagagatcagagtaagttaaagtaggaaaggttttataaaagtattgatggctgtgtcctcatctgcatttttgtttttatgatagggctgatattttcaacaacgaaacacccaatgttcagaccttacctcagtctaagagctggctccacagttggtagcaatggccctgttaggcagactgtccccctctttgggaatggaaagaagccctgcctggatgcatggagcagatggatactgacaccaaggacattcagattttctttcctatacctattttcataaaatttggaaagaaaaactatctgcagtatttttttaaaacgacttctgctattcttacttagagaaatccagtgatagcacctcatgtcttcagaggagcaagaagttcaaggagttaaatgtcacattcatactcaggtaatagagaagaataaaacacatcaggtttgcttcatctatcctaagtggtgcttaggggttcagaaaaaatgtttcaagtacaggaaattaatgagcaatatttacaatgtattttaataaaagggatttttctagttaactctgagttaagcacgaactcctttcttttgttaattgttggaaataccattaagatgtatttgtctgtttttctgcattggcaagtaaagaacataaaacaaatattcccttggtgacagattatttttagtattttgggccatcttttgaatcactaataggtgagagctctaaagcatgctgcaaatagaagttcctttttaaaaatccctaatattagtattttccctgatttacctctttctcctaaaagtggaaacagcaaaaattaagttgaatataaatttaataaagctatatttaacccaagaatcacacaagccaggatgcttcttggtttaaaaatgtgaattaatcgactgtaaaggaactgcctcccattatctctgcactgagctatgaatcaaactttttttttttaagtagaggtcaaaaggagatgcaacttaacacggcatcagattgtaatacttagaattcaaccaaataacttttttttaaaactggggcttttctgtggggcaaggggacagagaagaatgggtggtagcaggagataaggggagaaaaggatcatatctctgtcagcccactccatttttttttcttagcacttcccatatttatcagtcttacagcttatctatctaatggctccaggctgaagtccaatctcagcattacagtttatatagcaaaaaaaattttccccaacccccttggagactctaaatctgacttagtagctagaaaccctgtaaatatggtcttagcagacattaagggaaacaaagccaaggcaacatgacaatgccaaatttgcaatttctaccaatccactaagctatcaggcctagttagtccatcattcctaactttgacatttctgaacgactggcattttctgacagttttgttgtttacctgtctaaaaactaagtacagttggctctgtatctgtgggtgttccacatccatgaattcaaccgtggataaaaaatattcagaaaaagaaggatggttgtgtctgtactgaacatgtacagacatttttcttttcattctctaaacaatagagtataacaactatttagcatttacagtgtattatgtatcgcaagtgacctagaaataatttgaagtatatgagaagatgtgtgtagattatatgcaaatacaacgtcattttatgtaagagactagagcatctgtggg

SEQ ID NO: 121492 - DNA, 778 bp, Homo sapiens
  Payload ID: 3824
  Gene Symbol: COL6A6
  Gene Name: collagen, type VI, alpha 6
  ENST ID: ENST00000511332
  CDS Start-End: 1-778
tgaccaatgccatggaaaaatattctcccaagtttgagatctacagtgaaaacatactgaatagcttgaaggatataacagttaaaggaccatctcttctcaatgcaaacctcttggattctctatgggatacatttcagaataaatcagctgctcgaggaaaggtggtccttttattttcagatggattggatgatgatgttgagaaacttgaacaaaaatctgatgaacttagaaaagaaggcctgaatgccctcataactgttgctctggatggacctgctgattcaagtgacttggctgatcttccctatattgaatttgggaaaggatttgagtacaggacacagctctctattggcatgagagaacttggaagccggctgtcaaagcagctggtcaatgttgctgaaaggacatgctgctgtttgttctgcaagtgcattggaggagatggcacaatgggagatcctggaccaccagggaaaaggcttcatgtaaagagagtggtagatttttttaaaaaacaaggctcagaaagaatggaaagaaagggacctccaggttttaaaggcagtgaaggctacctgggagaggagggaatcgctggagaaagaggagcccctggaccagtgggagagcaaggtactaagggatgctatggcaccaaaggtcctaagggaaacagaggactaaatggacaggagggagaagttggggaaaatggaattgacggattaaacggagaacagggtgataatggtcttcctggaagaaa

SEQ ID NO: 121493 - DNA, 4353 bp, Homo sapiens
  Payload ID: 3824
  Gene Symbol: COL6A6
  Gene Name: collagen, type VI, alpha 6
  ENST ID: ENST00000506143
  CDS Start-End: 1-895
cctcaatggagtaagctgtgaggtgggcacagagactcaggtcagtgtggcttttcaagtgaccaatgccatggaaaaatattctcccaagtttgagatctacagtgaaaacatactgaatagcttgaaggatataacagttaaaggaccatctcttctcaatgcaaacctcttggattctctatgggatacatttcagaataaatcagctgctcgaggaaaggtggtccttttattttcagatggattggatgatgatgttgagaaacttgaacaaaaatctgatgaacttagaaaagaaggcctgaatgccctcataactgttgctctggatggacctgctgattcaagtgacttggctgatcttccctatattgaatttgggaaaggatttgagtacaggacacagctctctattggcatgagagaacttggaagccggctgtcaaagcagctggtcaatgttgctgaaaggacatgctgctgtttgttctgcaagtgcattggaggagatggcacaatgggagatcctggaccaccagggaaaaggggacctccaggttttaaaggcagtgaaggctacctgggagaggagggaatcgctggagaaagaggagcccctggaccagtgggagagcaaggtactaagggatgctatggcaccaaaggtcctaagggaaacagaggactaaatggacaggagggagaagttggggaaaatggaattgacggattaaacggagaacagggtgataatggtcttcctggaagaaaaggagaaaagggagatgagggatctcagggaagcccagggaagagagggactcctggtgaccgtggagcaaagggcctgcgaggggatcccgtaagtgcacgggctgcaaactggagttagggcttgattcccatccgtacttctgatagggagtctcgatttcaagggagctcctggagttgacagtagcatagaaggacccacaggcttgaaaggagaacgtggaagacaaggcagaagaggctggccaggcccccccgggacaccaggctccagaagaaagacagcagctcatggcagaaggggacatacaggcccacagggaacagcaggcatcccaggaccagatggacttgaaggctccctgggacttaagggccctcagggcccaagaggagaggctggtgtgaaaggagaaaaaggaggtgtgggaagtaaaggtccccaggggcctccaggacccggaggagaggcagggaatcaaggccgtttgggaagccaaggaaataaaggagaacctggagatctgggagaaaaaggagctgttggctttcctggtcctcgtggcttgcagggcaatgatggcagtccaggttatggtagtgtcggacgcaagggagcaaagggacaagaaggattccctggagaaagtggacctaagggtgagattggggaccctggtggtccaggagagactgggctgaagggagctagaggcaaaatgatatctgctgggcttccaggagagatgggatcccctggggaaccaggacctcctggacgtaagggtgtgaaaggagccaaaggcttggcttcattttctacatgtgagctcattcagtatgtgcgagaccgcagtcctggcaggcatgattgacgacactggcacatttcaagtaatagtggttccctccggggccgactacataccagcattagagagactccagcggtgcactttctgctatgatgtgtgcaagccagatgcttcttgtgaccaagccagaccaccccctgtgcagtcttacatggatgctgctttccttctggatgcctcccggaacatgggaagtgctgaatttgaagacataagagccttccttggagcactattagatcactttgaaatcaccccagagccggagacttctgtcactggagaccgggtggccctattgagccatgctccccccgacttcctacccaacactcagaagagtccagttagagctgagttcaatcttaccacctacagaagtaagcgcctcatgaagaggcatgtgcacgagtcagttaaacaactaaatggagatgcttttattggtcatgccttacagtggactctggacaatgtatttttaagtacacccaatctgagaagaaacaaagtcatatttgtgatatctgctggggaaaccagccacttagatggggaaatcttaaagaaggaatccttgcgagccaaatgtcagggatatgccttatttgtgttttcccttggccctatttgggatgacaaggaactggaggatctcgccagccaccctttggatcaccacctggtccagcttggccgaattcataaacctgaccacagttatggtgtgaagtttgtgaagtcctttataaactcaatcaggcgtgcaatcaacaaatatccaccaataaacttaaaaataaagtgcaacagacttaactctatagatccaaagcagcccccacgaccattccgaagctttgttcctggaccacttaaagctaccctcaaagaagatgtattacagaaggcaaaattctttcaagataaaaaatatctttcaagagtagcaagaagtggcagagatgatgctattcaaaattttatgagaagcacctcccatacctttaagaatggaaggatgatagaaagtgctcccaaacaacatgattaaaaaaatgcttgaacaacttagccttaggaagcatggtaagactctggacttaaatagtaactaaatctgctgccagaactcaagcaacagtttgtaggttatcaggtgacttgaccccctgcattcattggtattaagatatatcttgttcatttatttgaccactcctgacaattccagcactctacgactgatatgtcgaagaactgtttcattagaagacagaagaatgaaagaagtgttttgaaaagtctaatggagatataatttgaaggtaaaatttatatgatgtatgcatatgtgtacatgggtcaatgttaattcttttatctctgtccagttcattttctgcaaacccatcctcctttcctaatttagtaatgtctaatgctcatctatttagtcaaagttattttttaatgttttaagctactccaaaatttatcctagaaatggatgctgtttatatgtcgtatttttttaaaacgtgaccttctattccacttaaacacaccactgtgggagttgtttgcttggactgatgagaagagggtaattttctccatctctaaatcctcctgaactcactgaaaaactcattaattcccgcagaacataaattattgcttttgagctggaagttttctcttcattaggaagcttactgccattttgatggagcttgaagcccccattttgatggacttctagtctgtctttcctgttatggtcatttattaattttcactaatccatatattctttagacaaggagagtcaagaaactacttgtcatagatgaagctctgagttacttttacccatcaggtagctgtttagtcaataataaacagcaccaaaacaggattagcagagctcttaaaaacagccttaaatacacactgagtttagaaaaatgtaagaaaatcattgttttaatctacaaattcatatgcagttgcagagatgcaaaagagatcagagtaagttaaagtaggaaaggttttataaaagtattgatggctgtgtcctcatctgcatttttgtttttatgatagggctgatattttcaacaacgaaacacccaatgttcagaccttacctcagtctaagagctggctccacagttggtagcaatggccctgttaggcagactgtccccctctttgggaatggaaagaagccctgcctggatgcatggagcagatggatactgacaccaaggacattcagattttctttcctatacctattttcataaaatttggaaagaaaaactatctgcagtatttttttaaaacgacttctgctattcttacttagagaaatccagtgatagcacctcatgtcttcagaggagcaagaagttcaaggagttaaatgtcacattcatactcaggtaatagagaagaataaaacacatcaggtttgcttcatctatcctaagtggtgcttaggggttcagaaaaaatgtttcaagtacaggaaattaatgagcaatatttacaatgtattttaataaaagggatttttctagttaactctgagttaagcacgaactcctttcttttgttaattgttggaaataccattaagatgtatttgtctgtttttctgcattggcaagtaaagaacataaaacaaata

SEQ ID NO: 121494 - DNA, 9276 bp, Homo sapiens
  Payload ID: 3825
  Gene Symbol: COL7A1
  Gene Name: collagen, type VII, alpha 1
  Uniprot ID: Q02388
  ENST ID: ENST00000328333
  CDS Start-End: 109-8943
gcaagaccaggactcgggctggaggggcgctgggctcggacctgccaaggccacgggggagcaagggacagaggcgggggtcctagctgacggcttttactgcctaggatgacgctgcggcttctggtggccgcgctctgcgccgggatcctggcagaggcgccccgagtgcgagcccagcacagggagagagtgacctgcacgcgcctttacgccgctgacattgtgttcttactggatggctcctcatccattggccgcagcaatttccgcgaggtccgcagctttctcgaagggctggtgctgcctttctctggagcagccagtgcacagggtgtgcgctttgccacagtgcagtacagcgatgacccacggacagagttcggcctggatgcacttggctctgggggtgatgtgatccgcgccatccgtgagcttagctacaaggggggcaacactcgcacaggggctgcaattctccatgtggctgaccatgtcttcctgccccagctggcccgacctggtgtccccaaggtctgcatcctgatcacagacgggaagtcccaggacctggtggacacagctgcccaaaggctgaaggggcagggggtcaagctatttgctgtggggatcaagaatgctgaccctgaggagctgaagcgagttgcctcacagcccaccagtgacttcttcttcttcgtcaatgacttcagcatcttgaggacactactgcccctcgtttcccggagagtgtgcacgactgctggtggcgtgcctgtgacccgacctccggatgactcgacctctgctccacgagacctggtgctgtctgagccaagcagccaatccttgagagtacagtggacagcggccagtggccctgtgactggctacaaggtccagtacactcctctgacggggctgggacagccactgccgagtgagcggcaggaggtgaacgtcccagctggtgagaccagtgtgcggctgcggggtctccggccactgaccgagtaccaagtgactgtgattgccctctacgccaacagcatcggggaggctgtgagcgggacagctcggaccactgccctagaagggccggaactgaccatccagaataccacagcccacagcctcctggtggcctggcggagtgtgccaggtgccactggctaccgtgtgacatggcgggtcctcagtggtgggcccacacagcagcaggagctgggccctgggcagggttcagtgttgctgcgtgacttggagcctggcacggactatgaggtgaccgtgagcaccctatttggccgcagtgtggggcccgccacttccctgatggctcgcactgacgcttctgttgagcagaccctgcgcccggtcatcctgggccccacatccatcctcctttcctggaacttggtgcctgaggcccgtggctaccggttggaatggcggcgtgagactggcttggagccaccgcagaaggtggtactgccctctgatgtgacccgctaccagttggatgggctgcagccgggcactgagtaccgcctcacactctacactctgctggagggccacgaggtggccacccctgcaaccgtggttcccactggaccagagctgcctgtgagccctgtaacagacctgcaagccaccgagctgcccgggcagcgggtgcgagtgtcctggagcccagtccctggtgccacccagtaccgcatcattgtgcgcagcacccagggggttgagcggaccctggtgcttcctgggagtcagacagcattcgacttggatgacgttcaggctgggcttagctacactgtgcgggtgtctgctcgagtgggtccccgtgagggcagtgccagtgtcctcactgtccgccgggagccggaaactccacttgctgttccagggctgcgggttgtggtgtcagatgcaacgcgagtgagggtggcctggggacccgtccctggagccagtggatttcggattagctggagcacaggcagtggtccggagtccagccagacactgcccccagactctactgccacagacatcacagggctgcagcctggaaccacctaccaggtggctgtgtcggtactgcgaggcagagaggagggccctgctgcagtcatcgtggctcgaacggacccactgggcccagtgaggacggtccatgtgactcaggccagcagctcatctgtcaccattacctggaccagggttcctggcgccacaggatacagggtttcctggcactcagcccacggcccagagaaatcccagttggtttctggggaggccacggtggctgagctggatggactggagccagatactgagtatacggtgcatgtgagggcccatgtggctggcgtggatgggccccctgcctctgtggttgtgaggactgcccctgagcctgtgggtcgtgtgtcgaggctgcagatcctcaatgcttccagcgacgttctacggatcacctgggtaggggtcactggagccacagcttacagactggcctggggccggagtgaaggcggccccatgaggcaccagatactcccaggaaacacagactctgcagagatccggggtctcgaaggtggagtcagctactcagtgcgagtgactgcacttgtcggggaccgcgagggcacacctgtctccattgttgtcactacgccgcctgaggctccgccagccctggggacgcttcacgtggtgcagcgcggggagcactcgctgaggctgcgctgggagccggtgcccagagcgcagggcttccttctgcactggcaacctgagggtggccaggaacagtcccgggtcctggggcccgagctcagcagctatcacctggacgggctggagccagcgacacagtaccgcgtgaggctgagtgtcctagggccagctggagaagggccctctgcagaggtgactgcgcgcactgagtcacctcgtgttccaagcattgaactacgtgtggtggacacctcgatcgactcggtgactttggcctggactccagtgtccagggcatccagctacatcctatcctggcggccactcagaggccctggccaggaagtgcctgggtccccgcagacacttccagggatctcaagctcccagcgggtgacagggctagagcctggcgtctcttacatcttctccctgacgcctgtcctggatggtgtgcggggtcctgaggcatctgtcacacagacgccagtgtgcccccgtggcctggcggatgtggtgttcctaccacatgccactcaagacaatgctcaccgtgcggaggctacgaggagggtcctggagcgtctggtgttggcacttgggcctcttgggccacaggcagttcaggttggcctgctgtcttacagtcatcggccctccccactgttcccactgaatggctcccatgaccttggcattatcttgcaaaggatccgtgacatgccctacatggacccaagtgggaacaacctgggcacagccgtggtcacagctcacagatacatgttggcaccagatgctcctgggcgccgccagcacgtaccaggggtgatggttctgctagtggatgaacccttgagaggtgacatattcagccccatccgtgaggcccaggcttctgggcttaatgtggtgatgttgggaatggctggagcggacccagagcagctgcgtcgcttggcgccgggtatggactctgtccagaccttcttcgccgtggatgatgggccaagcctggaccaggcagtcagtggtctggccacagccctgtgtcaggcatccttcactactcagccccggccagagccctgcccagtgtattgtccaaagggccagaagggggaacctggagagatgggcctgagaggacaagttgggcctcctggcgaccctggcctcccgggcaggaccggtgctcccggcccccaggggccccctggaagtgccactgccaagggcgagaggggcttccctggagcagatgggcgtccaggcagccctggccgcgccgggaatcctgggacccctggagcccctggcctaaagggctctccagggttgcctggccctcgtggggacccgggagagcgaggacctcgaggcccaaagggggagccgggggctcccggacaagtcatcggaggtgaaggacctgggcttcctgggcggaaaggggaccctggaccatcgggcccccctggacctcgtggaccactgggggacccaggaccccgtggccccccagggcttcctggaacagccatgaagggtgacaaaggcgatcgtggggagcggggtccccctggaccaggtgaaggtggcattgctcctggggagcctgggctgccgggtcttcccggaagccctggaccccaaggccccgttggcccccctggaaagaaaggagaaaaaggtgactctgaggatggagctccaggcctcccaggacaacctgggtctccgggtgagcagggcccacggggacctcctggagctattggccccaaaggtgaccggggctttccagggcccctgggtgaggctggagagaagggcgaacgtggacccccaggcccagcgggatcccgggggctgccaggggttgctggacgtcctggagccaagggtcctgaagggccaccaggacccactggccgccaaggagagaagggggagcctggtcgccctggggaccctgcagtggtgggacctgctgttgctggacccaaaggagaaaagggagatgtggggcccgctgggcccagaggagctaccggagtccaaggggaacggggcccacccggcttggttcttcctggagaccctggccccaagggagaccctggagaccggggtcccattggccttactggcagagcaggacccccaggtgactcagggcctcctggagagaagggagaccctgggcggcctggccccccaggacctgttggcccccgaggacgagatggtgaagttggagagaaaggtgacgagggtcctccgggtgacccgggtttgcctggaaaagcaggcgagcgtggccttcggggggcacctggagttcgggggcctgtgggtgaaaagggagaccagggagatcctggagaggatggacgaaatggcagccctggatcatctggacccaagggtgaccgtggggagccgggtcccccaggacccccgggacggctggtagacacaggacctggagccagagagaagggagagcctggggaccgcggacaagagggtcctcgagggcccaagggtgatcctggcctccctggagcccctggggaaaggggcattgaagggtttcggggacccccaggcccacagggggacccaggtgtccgaggcccagcaggagaaaagggtgaccggggtccccctgggctggatggccggagcggactggatgggaaaccaggagccgctgggccctctgggccgaatggtgctgcaggcaaagctggggacccagggagagacgggcttccaggcctccgtggagaacagggcctccctggcccctctggtccccctggattaccgggaaagccaggcgaggatggcaaacctggcctgaatggaaaaaacggagaacctggggaccctggagaagacgggaggaagggagagaaaggagattcaggcgcctctgggagagaaggtcgtgatggccccaagggtgagcgtggagctcctggtatccttggaccccaggggcctccaggcctcccagggccagtgggccctcctggccagggttttcctggtgtcccaggaggcacgggccccaagggtgaccgtggggagactggatccaaaggggagcagggcctccctggagagcgtggcctgcgaggagagcctggaagtgtgccgaatgtggatcggttgctggaaactgctggcatcaaggcatctgccctgcgggagatcgtggagacctgggatgagagctctggtagcttcctgcctgtgcccgaacggcgtcgaggccccaagggggactcaggcgaacagggccccccaggcaaggagggccccatcggctttcctggagaacgcgggctgaagggcgaccgtggagaccctggccctcaggggccacctggtctggcccttggggagaggggcccccccgggccttccggccttgccggggagcctggaaagcctggtattcccgggctcccaggcagggctgggggtgtgggagaggcaggaaggccaggagagaggggagaacggggagagaaaggagaacgtggagaacagggcagagatggccctcctggactccctggaacccctgggccccccggaccccctggccccaaggtgtctgtggatgagccaggtcctggactctctggagaacagggaccccctggactcaagggtgctaagggggagccgggcagcaatggtgaccaaggtcccaaaggagacaggggtgtgccaggcatcaaaggagaccggggagagcctggaccgaggggtcaggacggcaacccgggtctaccaggagagcgtggtatggctgggcctgaagggaagccgggtctgcagggtccaagaggcccccctggcccagtgggtggtcatggagaccctggaccacctggtgccccgggtcttgctggccctgcaggaccccaaggaccttctggcctgaagggggagcctggagagacaggacctccaggacggggcctgactggacctactggagctgtgggacttcctggaccccccggcccttcaggccttgtgggtccacaggggtctccaggtttgcctggacaagtgggggagacagggaagccgggagccccaggtcgagatggtgccagtggaaaagatggagacagagggagccctggtgtgccagggtcaccaggtctgcctggccctgtcggacctaaaggagaacctggccccacgggggcccctggacaggctgtggtcgggctccctggagcaaagggagagaagggagcccctggaggccttgctggagacctggtgggtgagccgggagccaaaggtgaccgaggactgccagggccgcgaggcgagaagggtgaagctggccgtgcaggggagcccggagaccctggggaagatggtcagaaaggggctccaggacccaaaggtttcaagggtgacccaggagtcggggtcccgggctcccctgggcctcctggccctccaggtgtgaagggagatctgggcctccctggcctgcccggtgctcctggtgttgttgggttcccgggtcagacaggccctcgaggagagatgggtcagccaggccctagtggagagcggggtctggcaggccccccagggagagaaggaatcccaggacccctggggccacctggaccaccggggtcagtgggaccacctggggcctctggactcaaaggagacaagggagaccctggagtagggctgcctgggccccgaggcgagcgtggggagccaggcatccggggtgaagatggccgccccggccaggagggaccccgaggactcacggggccccctggcagcaggggagagcgtggggagaagggtgatgttgggagtgcaggactaaagggtgacaagggagactcagctgtgatcctggggcctccaggcccacggggtgccaagggggacatgggtgaacgagggcctcggggcttggatggtgacaaaggacctcggggagacaatggggaccctggtgacaagggcagcaagggagagcctggtgacaagggctcagccgggttgccaggactgcgtggactcctgggaccccagggtcaacctggtgcagcagggatccctggtgacccgggatccccaggaaaggatggagtgcctggtatccgaggagaaaaaggagatgttggcttcatgggtccccggggcctcaagggtgaacggggagtgaagggagcctgtggccttgatggagagaagggagacaagggagaagctggtcccccaggccgccccgggctggcaggacacaaaggagagatgggggagcctggtgtgccgggccagtcgggggcccctggcaaggagggcctgatcggtcccaagggtgaccgaggctttgacgggcagccaggccccaagggtgaccagggcgagaaaggggagcggggaaccccaggaattgggggcttcccaggccccagtggaaatgatggctctgctggtcccccagggccacctggcagtgttggtcccagaggccccgaaggacttcagggccagaagggtgagcgaggtccccccggagagagagtggtgggggctcctggggtccctggagctcctggcgagagaggggagcaggggcggccagggcctgccggtcctcgaggcgagaagggagaagctgcactgacggaggatgacatccggggctttgtgcgccaagagatgagtcagcactgtgcctgccagggccagttcatcgcatctggatcacgacccctccctagttatgctgcagacactgccggctcccagctccatgctgtgcctgtgctccgcgtctctcatgcagaggaggaagagcgggtaccccctgaggatgatgagtactctgaatactccgagtattctgtggaggagtaccaggaccctgaagctccttgggatagtgatgacccctgttccctgccactggatgagggctcctgcactgcctacaccctgcgctggtaccatcgggctgtgacaggcagcacagaggcctgtcacccttttgtctatggtggctgtggagggaatgccaaccgttttgggacccgtgaggcctgcgagcgccgctgcccaccccgggtggtccagagccaggggacaggtactgcccaggactgaggcccagataatgagctgagattcagcatcccctggaggagtcggggtctcagcagaaccccactgtccctccccttggtgctagaggcttgtgtgcacgtgagcgtgcgtgtgcacgtccgttatttcagtgacttggtcccgtgggtctagccttcccccctgtggacaaacccccattgtggctcctgccaccctggcagatgactcactgtgggggggtggctgtgggcagtgagcggatgtgactggcgtctgacccgccccttgacccaagcctgtgatgacatggtgctgattctggggggcattaaagctgctgttttaaaaggc

SEQ ID NO: 121495 - DNA, 597 bp, Homo sapiens
  Payload ID: 3825
  Gene Symbol: COL7A1
  Gene Name: collagen, type VII, alpha 1
  ENST ID: ENST00000422991
  CDS Start-End: 79-597
cctgctctacccgggagtggacgtgttggggttcccctctgagcgcccgtgtgtccgcactcacgtctgtggagccagatgtctgcactcgcgtgtgggctccctgtgcctgtgccatgcctgaactcccacctgtctatgggtcagaaaggggctccaggacccaaaggtttcaagggtgacccaggagtcggggtcccgggctcccctgggcctcctggccctccaggtgtgaagggagatctgggcctccctggcctgcccggtgctcctggtgttgttgggttcccgggtcagacaggccctcgaggagagatgggtcagccaggccctagtggagagcggggtctggcaggccccccagggagagaaggaatcccaggacccctggggccacctggaccaccggggtcagtgggaccacctggggcctctggactcaaaggagacaagggagaccctggagtagggctgcctgggccccgaggcgagcgtggggagccaggcatccggggtgaagatggccgccccggccaggagggaccccgaggactcacggggccccctggcagcaggggagagcgtggggagaagggt

SEQ ID NO: 121496 - DNA, 5705 bp, Homo sapiens
  Payload ID: 3826
  Gene Symbol: COL8A1
  Gene Name: collagen, type VIII, alpha 1
  Uniprot ID: P27658
  ENST ID: ENST00000261037
  CDS Start-End: 381-2615
agagaagagtgtccagctcctccagaggctgcccgcccgccgctccttccctgcccacctactatgaggagcagctcctcccacctgcccataaaagccaagtgcatgttaccagcagcggatcacagcccttccccgatcctctccgtgggagccagcgagcctctctccctgatcttacgtgctcaagggagctcacacgttcaccaactcacccttgaagtcatctcaagaacaaaagacaactgaaagaagctgttgtgaaggcagagcagcatctgctgaagagacagaaaccagccccagaggtgtcacaggaaggcaccagcaaggacattggtctttgatttgattcagcagtcctgtcaagtataaatgtgatggctgtgctgcctggccctctgcagctgctgggagtgctgcttaccatttccctgagttccatcaggctcattcaggctggtgcctactatgggatcaagccgctgccacctcaaattcctcctcagatgccaccacaaattccacaataccagcccctgggtcagcaagtacctcacatgcctttggccaaagatggccttgccatgggcaaggagatgccccacttgcagtatggcaaagagtatccacacctaccccaatatatgaaggaaattcaaccggcgccaagaatgggcaaggaagccgtacccaagaaaggcaaagaaataccattagccagtttacgaggggaacaaggtccccgtggagagcctggcccaagaggaccacctgggccccctggtttgccaggtcatgggatacctggaattaaaggaaaaccagggccacagggatatccaggagttggaaagccaggtatgcctggaatgccagggaagccaggagccatgggcatgcctggggcaaaaggagaaattggacagaaaggggaaattgggcctatggggatcccaggaccacaaggacctccagggcctcatggacttcctggcattgggaagccaggtgggccagggttaccagggcaaccaggaccaaagggtgatcgaggacccaaaggactaccaggacctcaaggccttcggggtcctaaaggagacaagggcttcgggatgccaggtgcgccaggtgtaaaggggcctccagggatgcacggccctcccggccctgttggactgccaggagtgggcaaaccaggagtgacaggcttccctgggccccagggccccctgggaaagccaggggctccaggagaacctgggccacaaggccctattggggtaccgggggttcaaggacctcctgggatacccggaattggaaagccaggccaggatgggatcccaggccagccaggatttccaggtggcaaaggggagcaaggactgccagggctaccaggacccccaggccttccagggattgggaaaccaggcttcccaggacccaaaggtgaccggggcatgggaggtgttcctggggctcttggaccaagaggggagaaaggaccaataggtgccccaggaatagggggtcctccaggagagccaggcctgcctggaatcccaggtcctatgggccctccaggtgctattggttttcctggacccaaaggagaaggtgggattgtagggccacaggggccaccaggtcccaagggtgagccagggcttcaaggcttcccaggaaagccaggtttccttggtgaagtagggcctcctggcatgaggggtttgccaggtcccatagggcccaagggggaagctgggcaaaaaggtgtaccaggactccctggtgttccagggcttctcggacctaagggagagccaggaatcccaggggatcagggtttacagggccccccaggtatcccagggattgggggccctagtggccccattggaccacctgggattccaggccccaaaggggagccgggcctcccagggccccctgggttccctggtatagggaaacccggagtggcaggacttcatggccccccagggaagcctggtgcccttggtcctcaaggccagcctggccttccaggacccccaggccctccaggacctccaggacccccagctgtgatgccccctacaccaccaccccagggagagtatctgccagatatggggctgggaattgatggcgtgaaacccccccatgcctacggggctaagaaaggcaagaatggagggccagcctatgagatgcctgcatttaccgccgagctaaccgcacctttcccaccggtgggggccccagtgaagtttaacaaactgctgtataacggcagacagaactacaacccgcagacaggcatcttcacctgtgaggtccctggtgtctactactttgcataccacgttcactgcaaggggggcaacgtgtgggttgctctattcaagaacaacgagcccgtgatgtacacgtacgacgagtacaaaaagggcttcctggaccaggcatctgggagtgcagtgctgctgctcaggcccggagaccgggtgttcctccagatgccctcagaacaggctgcaggactgtatgccgggcagtatgtccactcctccttttcaggatatttattgtatcccatgtaaaaacaaaaaaacaaaaaacaaagaaaagaaagagattttatagaagaaaatgacacaccaaaaaatccaaatgaaaaacataattgcttcaaaacacttacacagttggaaagttatatgtaagtgaaaatttggaccattgtgtacaaataaaaactaagatgcatgtttaatactccacacagcagcctgtaattgcgaatgatgggatagagttatgtatcaagtactgacacttggttgtacccactggaatcatattagctgttttatgttatatgcttccacagtaacctgcttattcagatcagtcaaaatatatcagtatgaaagatcatagctaatgaaaggcactcactcatattgtttactttaaaatatttataaatatgccttaaagaaatacaaatgataacaattacataccgtatttacttgcttaatttcctctgtatttgtgtagatactttgacatggaatatatggtggggagacccgtagtgttaccgccccagtgggagggggccctggggaccctggtaatgctttagtcaaagggatatctctcttgtatcagaggctgtgtcttttagtaacaggagtcctcgtcagaattgcgtgtctgttgtctctaaaagaatgggtgaaccaatcggcctttgtgaatttattcagtgccttctctgtaccaagcactgggtaaggcacttttgtggagcattagacagtaaccctcaaggagctagagaaccggatgggagacatgagcagtaattaactcacttgttccccagagtttctatttgttttgattttctttttctgtgacttattttcctattttctttcctccatgtaattttcactatggcccaactaatataaacacctggaaattacaaggaaaaaaaattcttcctctaataactttccaaatttgtggaatatttatttgtaatagcagttatcagttatgcttatatagcattaaaaattctcctcctttgactacacacacaaccacagtgtggttctaatcatggagatatcagtaatttttagtaactgaattttgaggacatttctctgtttagcatgtatgcaaactgatatgtaatctgaggttccaaagtcaatttttttcttttttttttgagatggagtcttactctgtcacccaggctggagtgcagtagcacgatcttggcttactgcaacctctacctcctaggttcaagcaattgtcctgtctcagcctcccgagtactgggactactgtcttgcgccaccatgcctggctaatttttgtatatttagtaaagatgggttttcgccatgttggccaggctggtctcaaactcctggcctcaagtgatgcacctgcctcagccttccaaagtgctgggattacaggcatgagccaccgtgcccggccaaagtcagctttcaaaatccaagccataattggtgaggggggagtttcagaattacatagaaaaattaatatttgaaaaaataattctgaaatttcgaatttaaaaacagatgtgctgcttctgggtgtaggtagtaaaagtataggaaaagaactgtttccttagaagcggactgtggaagggctatgtagaatgtcaaagggcaacaagagcctgtgtttttaatgtcatcctgtactcggcacaaatcaaaggccaatacaagtctgaaaagcagaaataaatatttttccaggtttttgcttgggcacatactaactgctttgggcattctaatctggtctccaaacaccaaagacccatttcgagcctgctattagcctgctgctgactctatcacttggagcaataatgtggggttatggtggtggaatcttgtatatttttgtcaaaaataaaaccatgagttaaggggatagatatagatggaaaaatacacaaataaatacggtatgaaaacacatggaaatgtgtctttgtcaaatctgaatcattattaccatcacaaaaattcttctcttggccaatatctcatttccctatatagtatacaagcaccatttcttctcaatttttaagaagagaaattagtccattaccacaggggttcttgtcactactaattatacaacaatcttttcccaacaaaaagatgtcctccacaacctttgttttcaaagcagacagcatctatgtggccaaatatactttgggttgttcttgaggatactggttttgggctgatgactatggtgggcagcatggatccattgggctccttctgctaaacagccacattgaaatggtttaaaagcaagtcagatcaggtgatttgtaaaattgtatttatctgtacatgtatgggcttttaattcccaccaagaaagagagaaattatctttttagttaaaaccaaatttcacttttcaaaatatcttccaacttatttattggttgtcactcaattgcctatatatatatatatatgtgtgtgtgtgtgtgtgtgcgcgtgagcgcacgtgtgtgtatgcgtgcgcatgtgtgtgtatgtgtattatcagacataggtttctaacttttagatagaagaggagcaacatctatgccaaatactgtgcattctacaatggtgctaatctcagacctaaatgatactccatttaatttaaaaaagagttttaaataattatctatgtgcctgtatttcccttttgagtgctgcacaacatgttaacatattagtgtaaaagcagatgaaacaaccacgtgttctaaagtctagggattgtgctataatccctatttagttcaaaattaaccagaattcttccatgtgaaatggaccaaactcatattattgttatgtaaatacagagttttaatgcagtatgacatcccacaggggaaaagaatgtctgtagtgggtgactgttatcaaatattttatagaatacaatgaacggtgaacagactggtaacttgtttgagttcccatgacagatttgagacttgtcaatagcaaatcatttttgtatttaaatttttgtactgatttgaaaaacatcattaaatatctttaaaagtatgtttctca

SEQ ID NO: 121497 - DNA, 3029 bp, Homo sapiens
  Payload ID: 3826
  Gene Symbol: COL8A1
  Gene Name: collagen, type VIII, alpha 1
  Uniprot ID: P27658
  ENST ID: ENST00000273342
  CDS Start-End: 198-2432
atcacagcccttccccgatcctctccgtgggagccagcgagcctctctccctgatcttacgtgctcaagaagctgttgtgaaggcagagcagcatctgctgaagagacagaaaccagccccagaggtgtcacaggaaggcaccagcaaggacattggtctttgatttgattcagcagtcctgtcaagtataaatgtgatggctgtgctgcctggccctctgcagctgctgggagtgctgcttaccatttccctgagttccatcaggctcattcaggctggtgcctactatgggatcaagccgctgccacctcaaattcctcctcagatgccaccacaaattccacaataccagcccctgggtcagcaagtacctcacatgcctttggccaaagatggccttgccatgggcaaggagatgccccacttgcagtatggcaaagagtatccacacctaccccaatatatgaaggaaattcaaccggcgccaagaatgggcaaggaagccgtacccaagaaaggcaaagaaataccattagccagtttacgaggggaacaaggtccccgtggagagcctggcccaagaggaccacctgggccccctggtttgccaggtcatgggatacctggaattaaaggaaaaccagggccacagggatatccaggagttggaaagccaggtatgcctggaatgccagggaagccaggagccatgggcatgcctggggcaaaaggagaaattggacagaaaggggaaattgggcctatggggatcccaggaccacaaggacctccagggcctcatggacttcctggcattgggaagccaggtgggccagggttaccagggcaaccaggaccaaagggtgatcgaggacccaaaggactaccaggacctcaaggccttcggggtcctaaaggagacaagggcttcgggatgccaggtgcgccaggtgtaaaggggcctccagggatgcacggccctcccggccctgttggactgccaggagtgggcaaaccaggagtgacaggcttccctgggccccagggccccctgggaaagccaggggctccaggagaacctgggccacaaggccctattggggtaccgggggttcaaggacctcctgggatacccggaattggaaagccaggccaggatgggatcccaggccagccaggatttccaggtggcaaaggggagcaaggactgccagggctaccaggacccccaggccttccagggattgggaaaccaggcttcccaggacccaaaggtgaccggggcatgggaggtgttcctggggctcttggaccaagaggggagaaaggaccaataggtgccccaggaatagggggtcctccaggagagccaggcctgcctggaatcccaggtcctatgggccctccaggtgctattggttttcctggacccaaaggagaaggtgggattgtagggccacaggggccaccaggtcccaagggtgagccagggcttcaaggcttcccaggaaagccaggtttccttggtgaagtagggcctcctggcatgaggggtttgccaggtcccatagggcccaagggggaagctgggcaaaaaggtgtaccaggactccctggtgttccagggcttctcggacctaagggagagccaggaatcccaggggatcagggtttacagggccccccaggtatcccagggattgggggccctagtggccccattggaccacctgggattccaggccccaaaggggagccgggcctcccagggccccctgggttccctggtatagggaaacccggagtggcaggacttcatggccccccagggaagcctggtgcccttggtcctcaaggccagcctggccttccaggacccccaggccctccaggacctccaggacccccagctgtgatgccccctacaccaccaccccagggagagtatctgccagatatggggctgggaattgatggcgtgaaacccccccatgcctacggggctaagaaaggcaagaatggagggccagcctatgagatgcctgcatttaccgccgagctaaccgcacctttcccaccggtgggggccccagtgaagtttaacaaactgctgtataacggcagacagaactacaacccgcagacaggcatcttcacctgtgaggtccctggtgtctactactttgcataccacgttcactgcaaggggggcaacgtgtgggttgctctattcaagaacaacgagcccgtgatgtacacgtacgacgagtacaaaaagggcttcctggaccaggcatctgggagtgcagtgctgctgctcaggcccggagaccgggtgttcctccagatgccctcagaacaggctgcaggactgtatgccgggcagtatgtccactcctccttttcaggatatttattgtatcccatgtaaaaacaaaaaaacaaaaaacaaagaaaagaaagagattttatagaagaaaatgacacaccaaaaaatccaaatgaaaaacataattgcttcaaaacacttacacagttggaaagttatatgtaagtgaaaatttggaccattgtgtacaaataaaaactaagatgcatgtttaatactccacacagcagcctgtaattgcgaatgatgggatagagttatgtatcaagtactgacacttggttgtacccactggaatcatattagctgttttatgttatatgcttccacagtaacctgcttattcagatcagtcaaaatatatcagtatgaaagatcatagctaatgaaaggcactcactcatattgtttactttaaaatatttataaatatgccttaaagaaatacaaatgataacaattacataccgtatttacttgcttaatttcctctgtatttgtgtagatactttgacatggaatatatggtggggagacccgtagtgttaccgccccagtgggagggggccctggggaccctggtaatgctttagtcaaagggatatctctcttgtatcagaggctgtgtcttttagtaac

SEQ ID NO: 121498 - DNA, 659 bp, Homo sapiens
  Payload ID: 3826
  Gene Symbol: COL8A1
  Gene Name: collagen, type VIII, alpha 1
  ENST ID: ENST00000452013
  CDS Start-End: 319-659
agagaagagtgtccagctcctccagaggctgcccgcccgccgctccttccctgcccacctactatgaggagcagctcctcccacctgcccataaaagccaagtgcatgttaccagcagcggatcacagcccttccccgatcctctccgtgggagccagcgagcctctctccctgatcttacgtgctcaagaagctgttgtgaaggcagagcagcatctgctgaagagacagaaaccagccccagaggtgtcacaggaaggcaccagcaaggacattggtctttgatttgattcagcagtcctgtcaagtataaatgtgatggctgtgctgcctggccctctgcagctgctgggagtgctgcttaccatttccctgagttccatcaggctcattcaggctggtgcctactatgggatcaagccgctgccacctcaaattcctcctcagatgccaccacaaattccacaataccagcccctgggtcagcaagtacctcacatgcctttggccaaagatggccttgccatgggcaaggagatgccccacttgcagtatggcaaagagtatccacacctaccccaatatatgaaggaaattcaaccggcgccaagaatgggcaaggaagccgtacccaagaaaggcaaagaaataccattagc

SEQ ID NO: 121499 - DNA, 948 bp, Homo sapiens
  Payload ID: 3826
  Gene Symbol: COL8A1
  Gene Name: collagen, type VIII, alpha 1
  ENST ID: ENST00000621757
  CDS Start-End: 342-948
gtgggagccagcgagcctctctccctgatcttacgtgctcaaggatccagtttcacctatggaatgagaaagttggggaagaagtcatctagcgtcttgctactcaaagtgtggtccatggaccagcagcatcagcatcacctgggatcttcttggaagaaatgtagaaactcaggcctcaccccagaatctgcctttttataagacccccagaagctgttgtgaaggcagagcagcatctgctgaagagacagaaaccagccccagaggtgtcacaggaaggcaccagcaaggacattggtctttgatttgattcagcagtcctgtcaagtataaatgtgatggctgtgctgcctggccctctgcagctgctgggagtgctgcttaccatttccctgagttccatcaggctcattcaggctggtgcctactatgggatcaagccgctgccacctcaaattcctcctcagatgccaccacaaattccacaataccagcccctgggtcagcaagtacctcacatgcctttggccaaagatggccttgccatgggcaaggagatgccccacttgcagtatggcaaagagtatccacacctaccccaatatatgaaggaaattcaaccggcgccaagaatgggcaaggaagccgtacccaagaaaggcaaagaaataccattagccagtttacgaggggaacaaggtccccgtggagagcctggcccaagaggaccacctgggccccctggtttgccaggtcatgggatacctggaattaaaggaaaaccagggccacagggatatccaggagttggaaagccaggtatgcctggaatgccagggaagccaggagccatgggcatgcctggggcaaaaggagaaattggacagaaaggggaaattgggcctatggggatcccaggaccacaaggacctccagggcctcatg

SEQ ID NO: 121500 - DNA, 4447 bp, Homo sapiens
  Payload ID: 3827
  Gene Symbol: COL8A2
  Gene Name: collagen, type VIII, alpha 2
  Uniprot ID: P25067
  ENST ID: ENST00000303143
  CDS Start-End: 8-2119
ggacgccatgctggggactctgacacccctgtcttcgctgctgctgctgctactggtgctggtgctggggtgtgggccgcgggcgtcctctggtggcggggccggtggggcggcgggctatgccccagtgaagtacatccagcccatgcagaaaggacctgtgggaccgcccttccgtgagggcaaaggccagtacctggaaatgcctctaccgctgctgccgatggacctgaagggagagcccggcccccctgggaagcccgggcctcggggtccccctggcccccctggcttcccaggaaaaccaggcatgggaaagccaggactccatgggcagcctggccctgctgggccccctggcttctcccggatgggcaaggctggtcccccagggctccctggcaaggtcgggccaccagggcagccggggcttcggggggagccaggaatacgaggggaccagggcctccggggacccccaggaccccctggcctcccgggcccctcaggcattactatccctggaaaaccaggtgcccaaggggtgccagggcccccaggattccagggggaaccagggccccagggggagcctgggcccccaggtgatcgaggcctcaagggggataatggagtgggccagcccgggctgcctggggccccagggcaggggggtgcccccggcccccccggcctccctggtccagctggcttaggcaaacctggtttggatgggcttcctggggccccaggagacaagggtgagtctgggcctcctggagttccaggccccaggggggagccaggagctgtgggcccaaaaggacctcctggagtagacggtgtgggagtcccaggggcagcagggttgccaggaccacagggcccatcaggggccaaaggggagccagggacccggggcccccctgggctgataggccccactggctatgggatgccaggactgccaggccccaagggggacaggggcccagctggggtcccaggactcttgggggacaggggtgagccaggggaggatggggagccaggggagcagggcccacagggtcttgggggtccccctggacttcctgggtctgcagggcttcctggcagacgtgggccccctgggcctaagggtgaggcagggcctggaggacccccaggagtgcctggcattcgaggtgaccaggggcctagtggcctggctgggaaaccaggggtcccaggtgagaggggacttcctggggcccatggaccccctggaccaactgggcccaagggtgagccgggtttcacgggtcgccctggaggaccaggggtggcaggagccctggggcagaaaggtgacttggggctccctgggcagcctggcctgaggggtccctcaggaatcccaggactccagggtccagctggccctattgggccccaaggcctgccgggcctgaagggggaaccaggcctgccagggccccctggagaggggagagcaggggaacctggcacggctgggcccacggggcccccaggggtccctggctcccctggaatcacgggccctccggggcctcccgggcccccgggaccccctggtgcccctggggccttcgatgagactggcatcgcaggcttgcacctgcccaacggcggtgtggagggtgccgtgctgggcaaggggggcaagccacagtttgggctgggcgagctgtctgcccatgccacaccggccttcactgcggtgctcacctcgcccttccccgcctcgggcatgcccgtgaaatttgaccggactctctacaatggccacagcggctacaacccagccactggcatcttcacctgccctgtgggcggcgtctactactttgcttaccatgtgcacgtcaagggcaccaacgtgtgggtggccctgtacaagaacaacgtgccggccacctatacctacgatgagtacaagaagggctacctggaccaggcatctggtggggccgtgctccagctgcggcccaacgaccaggtctgggtgcagatgccgtcggaccaggccaacggcctctactccacggagtacatccactcctccttttcaggattcttgctctgccccacataacccgcggggggggtcctgctgccctggcctcctcccctttagtggtagagcgaccttttcaattacaaagaacctcctggaaaaaaaaacaaaagctgaacagaggcggccgtggccttggcccgaggagactaacttgctttctccctgcatgcaggctgagattgtttctggaaggggctggcctgagtttctttcccccaaatgtctgtgcagtgtcagggctgcaccccataggccctgaggcacacagcccagccccttgtgagtcctggcctctgctgggccctgaaggagctgagagggagctcaactccccaccccgccacgtggggagacagcccttcccactggctccctgatggcacctgctggaggaaaggggcacggcctccctcacagcccttggctggggctcctccagctccccctgggacctccagcatatgacagtggactaaggactgtggggttttcctccaaggggaagggagaagaggggaccatcgaggtggcgagtgtggacaccctgccaggactgcagcccccatggtgatgctgtggcatcagacatgtccgtggtgggcacagtgcctgttgccctgggaaagggcaacctccctttcactgctccagtggcagccatggggaaggcagtttgtgagggcttggggcacagacctggggcaggaggcagctcttcacgttcatccctgtctctcccgggctgcccccgccagctctggctgtttagcttgagggcagcacagaggcccctgggacacctacaggccagaaagatcaacctctgtgaagtgtctagaagtatctagtgcagatggtggcggaggcagaatcgaccatcagcaaacatgagcactcttccctttctccccttccacctgctgcgggctgggctggttttctcaatacaaaattgtaagaggatccttgtcaccccagccaggtatccccaaggcagagcacctctcgtttggccctctgaacaaggtgcacgcgagctgggggatgaagacggctcccacttccttttccttaataagaaccatatggtgggtgtatgtgtgtacaagaggggttcatctgtgggggcttcctctccttccaccctctggttccaatttcctgttctaagcaggactagggcccaggaggctaaggctgggagagaaagggtgccaacaggtcccttgggaatgagttggctctggacgtttctgccctgttccccgatcagagctcctctgcaggaaacaggcaggatgcccctcccaacccctcagtccctacgtcaagcggagtggataaggctgagatgagtgctgggagtggtggacattcctgctcgtgcaaagatggccactttccccgcagctgcagggcctcgcgctcggccctcgccaggccagccccactccttgtaccaagtgtgaactggggtcattcggtctgtgatctcgttgcactgctccaagtctggctgtgtccaggcggtccatgttgaaaatggaggatggctgctgacttctgactggctgagcagtgggttccttcaggttccttgccaaccctcctcccctgcccacaacttctccaaacaaagcaggctgtttgctcacttcttcaaaaggaggaatgataacccaaatctgcccaagtgacacttgagaaggttttggctggggttcctggtggatttcttactacctaacgcccaagaaaaccaactaaggactctcaaaccatacctggtgggggttcttcgctcaacctcttcttccctaggtcaaagccactatcatctgatgtgttagggatgggttctgattggcagaaattaatcagctcccaatgggagcccacggaactaagtagggtcccaagaaaaaaaacgggagctatttcacagagctgagcttctgccaaatttcattcctcaaacctttcaggaggggtggttggcgtttctaaaatgtttatgggatttgagttgcaggtgtccacttaactgactagctttgataaacaatgtcagattttaactatgaaaacgacattaccttgtgcatttttatattgattcctattttttttttaagattaaagtttaaatgttttccactagtcatttcacttctaacttggtataggaagcttagctctctacatacctatcatgtgccctgtatcacagaagattcaggaaaaatgcacttgggaatcaaagaaaatggaacttctttttgaaaagacaagcaaccatgttaactgtattgacacatcctcaataaaacctgttgtataaaa

SEQ ID NO: 121501 - DNA, 4670 bp, Homo sapiens
  Payload ID: 3827
  Gene Symbol: COL8A2
  Gene Name: collagen, type VIII, alpha 2
  Uniprot ID: P25067
  ENST ID: ENST00000397799
  CDS Start-End: 226-2337
tccggcagccgcgaggggcggccggcagagcgacgcggaaccccgccggcgcggaccccggaccccaacgccgcccgcccagccgcggacgcccctgcccggagccctcgccgcccgggccgccctcgagggccgggagcggcgcccggcggccgcgcccgcaggccctgcctctgctggaaccttcccaggcccctccgacctgaaagcacgtccacggacgccatgctggggactctgacacccctgtcttcgctgctgctgctgctactggtgctggtgctggggtgtgggccgcgggcgtcctctggtggcggggccggtggggcggcgggctatgccccagtgaagtacatccagcccatgcagaaaggacctgtgggaccgcccttccgtgagggcaaaggccagtacctggaaatgcctctaccgctgctgccgatggacctgaagggagagcccggcccccctgggaagcccgggcctcggggtccccctggcccccctggcttcccaggaaaaccaggcatgggaaagccaggactccatgggcagcctggccctgctgggccccctggcttctcccggatgggcaaggctggtcccccagggctccctggcaaggtcgggccaccagggcagccggggcttcggggggagccaggaatacgaggggaccagggcctccggggacccccaggaccccctggcctcccgggcccctcaggcattactatccctggaaaaccaggtgcccaaggggtgccagggcccccaggattccagggggaaccagggccccagggggagcctgggcccccaggtgatcgaggcctcaagggggataatggagtgggccagcccgggctgcctggggccccagggcaggggggtgcccccggcccccccggcctccctggtccagctggcttaggcaaacctggtttggatgggcttcctggggccccaggagacaagggtgagtctgggcctcctggagttccaggccccaggggggagccaggagctgtgggcccaaaaggacctcctggagtagacggtgtgggagtcccaggggcagcagggttgccaggaccacagggcccatcaggggccaaaggggagccagggacccggggcccccctgggctgataggccccactggctatgggatgccaggactgccaggccccaagggggacaggggcccagctggggtcccaggactcttgggggacaggggtgagccaggggaggatggggagccaggggagcagggcccacagggtcttgggggtccccctggacttcctgggtctgcagggcttcctggcagacgtgggccccctgggcctaagggtgaggcagggcctggaggacccccaggagtgcctggcattcgaggtgaccaggggcctagtggcctggctgggaaaccaggggtcccaggtgagaggggacttcctggggcccatggaccccctggaccaactgggcccaagggtgagccgggtttcacgggtcgccctggaggaccaggggtggcaggagccctggggcagaaaggtgacttggggctccctgggcagcctggcctgaggggtccctcaggaatcccaggactccagggtccagctggccctattgggccccaaggcctgccgggcctgaagggggaaccaggcctgccagggccccctggagaggggagagcaggggaacctggcacggctgggcccacggggcccccaggggtccctggctcccctggaatcacgggccctccggggcctcccgggcccccgggaccccctggtgcccctggggccttcgatgagactggcatcgcaggcttgcacctgcccaacggcggtgtggagggtgccgtgctgggcaaggggggcaagccacagtttgggctgggcgagctgtctgcccatgccacaccggccttcactgcggtgctcacctcgcccttccccgcctcgggcatgcccgtgaaatttgaccggactctctacaatggccacagcggctacaacccagccactggcatcttcacctgccctgtgggcggcgtctactactttgcttaccatgtgcacgtcaagggcaccaacgtgtgggtggccctgtacaagaacaacgtgccggccacctatacctacgatgagtacaagaagggctacctggaccaggcatctggtggggccgtgctccagctgcggcccaacgaccaggtctgggtgcagatgccgtcggaccaggccaacggcctctactccacggagtacatccactcctccttttcaggattcttgctctgccccacataacccgcggggggggtcctgctgccctggcctcctcccctttagtggtagagcgaccttttcaattacaaagaacctcctggaaaaaaaaacaaaagctgaacagaggcggccgtggccttggcccgaggagactaacttgctttctccctgcatgcaggctgagattgtttctggaaggggctggcctgagtttctttcccccaaatgtctgtgcagtgtcagggctgcaccccataggccctgaggcacacagcccagccccttgtgagtcctggcctctgctgggccctgaaggagctgagagggagctcaactccccaccccgccacgtggggagacagcccttcccactggctccctgatggcacctgctggaggaaaggggcacggcctccctcacagcccttggctggggctcctccagctccccctgggacctccagcatatgacagtggactaaggactgtggggttttcctccaaggggaagggagaagaggggaccatcgaggtggcgagtgtggacaccctgccaggactgcagcccccatggtgatgctgtggcatcagacatgtccgtggtgggcacagtgcctgttgccctgggaaagggcaacctccctttcactgctccagtggcagccatggggaaggcagtttgtgagggcttggggcacagacctggggcaggaggcagctcttcacgttcatccctgtctctcccgggctgcccccgccagctctggctgtttagcttgagggcagcacagaggcccctgggacacctacaggccagaaagatcaacctctgtgaagtgtctagaagtatctagtgcagatggtggcggaggcagaatcgaccatcagcaaacatgagcactcttccctttctccccttccacctgctgcgggctgggctggttttctcaatacaaaattgtaagaggatccttgtcaccccagccaggtatccccaaggcagagcacctctcgtttggccctctgaacaaggtgcacgcgagctgggggatgaagacggctcccacttccttttccttaataagaaccatatggtgggtgtatgtgtgtacaagaggggttcatctgtgggggcttcctctccttccaccctctggttccaatttcctgttctaagcaggactagggcccaggaggctaaggctgggagagaaagggtgccaacaggtcccttgggaatgagttggctctggacgtttctgccctgttccccgatcagagctcctctgcaggaaacaggcaggatgcccctcccaacccctcagtccctacgtcaagcggagtggataaggctgagatgagtgctgggagtggtggacattcctgctcgtgcaaagatggccactttccccgcagctgcagggcctcgcgctcggccctcgccaggccagccccactccttgtaccaagtgtgaactggggtcattcggtctgtgatctcgttgcactgctccaagtctggctgtgtccaggcggtccatgttgaaaatggaggatggctgctgacttctgactggctgagcagtgggttccttcaggttccttgccaaccctcctcccctgcccacaacttctccaaacaaagcaggctgtttgctcacttcttcaaaaggaggaatgataacccaaatctgcccaagtgacacttgagaaggttttggctggggttcctggtggatttcttactacctaacgcccaagaaaaccaactaaggactctcaaaccatacctggtgggggttcttcgctcaacctcttcttccctaggtcaaagccactatcatctgatgtgttagggatgggttctgattggcagaaattaatcagctcccaatgggagcccacggaactaagtagggtcccaagaaaaaaaacgggagctatttcacagagctgagcttctgccaaatttcattcctcaaacctttcaggaggggtggttggcgtttctaaaatgtttatgggatttgagttgcaggtgtccacttaactgactagctttgataaacaatgtcagattttaactatgaaaacgacattaccttgtgcatttttatattgattcctattttttttttaagattaaagtttaaatgttttccactagtcatttcacttctaacttggtataggaagcttagctctctacatacctatcatgtgccctgtatcacagaagattcaggaaaaatgcacttgggaatcaaagaaaatggaacttctttttgaaaagacaagcaaccatgttaactgtattgacacatcctcaataaaacctgttgtataaaacagca

SEQ ID NO: 121502 - DNA, 2036 bp, Homo sapiens
  Payload ID: 3827
  Gene Symbol: COL8A2
  Gene Name: collagen, type VIII, alpha 2
  ENST ID: ENST00000481785
  CDS Start-End: 58-1974
ggacgccatgctggggactctgacacccctgtcttcgctgctgctgctgctactgaaatgcctctaccgctgctgccgatggacctgaagggagagcccggcccccctgggaagcccgggcctcggggtccccctggcccccctggcttcccaggaaaaccaggcatgggaaagccaggactccatgggcagcctggccctgctgggccccctggcttctcccggatgggcaaggctggtcccccagggctccctggcaaggtcgggccaccagggcagccggggcttcggggggagccaggaatacgaggggaccagggcctccggggacccccaggaccccctggcctcccgggcccctcaggcattactatccctggaaaaccaggtgcccaaggggtgccagggcccccaggattccagggggaaccagggccccagggggagcctgggcccccaggtgatcgaggcctcaagggggataatggagtgggccagcccgggctgcctggggccccagggcaggggggtgcccccggcccccccggcctccctggtccagctggcttaggcaaacctggtttggatgggcttcctggggccccaggagacaagggtgagtctgggcctcctggagttccaggccccaggggggagccaggagctgtgggcccaaaaggacctcctggagtagacggtgtgggagtcccaggggcagcagggttgccaggaccacagggcccatcaggggccaaaggggagccagggacccggggcccccctgggctgataggccccactggctatgggatgccaggactgccaggccccaagggggacaggggcccagctggggtcccaggactcttgggggacaggggtgagccaggggaggatggggagccaggggagcagggcccacagggtcttgggggtccccctggacttcctgggtctgcagggcttcctggcagacgtgggccccctgggcctaagggtgaggcagggcctggaggacccccaggagtgcctggcattcgaggtgaccaggggcctagtggcctggctgggaaaccaggggtcccaggtgagaggggacttcctggggcccatggaccccctggaccaactgggcccaagggtgagccgggtttcacgggtcgccctggaggaccaggggtggcaggagccctggggcagaaaggtgacttggggctccctgggcagcctggcctgaggggtccctcaggaatcccaggactccagggtccagctggccctattgggccccaaggcctgccgggcctgaagggggaaccaggcctgccagggccccctggagaggggagagcaggggaacctggcacggctgggcccacggggcccccaggggtccctggctcccctggaatcacgggccctccggggcctcccgggcccccgggaccccctggtgcccctggggccttcgatgagactggcatcgcaggcttgcacctgcccaacggcggtgtggagggtgccgtgctgggcaaggggggcaagccacagtttgggctgggcgagctgtctgcccatgccacaccggccttcactgcggtgctcacctcgcccttccccgcctcgggcatgcccgtgaaatttgaccggactctctacaatggccacagcggctacaacccagccactggcatcttcacctgccctgtgggcggcgtctactactttgcttaccatgtgcacgtcaagggcaccaacgtgtgggtggccctgtacaagaacaacgtgccggccacctatacctacgatgagtacaagaagggctacctggaccaggcatctggtggggccgtgctccagctgcggcccaacgaccaggtctgggtgcagatgccgtcggaccaggccaacggcctctactccacggagtacatccactcctccttttcaggattcttgctctgccccacataacccgcggggggggtcctgctgccctggcctcctcccctttagtggtagagcgaccttttcaa

SEQ ID NO: 121503 - DNA, 1353 bp, Homo sapiens
  Payload ID: 3827
  Gene Symbol: COL8A2
  Gene Name: collagen, type VIII, alpha 2
  ENST ID: ENST00000615990
  CDS Start-End: 8-1291
ggacgccatgctggggactctgacacccctgtcttcgctgctgctgctgctactggtgctggtgctggggtgtgggccgcgggcgtcctctggtggcggggccggtggggcggcgggctatgccccagtgaagtacatccagcccatgcagaaaggacctgtgggaccgcccttccgtgagggcaaaggccagtacctggaaatgcctctaccgctgctgccgatggacctgaagggagagcccggcccccctgggaagcccgggcctcggggtccccctggcccccctggcttcccaggaaaaccaggcatgggaaagccaggactccatgggcagcctggccctgctgggccccctggcttctcccggatgggcaaggctggtcccccagggctccctggcaaggtcgggccaccagggcagccggggcttcggggggagccaggaatacgaggggaccagggcctccggggacccccaggaccccctggcctcccgggcccctcaggcattactatccctggaaaaccaggtgcccaaggggtgccagggcccccaggattccagggggaaccagggccccagggggagcctgggcccccaggtgatcgaggcctcaagggggataatggagtgggccagcccgggctgcctggggccccagggcaggggggtgcccccggcccccccggcctccctggtccagctggcttaggcaaacctggtttggatgggcttcctggggccccaggagacaagggtgagtctgggcctcctggggccttcgatgagactggcatcgcaggcttgcacctgcccaacggcggtgtggagggtgccgtgctgggcaaggggggcaagccacagtttgggctgggcgagctgtctgcccatgccacaccggccttcactgcggtgctcacctcgcccttccccgcctcgggcatgcccgtgaaatttgaccggactctctacaatggccacagcggctacaacccagccactggcatcttcacctgccctgtgggcggcgtctactactttgcttaccatgtgcacgtcaagggcaccaacgtgtgggtggccctgtacaagaacaacgtgccggccacctatacctacgatgagtacaagaagggctacctggaccaggcatctggtggggccgtgctccagctgcggcccaacgaccaggtctgggtgcagatgccgtcggaccaggccaacggcctctactccacggagtacatccactcctccttttcaggattcttgctctgccccacataacccgcggggggggtcctgctgccctggcctcctcccctttagtggtagagcgaccttttcaa

SEQ ID NO: 121504 - DNA, 3289 bp, Homo sapiens
  Payload ID: 3828
  Gene Symbol: COL10A1
  Gene Name: collagen, type X, alpha 1
  Uniprot ID: Q03692
  ENST ID: ENST00000243222
  CDS Start-End: 97-2139
caccttctgcactgctcatctgggcagaggaagcttcagaaagctgccaaggcaccatctccaggaactcccagcacgcagaatccatctgagaatatgctgccacaaataccctttttgctgctagtatccttgaacttggttcatggagtgttttacgctgaacgataccaaatgcccacaggcataaaaggcccactacccaacaccaagacacagttcttcattccctacaccataaagagtaaaggtatagcagtaagaggagagcaaggtactcctggtccaccaggccctgctggacctcgagggcacccaggtccttctggaccaccaggaaaaccaggctacggaagtcctggactccaaggagagccagggttgccaggaccaccgggaccatcagctgtagggaaaccaggtgtgccaggactcccaggaaaaccaggagagagaggaccatatggaccaaaaggagatgttggaccagctggcctaccaggaccccggggcccaccaggaccacctggaatccctggaccggctggaatttctgtgccaggaaaacctggacaacagggacccacaggagccccaggacccaggggctttcctggagaaaagggtgcaccaggagtccctggtatgaatggacagaaaggggaaatgggatatggtgctcctggtcgtccaggtgagaggggtcttccaggccctcagggtcccacaggaccatctggccctcctggagtgggaaaaagaggtgaaaatggggttccaggacagccaggcatcaaaggtgatagaggttttccgggagaaatgggaccaattggcccaccaggtccccaaggccctcctggggaacgagggccagaaggcattggaaagccaggagctgctggagccccaggccagccagggattccaggaacaaaaggtctccctggggctccaggaatagctgggcccccagggcctcctggctttgggaaaccaggcttgccaggcctgaagggagaaagaggacctgctggccttcctgggggtccaggtgccaaaggggaacaagggccagcaggtcttcctgggaagccaggtctgactggaccccctgggaatatgggaccccaaggaccaaaaggcatcccgggtagccatggtctcccaggccctaaaggtgagacagggccagctgggcctgcaggataccctggggctaagggtgaaaggggttcccctgggtcagatggaaaaccagggtacccaggaaaaccaggtctcgatggtcctaagggtaacccagggttaccaggtccaaaaggtgatcctggagttggaggacctcctggtctcccaggccctgtgggcccagcaggagcaaagggaatgcccggacacaatggagaggctggcccaagaggtgcccctggaataccaggtactagaggccctattgggccaccaggcattccaggattccctgggtctaaaggggatccaggaagtcccggtcctcctggcccagctggcatagcaactaagggcctcaatggacccaccgggccaccagggcctccaggtccaagaggccactctggagagcctggtcttccagggccccctgggcctccaggcccaccaggtcaagcagtcatgcctgagggttttataaaggcaggccaaaggcccagtctttctgggacccctcttgttagtgccaaccagggggtaacaggaatgcctgtgtctgcttttactgttattctctccaaagcttacccagcaataggaactcccataccatttgataaaattttgtataacaggcaacagcattatgacccaaggactggaatctttacttgtcagataccaggaatatactatttttcataccacgtgcatgtgaaagggactcatgtttgggtaggcctgtataagaatggcacccctgtaatgtacacctatgatgaatacaccaaaggctacctggatcaggcttcagggagtgccatcatcgatctcacagaaaatgaccaggtgtggctccagcttcccaatgccgagtcaaatggcctatactcctctgagtatgtccactcctctttctcaggattcctagtggctccaatgtgagtacacacagagctaatctaaatcttgtgctagaaaaagcattctctaactctaccccaccctacaaaatgcatatggaggtaggctgaaaagaatgtaatttttattttctgaaatacagatttgagctatcagaccaacaaaccttccccctgaaaagtgagcagcaacgtaaaaacgtatgtgaagcctctcttgaatttctagttagcaatcttaaggctctttaaggttttctccaatattaaaaaatatcaccaaagaagtcctgctatgttaaaaacaaacaacaaaaaacaaacaacaaaaaaaaaattaaaaaaaaaaacagaaatagagctctaagttatgtgaaatttgatttgagaaactcggcatttcctttttaaaaaagcctgtttctaactatgaatatgagaacttctaggaaacatccaggaggtatcatataactttgtagaacttaaatacttgaatattcaaatttaaaagacactgtatcccctaaaatatttctgatggtgcactactctgaggcctgtatggcccctttcatcaatatctattcaaatatacaggtgcatatatacttgttaaagctcttatataaaaaagccccaaaatattgaagttcatctgaaatgcaaggtgctttcatcaatgaaccttttcaaacttttctatgattgcagagaagctttttatatacccagcataacttggaaacaggtatctgacctattcttatttagttaacacaagtgtgattaatttgatttctttaattccttattgaatcttatgtgatatgattttctggatttacagaacattagcacatgtaccttgtgcctcccattcaagtgaagttataatttacactgagggtttcaaaattcgactagaagtggagatatattatttatttatgcactgtactgtatttttatattgctgtttaaaacttttaagctgtgcctcacttattaaagcacaaaatgttttacctactccttatttacgacgcaataaaataacatcaatagatttttaggctgaattaatttgaaagcagcaatttgctgttctcaaccattctttcaaggcttttcattgttcaaagttaataaaaaagtaggacaataaagtg

SEQ ID NO: 121505 - DNA, 3498 bp, Homo sapiens
  Payload ID: 3828
  Gene Symbol: COL10A1
  Gene Name: collagen, type X, alpha 1
  Uniprot ID: Q03692
  ENST ID: ENST00000327673
  CDS Start-End: 409-2451
atcagtctgtggatgatagtcccaataaaaccatattgtaaaaatttgccctaatccgaatttcagtgtattttgaaactattagatatttcaggctatgtcaaagatcctagattatttaatacagacatccaatcctaatttctgtttcttttcctttaggtaaatcattttattttcacttgattacctgagtatagcttccaaaaataactaagacatatattcacataactaaaaaatgatctctcatttatttatggcacatattaaaaatatataggataggttaaaaaagtagataactgtataaagaactcatctgtgaaacatgagaataaaaaaataggttaataacaatgctgtataaagttattcttttctgtttttcagaatccatctgagaatatgctgccacaaataccctttttgctgctagtatccttgaacttggttcatggagtgttttacgctgaacgataccaaatgcccacaggcataaaaggcccactacccaacaccaagacacagttcttcattccctacaccataaagagtaaaggtatagcagtaagaggagagcaaggtactcctggtccaccaggccctgctggacctcgagggcacccaggtccttctggaccaccaggaaaaccaggctacggaagtcctggactccaaggagagccagggttgccaggaccaccgggaccatcagctgtagggaaaccaggtgtgccaggactcccaggaaaaccaggagagagaggaccatatggaccaaaaggagatgttggaccagctggcctaccaggaccccggggcccaccaggaccacctggaatccctggaccggctggaatttctgtgccaggaaaacctggacaacagggacccacaggagccccaggacccaggggctttcctggagaaaagggtgcaccaggagtccctggtatgaatggacagaaaggggaaatgggatatggtgctcctggtcgtccaggtgagaggggtcttccaggccctcagggtcccacaggaccatctggccctcctggagtgggaaaaagaggtgaaaatggggttccaggacagccaggcatcaaaggtgatagaggttttccgggagaaatgggaccaattggcccaccaggtccccaaggccctcctggggaacgagggccagaaggcattggaaagccaggagctgctggagccccaggccagccagggattccaggaacaaaaggtctccctggggctccaggaatagctgggcccccagggcctcctggctttgggaaaccaggcttgccaggcctgaagggagaaagaggacctgctggccttcctgggggtccaggtgccaaaggggaacaagggccagcaggtcttcctgggaagccaggtctgactggaccccctgggaatatgggaccccaaggaccaaaaggcatcccgggtagccatggtctcccaggccctaaaggtgagacagggccagctgggcctgcaggataccctggggctaagggtgaaaggggttcccctgggtcagatggaaaaccagggtacccaggaaaaccaggtctcgatggtcctaagggtaacccagggttaccaggtccaaaaggtgatcctggagttggaggacctcctggtctcccaggccctgtgggcccagcaggagcaaagggaatgcccggacacaatggagaggctggcccaagaggtgcccctggaataccaggtactagaggccctattgggccaccaggcattccaggattccctgggtctaaaggggatccaggaagtcccggtcctcctggcccagctggcatagcaactaagggcctcaatggacccaccgggccaccagggcctccaggtccaagaggccactctggagagcctggtcttccagggccccctgggcctccaggcccaccaggtcaagcagtcatgcctgagggttttataaaggcaggccaaaggcccagtctttctgggacccctcttgttagtgccaaccagggggtaacaggaatgcctgtgtctgcttttactgttattctctccaaagcttacccagcaataggaactcccataccatttgataaaattttgtataacaggcaacagcattatgacccaaggactggaatctttacttgtcagataccaggaatatactatttttcataccacgtgcatgtgaaagggactcatgtttgggtaggcctgtataagaatggcacccctgtaatgtacacctatgatgaatacaccaaaggctacctggatcaggcttcagggagtgccatcatcgatctcacagaaaatgaccaggtgtggctccagcttcccaatgccgagtcaaatggcctatactcctctgagtatgtccactcctctttctcaggattcctagtggctccaatgtgagtacacacagagctaatctaaatcttgtgctagaaaaagcattctctaactctaccccaccctacaaaatgcatatggaggtaggctgaaaagaatgtaatttttattttctgaaatacagatttgagctatcagaccaacaaaccttccccctgaaaagtgagcagcaacgtaaaaacgtatgtgaagcctctcttgaatttctagttagcaatcttaaggctctttaaggttttctccaatattaaaaaatatcaccaaagaagtcctgctatgttaaaaacaaacaacaaaaaacaaacaacaaaaaaaaaattaaaaaaaaaaacagaaatagagctctaagttatgtgaaatttgatttgagaaactcggcatttcctttttaaaaaagcctgtttctaactatgaatatgagaacttctaggaaacatccaggaggtatcatataactttgtagaacttaaatacttgaatattcaaatttaaaagacactgtatcccctaaaatatttctgatggtgcactactctgaggcctgtatggcccctttcatcaatatctattcaaatatacaggtgcatatatacttgttaaagctcttatataaaaaagccccaaaatattgaagttcatctgaaatgcaaggtgctttcatcaatgaaccttttcaaacttttctatgattgcagagaagctttttatatacccagcataacttggaaacaggtatctgacctattcttatttagttaacacaagtgtgattaatttgatttctttaattccttattgaatcttatgtgatatgattttctggatttacagaacattagcacatgtaccttgtgcctcccattcaagtgaagttataatttacactgagggtttcaaaattcgactagaagtggagatatattatttatttatgcactgtactgtatttttatattgctgtttaaaacttttaagctgtgcctcacttattaaagcacaaaatgttttacctactccttatttacgacgcaataaaataacatcaataga

SEQ ID NO: 121506 - DNA, 303 bp, Homo sapiens
  Payload ID: 3828
  Gene Symbol: COL10A1
  Gene Name: collagen, type X, alpha 1
  ENST ID: ENST00000418500
  CDS Start-End: 150-303
gtttttacccctcctgggatcaccactgacagcatccatgaagttctgacagaagaacacaccaggatgacaaagtagtgacttttaaagagcagccaacaacaagcatatagggaatctctcagcaaatacagaatccatctgagaatatgctgccacaaataccctttttgctgctagtatccttgaacttggttcatggagtgttttacgctgaacgataccaaatgcccacaggcataaaaggcccactacccaacaccaagacacagttcttcattccctacaccataaagagtaaag

SEQ ID NO: 121507 - DNA, 732 bp, Homo sapiens
  Payload ID: 3828
  Gene Symbol: COL10A1
  Gene Name: collagen, type X, alpha 1
  ENST ID: ENST00000452729
  CDS Start-End: 84-732
gctcatctgggcagaggaagcttcagaaagctgccaaggcaccatctccaggaactcccagcacgcagaatccatctgagaatatgctgccacaaataccctttttgctgctagtatccttgaacttggttcatggagtgttttacgctgaacgataccaaatgcccacaggcataaaaggcccactacccaacaccaagacacagttcttcattccctacaccataaagagtaaaggtatagcagtaagaggagagcaaggtactcctggtccaccaggccctgctggacctcgagggcacccaggtccttctggaccaccaggaaaaccaggctacggaagtcctggactccaaggagagccagggttgccaggaccaccgggaccatcagctgtagggaaaccaggtgtgccaggactcccaggaaaaccaggagagagaggaccatatggaccaaaaggagatgttggaccagctggcctaccaggaccccggggcccaccaggaccacctggaatccctggaccggctggaatttctgtgccaggaaaacctggacaacagggacccacaggagccccaggacccaggggctttcctggagaaaagggtgcaccaggagtccctggtatgaatggacagaaaggggaaatgggatatggtgctcctggtcgtccaggtgagaggggtcttccaggccctcagggtcccacaggaccatctggccctc

SEQ ID NO: 121508 - DNA, 7173 bp, Homo sapiens
  Payload ID: 3829
  Gene Symbol: COL11A1
  Gene Name: collagen, type XI, alpha 1
  Uniprot ID: P12107
  ENST ID: ENST00000353414
  CDS Start-End: 319-5622
acacagtactctcagcttgttggtggaagcccctcatctgccttcattctgaaggcagggcccggcagaggaaggatcagagggtcgcggccggagggtcccggccggtggggccaactcagagggagaggaaagggctagagacacgaagaacgcaaaccatcaaatttagaagaaaaagccctttgactttttccccctctccctccccaatggctgtgtagcaaacatccctggcgataccttggaaaggacgaagttggtctgcagtcgcaatttcgtgggttgagttcacagttgtgagtgcggggctcggagatggagccgtggtcctctaggtggaaaacgaaacggtggctctgggatttcaccgtaacaaccctcgcattgaccttcctcttccaagctagagaggtcagaggagctgctccagttgatgtactaaaagcactagattttcacaattctccagagggaatatcaaaaacaacgggattttgcacaaacagaaagaattctaaaggctcagatactgcttacagagtttcaaagcaagcacaactcagtgccccaacaaaacagttatttccaggtggaactttcccagaagacttttcaatactatttacagtaaaaccaaaaaaaggaattcagtctttccttttatctatatataatgagcatggtattcagcaaattggtgttgaggttgggagatcacctgtttttctgtttgaagaccacactggaaaacctgccccagaagactatcccctcttcagaactgttaacatcgctgacgggaagtggcatcgggtagcaatcagcgtggagaagaaaactgtgacaatgattgttgattgtaagaagaaaaccacgaaaccacttgatagaagtgagagagcaattgttgataccaatggaatcacggtttttggaacaaggattttggatgaagaagtttttgagggggacattcagcagtttttgatcacaggtgatcccaaggcagcatatgactactgtgagcattatagtccagactgtgactcttcagcacccaaggctgctcaagctcaggaacctcagatagatgaggcaaacatcgttgatgattttcaagaatacaactatggaacaatggaaagttaccagacagaagctcctaggcatgtttctgggacaaatgagccaaatccagttgaagaaatatttactgaagaatatctaacgggagaggattatgattcccagaggaaaaattctgaggatacactatatgaaaacaaagaaatagacggcagggattctgatcttctggtagatggagatttaggcgaatatgatttttatgaatataaagaatatgaagataaaccaacaagcccccctaatgaagaatttggtccaggtgtaccagcagaaactgatattacagaaacaagcataaatggccatggtgcatatggagagaaaggacagaaaggagaaccagcagtggttgagcctggtatgcttgtcgaaggaccaccaggaccagcaggacctgcaggtattatgggtcctccaggtctacaaggccccactggaccccctggtgaccctggcgataggggccccccaggacgtcctggcttaccaggggctgatggtctacctggtcctcctggtactatgttgatgttaccgttccgttatggtggtgatggttccaaaggaccaaccatctctgctcaggaagctcaggctcaagctattcttcagcaggctcggattgctctgagaggcccacctggcccaatgggtctaactggaagaccaggtcctgtgggggggcctggttcatctggggccaaaggtgagagtggtgatccaggtcctcagggccctcgaggcgtccagggtccccctggtccaacgggaaaacctggaaaaaggggtcgtccaggtgcagatggaggaagaggaatgccaggagaacctggggcaaagggagatcgagggtttgatggacttccgggtctgccaggtgacaaaggtcacaggggtgaacgaggtcctcaaggtcctccaggtcctcctggtgatgatggaatgaggggagaagatggagaaattggaccaagaggtcttccaggtgaagctggcccacgaggtttgctgggtccaaggggaactccaggagctccagggcagcctggtatggcaggtgtagatggccccccaggaccaaaagggaacatgggtccccaaggggagcctgggcctccaggtcaacaagggaatccaggacctcagggtcttcctggtccacaaggtccaattggtcctcctggtgaaaaaggaccacaaggaaaaccaggacttgctggacttcctggtgctgatgggcctcctggtcatcctgggaaagaaggccagtctggagaaaagggggctctgggtccccctggtccacaaggtcctattggatacccgggcccccggggagtaaagggagcagatggtgtcagaggtctcaagggatctaaaggtgaaaagggtgaagatggttttccaggattcaaaggtgacatgggtctaaaaggtgacagaggagaagttggtcaaattggcccaagaggggaagatggccctgaaggacccaaaggtcgagcaggcccaactggagacccaggtccttcaggtcaagcaggagaaaagggaaaacttggagttccaggattaccaggatatccaggaagacaaggtccaaagggttccactggattccctgggtttccaggtgccaatggagagaaaggtgcacggggagtagctggcaaaccaggccctcggggtcagcgtggtccaacgggtcctcgaggttcaagaggtgcaagaggtcccactgggaaacctgggccaaagggcacttcaggtggcgatggccctcctggccctccaggtgaaagaggtcctcaaggacctcagggtccagttggattccctggaccaaaaggccctcctggaccacctgggaaggatgggctgccaggacaccctgggcaacgtggggagactggatttcaaggcaagaccggccctcctgggccagggggagtggttggaccacagggaccaaccggtgagactggtccaataggggaacgtgggcatcctggccctcctggccctcctggtgagcaaggtcttcctggtgctgcaggaaaagaaggtgcaaagggtgatccaggtcctcaaggtatctcagggaaagatggaccagcaggattacgtggtttcccaggggaaagaggtcttcctggagctcagggtgcacctggactgaaaggaggggaaggtccccagggcccaccaggtccagttggctcaccaggagaacgtgggtcagcaggtacagctggcccaattggtttaccagggcgcccgggacctcagggtcctcctggtccagctggagagaaaggtgctcctggagaaaaaggtccccaagggcctgcagggagagatggagttcaaggtcctgttggtctcccagggccagctggtcctgccggctcccctggggaagacggagacaagggtgaaattggtgagccgggacaaaaaggcagcaagggtgacaagggagaaaatggccctcccggtcccccaggtcttcaaggaccagttggtgcccctggaattgctggaggtgatggtgaaccaggtcctagaggacagcaggggatgtttgggcaaaaaggtgatgagggtgccagaggcttccctggacctcctggtccaataggtcttcagggtctgccaggcccacctggtgaaaaaggtgaaaatggggatgttggtcccatggggccacctggtcctccaggcccaagaggccctcaaggtcccaatggagctgatggaccacaaggacccccagggtctgttggttcagttggtggtgttggagaaaagggtgaacctggagaagcagggaacccagggcctcctggggaagcaggtgtaggcggtcccaaaggagaaagaggagagaaaggggaagctggtccacctggagctgctggacctccaggtgccaaggggccaccaggtgatgatggccctaagggtaacccgggtcctgttggttttcctggagatcctggtcctcctggggaacctggccctgcaggtcaagatggtgttggtggtgacaagggtgaagatggagatcctggtcaaccgggtcctcctggcccatctggtgaggctggcccaccaggtcctcctggaaaacgaggtcctcctggagctgcaggtgcagagggaagacaaggtgaaaaaggtgctaagggggaagcaggtgcagaaggtcctcctggaaaaaccggcccagtcggtcctcagggacctgcaggaaagcctggtccagaaggtcttcggggcatccctggtcctgtgggagaacaaggtctccctggagctgcaggccaagatggaccacctggtcctatgggacctcctggcttacctggtctcaaaggtgaccctggctccaagggtgaaaagggacatcctggtttaattggcctgattggtcctccaggagaacaaggggaaaaaggtgaccgagggctccctggaactcaaggatctccaggagcaaaaggggatgggggaattcctggtcctgctggtcccttaggtccacctggtcctccaggtttaccaggtcctcaaggcccaaagggtaacaaaggctctactggacccgctggccagaaaggtgacagtggtcttccagggcctcctgggtctccaggtccacctggtgaagtcattcagcctttaccaatcttgtcctccaaaaaaacgagaagacatactgaaggcatgcaagcagatgcagatgataatattcttgattactcggatggaatggaagaaatatttggttccctcaattccctgaaacaagacattgagcatatgaaatttccaatgggtactcagaccaatccagcccgaacttgtaaagacctgcaactcagccatcctgacttcccagatggtgaatattggattgatcctaaccaaggttgctcaggagattccttcaaagtttactgtaatttcacatctggtggtgagacttgcatttatccagacaaaaaatctgagggagtaagaatttcatcatggccaaaggagaaaccaggaagttggtttagtgaatttaagaggggaaaactgctttcatacttagatgttgaaggaaattccatcaatatggtgcaaatgacattcctgaaacttctgactgcctctgctcggcaaaatttcacctaccactgtcatcagtcagcagcctggtatgatgtgtcatcaggaagttatgacaaagcacttcgcttcctgggatcaaatgatgaggagatgtcctatgacaataatccttttatcaaaacactgtatgatggttgtgcgtccagaaaaggctatgaaaagactgtcattgaaatcaatacaccaaaaattgatcaagtacctattgttgatgtcatgatcaatgactttggtgatcagaatcagaagttcggatttgaagttggtcctgtttgttttcttggctaagattaagacaaagaacatatcaaatcaacagaaaatataccttggtgccaccaacccattttgtgccacatgcaagttttgaataaggatggtatagaaaacaacgctgcatatacaggtaccatttaggaaataccgatgcctttgtgggggcagaatcacatggcaaaagctttgaaaatcataaagatataagttggtgtggctaagatggaaacagggctgattcttgattcccaattctcaactctccttttcctatttgaatttctttggtgctgtagaaaacaaaaaaagaaaaatatatattcataaaaaatatggtgctcattctcatccatccaggatgtactaaaacagtgtgtttaataaattgtaattattttgtgtacagttctatactgttatctgtgtccatttccaaaacttgcacgtgtccctgaattccatctgactctaattttatgagaattgcagaactctgatggcaataaatatatgtattatgaaaaaataaagttgtaatttctgatgactctaagtccctttctttggttaataataaaatgcctttgtatatattgatgttgaagagttcaattatttgatgtcgccaacaaaattctcagagggcaaaaatctggaagacttttggaagcacactctgatcaactcttctctgccgacagtcattttgctgaatttcagccaaaaatattatgcattttgatgctttattcaaggctatacctcaaactttttcttctcagaatccaggatttcacaggatacttgtatatatggaaaacaagcaagtttatatttttggacagggaaatgtgtgtaagaaagtatattaacaaatcaatgcctccgtcaagcaaacaatcatatgtatactttttttctacgttatctcatctccttgttttcagtgtgcttcaataatgcaggttaatattaaagatggaaattaagcaattatttatgaatttgtgcaatgttagattttcttatcaatcaagttcttgaatttgattctaagttgcatattataacagtctcgaaaattattttacttgcccaacaaatattacttttttcctttcaagataattttataaatcatttgacctacctaattgctaaatgaataacatatggtggactgttattaagagtatttgttttaagtcattcaggaaaatctaaacttttttttccactaaggtatttactttaaggtagcttgaaatagcaatacaatttaaaaattaaaaactgaattttgtatctattttaagtaatatatgtaagacttgaaaataaatgttttatttcttatataaagtgttaaattaattgataccagatttcactggaacagtttcaactgataatttatgacaaaagaacatacctgtaatattgaaattaaaaagtgaaatttgtcataaagaatttcttttatttttgaaatcgagtttgtaaatgtccttttaagaagggagatatgaatccaataaataaactcaagtcttggctacctgg

SEQ ID NO: 121509 - DNA, 7327 bp, Homo sapiens
  Payload ID: 3829
  Gene Symbol: COL11A1
  Gene Name: collagen, type XI, alpha 1
  Uniprot ID: P12107
  ENST ID: ENST00000358392
  CDS Start-End: 319-5775
acacagtactctcagcttgttggtggaagcccctcatctgccttcattctgaaggcagggcccggcagaggaaggatcagagggtcgcggccggagggtcccggccggtggggccaactcagagggagaggaaagggctagagacacgaagaacgcaaaccatcaaatttagaagaaaaagccctttgactttttccccctctccctccccaatggctgtgtagcaaacatccctggcgataccttggaaaggacgaagttggtctgcagtcgcaatttcgtgggttgagttcacagttgtgagtgcggggctcggagatggagccgtggtcctctaggtggaaaacgaaacggtggctctgggatttcaccgtaacaaccctcgcattgaccttcctcttccaagctagagaggtcagaggagctgctccagttgatgtactaaaagcactagattttcacaattctccagagggaatatcaaaaacaacgggattttgcacaaacagaaagaattctaaaggctcagatactgcttacagagtttcaaagcaagcacaactcagtgccccaacaaaacagttatttccaggtggaactttcccagaagacttttcaatactatttacagtaaaaccaaaaaaaggaattcagtctttccttttatctatatataatgagcatggtattcagcaaattggtgttgaggttgggagatcacctgtttttctgtttgaagaccacactggaaaacctgccccagaagactatcccctcttcagaactgttaacatcgctgacgggaagtggcatcgggtagcaatcagcgtggagaagaaaactgtgacaatgattgttgattgtaagaagaaaaccacgaaaccacttgatagaagtgagagagcaattgttgataccaatggaatcacggtttttggaacaaggattttggatgaagaagtttttgagggggacattcagcagtttttgatcacaggtgatcccaaggcagcatatgactactgtgagcattatagtccagactgtgactcttcagcacccaaggctgctcaagctcaggaacctcagatagatgagaaaaagaaatccaatttcaaaaagaagatgaggacagtggctactaaatcaaaggaaaaatccaaaaagtttacaccccccaaatctgaaaaattttcatccaagaagaagaaaagttatcaagcatcagcaaaagccaaactaggggtaaaggcaaacatcgttgatgattttcaagaatacaactatggaacaatggaaagttaccagacagaagctcctaggcatgtttctgggacaaatgagccaaatccagttgaagaaatatttactgaagaatatctaacgggagaggattatgattcccagaggaaaaattctgaggatacactatatgaaaacaaagaaatagacggcagggattctgatcttctggtagatggagatttaggcgaatatgatttttatgaatataaagaatatgaagataaaccaacaagcccccctaatgaagaatttggtccaggtgtaccagcagaaactgatattacagaaacaagcataaatggccatggtgcatatggagagaaaggacagaaaggagaaccagcagtggttgagcctggtatgcttgtcgaaggaccaccaggaccagcaggacctgcaggtattatgggtcctccaggtctacaaggccccactggaccccctggtgaccctggcgataggggccccccaggacgtcctggcttaccaggggctgatggtctacctggtcctcctggtactatgttgatgttaccgttccgttatggtggtgatggttccaaaggaccaaccatctctgctcaggaagctcaggctcaagctattcttcagcaggctcggattgctctgagaggcccacctggcccaatgggtctaactggaagaccaggtcctgtgggggggcctggttcatctggggccaaaggtgagagtggtgatccaggtcctcagggccctcgaggcgtccagggtccccctggtccaacgggaaaacctggaaaaaggggtcgtccaggtgcagatggaggaagaggaatgccaggagaacctggggcaaagggagatcgagggtttgatggacttccgggtctgccaggtgacaaaggtcacaggggtgaacgaggtcctcaaggtcctccaggtcctcctggtgatgatggaatgaggggagaagatggagaaattggaccaagaggtcttccaggtgaagctggcccacgaggtttgctgggtccaaggggaactccaggagctccagggcagcctggtatggcaggtgtagatggccccccaggaccaaaagggaacatgggtccccaaggggagcctgggcctccaggtcaacaagggaatccaggacctcagggtcttcctggtccacaaggtccaattggtcctcctggtgaaaaaggaccacaaggaaaaccaggacttgctggacttcctggtgctgatgggcctcctggtcatcctgggaaagaaggccagtctggagaaaagggggctctgggtccccctggtccacaaggtcctattggatacccgggcccccggggagtaaagggagcagatggtgtcagaggtctcaagggatctaaaggtgaaaagggtgaagatggttttccaggattcaaaggtgacatgggtctaaaaggtgacagaggagaagttggtcaaattggcccaagaggggaagatggccctgaaggacccaaaggtcgagcaggcccaactggagacccaggtccttcaggtcaagcaggagaaaagggaaaacttggagttccaggattaccaggatatccaggaagacaaggtccaaagggttccactggattccctgggtttccaggtgccaatggagagaaaggtgcacggggagtagctggcaaaccaggccctcggggtcagcgtggtccaacgggtcctcgaggttcaagaggtgcaagaggtcccactgggaaacctgggccaaagggcacttcaggtggcgatggccctcctggccctccaggtgaaagaggtcctcaaggacctcagggtccagttggattccctggaccaaaaggccctcctggaccacctgggaaggatgggctgccaggacaccctgggcaacgtggggagactggatttcaaggcaagaccggccctcctgggccagggggagtggttggaccacagggaccaaccggtgagactggtccaataggggaacgtgggcatcctggccctcctggccctcctggtgagcaaggtcttcctggtgctgcaggaaaagaaggtgcaaagggtgatccaggtcctcaaggtatctcagggaaagatggaccagcaggattacgtggtttcccaggggaaagaggtcttcctggagctcagggtgcacctggactgaaaggaggggaaggtccccagggcccaccaggtccagttggctcaccaggagaacgtgggtcagcaggtacagctggcccaattggtttaccagggcgcccgggacctcagggtcctcctggtccagctggagagaaaggtgctcctggagaaaaaggtccccaagggcctgcagggagagatggagttcaaggtcctgttggtctcccagggccagctggtcctgccggctcccctggggaagacggagacaagggtgaaattggtgagccgggacaaaaaggcagcaagggtgacaagggagaaaatggccctcccggtcccccaggtcttcaaggaccagttggtgcccctggaattgctggaggtgatggtgaaccaggtcctagaggacagcaggggatgtttgggcaaaaaggtgatgagggtgccagaggcttccctggacctcctggtccaataggtcttcagggtctgccaggcccacctggtgaaaaaggtgaaaatggggatgttggtcccatggggccacctggtcctccaggcccaagaggccctcaaggtcccaatggagctgatggaccacaaggacccccagggtctgttggttcagttggtggtgttggagaaaagggtgaacctggagaagcagggaacccagggcctcctggggaagcaggtgtaggcggtcccaaaggagaaagaggagagaaaggggaagctggtccacctggagctgctggacctccaggtgccaaggggccaccaggtgatgatggccctaagggtaacccgggtcctgttggttttcctggagatcctggtcctcctggggaacctggccctgcaggtcaagatggtgttggtggtgacaagggtgaagatggagatcctggtcaaccgggtcctcctggcccatctggtgaggctggcccaccaggtcctcctggaaaacgaggtcctcctggagctgcaggtgcagagggaagacaaggtgaaaaaggtgctaagggggaagcaggtgcagaaggtcctcctggaaaaaccggcccagtcggtcctcagggacctgcaggaaagcctggtccagaaggtcttcggggcatccctggtcctgtgggagaacaaggtctccctggagctgcaggccaagatggaccacctggtcctatgggacctcctggcttacctggtctcaaaggtgaccctggctccaagggtgaaaagggacatcctggtttaattggcctgattggtcctccaggagaacaaggggaaaaaggtgaccgagggctccctggaactcaaggatctccaggagcaaaaggggatgggggaattcctggtcctgctggtcccttaggtccacctggtcctccaggtttaccaggtcctcaaggcccaaagggtaacaaaggctctactggacccgctggccagaaaggtgacagtggtcttccagggcctcctgggtctccaggtccacctggtgaagtcattcagcctttaccaatcttgtcctccaaaaaaacgagaagacatactgaaggcatgcaagcagatgcagatgataatattcttgattactcggatggaatggaagaaatatttggttccctcaattccctgaaacaagacattgagcatatgaaatttccaatgggtactcagaccaatccagcccgaacttgtaaagacctgcaactcagccatcctgacttcccagatggtgaatattggattgatcctaaccaaggttgctcaggagattccttcaaagtttactgtaatttcacatctggtggtgagacttgcatttatccagacaaaaaatctgagggagtaagaatttcatcatggccaaaggagaaaccaggaagttggtttagtgaatttaagaggggaaaactgctttcatacttagatgttgaaggaaattccatcaatatggtgcaaatgacattcctgaaacttctgactgcctctgctcggcaaaatttcacctaccactgtcatcagtcagcagcctggtatgatgtgtcatcaggaagttatgacaaagcacttcgcttcctgggatcaaatgatgaggagatgtcctatgacaataatccttttatcaaaacactgtatgatggttgtgcgtccagaaaaggctatgaaaagactgtcattgaaatcaatacaccaaaaattgatcaagtacctattgttgatgtcatgatcaatgactttggtgatcagaatcagaagttcggatttgaagttggtcctgtttgttttcttggctaagattaagacaaagaacatatcaaatcaacagaaaatataccttggtgccaccaacccattttgtgccacatgcaagttttgaataaggatggtatagaaaacaacgctgcatatacaggtaccatttaggaaataccgatgcctttgtgggggcagaatcacatggcaaaagctttgaaaatcataaagatataagttggtgtggctaagatggaaacagggctgattcttgattcccaattctcaactctccttttcctatttgaatttctttggtgctgtagaaaacaaaaaaagaaaaatatatattcataaaaaatatggtgctcattctcatccatccaggatgtactaaaacagtgtgtttaataaattgtaattattttgtgtacagttctatactgttatctgtgtccatttccaaaacttgcacgtgtccctgaattccatctgactctaattttatgagaattgcagaactctgatggcaataaatatatgtattatgaaaaaataaagttgtaatttctgatgactctaagtccctttctttggttaataataaaatgcctttgtatatattgatgttgaagagttcaattatttgatgtcgccaacaaaattctcagagggcaaaaatctggaagacttttggaagcacactctgatcaactcttctctgccgacagtcattttgctgaatttcagccaaaaatattatgcattttgatgctttattcaaggctatacctcaaactttttcttctcagaatccaggatttcacaggatacttgtatatatggaaaacaagcaagtttatatttttggacagggaaatgtgtgtaagaaagtatattaacaaatcaatgcctccgtcaagcaaacaatcatatgtatactttttttctacgttatctcatctccttgttttcagtgtgcttcaataatgcaggttaatattaaagatggaaattaagcaattatttatgaatttgtgcaatgttagattttcttatcaatcaagttcttgaatttgattctaagttgcatattataacagtctcgaaaattattttacttgcccaacaaatattacttttttcctttcaagataattttataaatcatttgacctacctaattgctaaatgaataacatatggtggactgttattaagagtatttgttttaagtcattcaggaaaatctaaacttttttttccactaaggtatttactttaaggtagcttgaaatagcaatacaatttaaaaattaaaaactgaattttgtatctattttaagtaatatatgtaagacttgaaaataaatgttttatttcttatataaagtgttaaattaattgataccagatttcactggaacagtttcaactgataatttatgacaaaagaacatacctgtaatattgaaattaaaaagtgaaatttgtcataaagaatttcttttatttttgaaatcgagtttgtaaatgtccttttaagaagggagatatgaatccaataaataaactcaagtcttggctacctgga

SEQ ID NO: 121510 - DNA, 7286 bp, Homo sapiens
  Payload ID: 3829
  Gene Symbol: COL11A1
  Gene Name: collagen, type XI, alpha 1
  Uniprot ID: P12107
  ENST ID: ENST00000370096
  CDS Start-End: 314-5734
gtactctcagcttgttggtggaagcccctcatctgccttcattctgaaggcagggcccggcagaggaaggatcagagggtcgcggccggagggtcccggccggtggggccaactcagagggagaggaaagggctagagacacgaagaacgcaaaccatcaaatttagaagaaaaagccctttgactttttccccctctccctccccaatggctgtgtagcaaacatccctggcgataccttggaaaggacgaagttggtctgcagtcgcaatttcgtgggttgagttcacagttgtgagtgcggggctcggagatggagccgtggtcctctaggtggaaaacgaaacggtggctctgggatttcaccgtaacaaccctcgcattgaccttcctcttccaagctagagaggtcagaggagctgctccagttgatgtactaaaagcactagattttcacaattctccagagggaatatcaaaaacaacgggattttgcacaaacagaaagaattctaaaggctcagatactgcttacagagtttcaaagcaagcacaactcagtgccccaacaaaacagttatttccaggtggaactttcccagaagacttttcaatactatttacagtaaaaccaaaaaaaggaattcagtctttccttttatctatatataatgagcatggtattcagcaaattggtgttgaggttgggagatcacctgtttttctgtttgaagaccacactggaaaacctgccccagaagactatcccctcttcagaactgttaacatcgctgacgggaagtggcatcgggtagcaatcagcgtggagaagaaaactgtgacaatgattgttgattgtaagaagaaaaccacgaaaccacttgatagaagtgagagagcaattgttgataccaatggaatcacggtttttggaacaaggattttggatgaagaagtttttgagggggacattcagcagtttttgatcacaggtgatcccaaggcagcatatgactactgtgagcattatagtccagactgtgactcttcagcacccaaggctgctcaagctcaggaacctcagatagatgagtatgcaccagaggatataatcgaatatgactatgagtatggggaagcagagtataaagaggctgaaagtgtaacagagggacccactgtaactgaggagacaatagcacagacggaggcaaacatcgttgatgattttcaagaatacaactatggaacaatggaaagttaccagacagaagctcctaggcatgtttctgggacaaatgagccaaatccagttgaagaaatatttactgaagaatatctaacgggagaggattatgattcccagaggaaaaattctgaggatacactatatgaaaacaaagaaatagacggcagggattctgatcttctggtagatggagatttaggcgaatatgatttttatgaatataaagaatatgaagataaaccaacaagcccccctaatgaagaatttggtccaggtgtaccagcagaaactgatattacagaaacaagcataaatggccatggtgcatatggagagaaaggacagaaaggagaaccagcagtggttgagcctggtatgcttgtcgaaggaccaccaggaccagcaggacctgcaggtattatgggtcctccaggtctacaaggccccactggaccccctggtgaccctggcgataggggccccccaggacgtcctggcttaccaggggctgatggtctacctggtcctcctggtactatgttgatgttaccgttccgttatggtggtgatggttccaaaggaccaaccatctctgctcaggaagctcaggctcaagctattcttcagcaggctcggattgctctgagaggcccacctggcccaatgggtctaactggaagaccaggtcctgtgggggggcctggttcatctggggccaaaggtgagagtggtgatccaggtcctcagggccctcgaggcgtccagggtccccctggtccaacgggaaaacctggaaaaaggggtcgtccaggtgcagatggaggaagaggaatgccaggagaacctggggcaaagggagatcgagggtttgatggacttccgggtctgccaggtgacaaaggtcacaggggtgaacgaggtcctcaaggtcctccaggtcctcctggtgatgatggaatgaggggagaagatggagaaattggaccaagaggtcttccaggtgaagctggcccacgaggtttgctgggtccaaggggaactccaggagctccagggcagcctggtatggcaggtgtagatggccccccaggaccaaaagggaacatgggtccccaaggggagcctgggcctccaggtcaacaagggaatccaggacctcagggtcttcctggtccacaaggtccaattggtcctcctggtgaaaaaggaccacaaggaaaaccaggacttgctggacttcctggtgctgatgggcctcctggtcatcctgggaaagaaggccagtctggagaaaagggggctctgggtccccctggtccacaaggtcctattggatacccgggcccccggggagtaaagggagcagatggtgtcagaggtctcaagggatctaaaggtgaaaagggtgaagatggttttccaggattcaaaggtgacatgggtctaaaaggtgacagaggagaagttggtcaaattggcccaagaggggaagatggccctgaaggacccaaaggtcgagcaggcccaactggagacccaggtccttcaggtcaagcaggagaaaagggaaaacttggagttccaggattaccaggatatccaggaagacaaggtccaaagggttccactggattccctgggtttccaggtgccaatggagagaaaggtgcacggggagtagctggcaaaccaggccctcggggtcagcgtggtccaacgggtcctcgaggttcaagaggtgcaagaggtcccactgggaaacctgggccaaagggcacttcaggtggcgatggccctcctggccctccaggtgaaagaggtcctcaaggacctcagggtccagttggattccctggaccaaaaggccctcctggaccacctgggaaggatgggctgccaggacaccctgggcaacgtggggagactggatttcaaggcaagaccggccctcctgggccagggggagtggttggaccacagggaccaaccggtgagactggtccaataggggaacgtgggcatcctggccctcctggccctcctggtgagcaaggtcttcctggtgctgcaggaaaagaaggtgcaaagggtgatccaggtcctcaaggtatctcagggaaagatggaccagcaggattacgtggtttcccaggggaaagaggtcttcctggagctcagggtgcacctggactgaaaggaggggaaggtccccagggcccaccaggtccagttggctcaccaggagaacgtgggtcagcaggtacagctggcccaattggtttaccagggcgcccgggacctcagggtcctcctggtccagctggagagaaaggtgctcctggagaaaaaggtccccaagggcctgcagggagagatggagttcaaggtcctgttggtctcccagggccagctggtcctgccggctcccctggggaagacggagacaagggtgaaattggtgagccgggacaaaaaggcagcaagggtgacaagggagaaaatggccctcccggtcccccaggtcttcaaggaccagttggtgcccctggaattgctggaggtgatggtgaaccaggtcctagaggacagcaggggatgtttgggcaaaaaggtgatgagggtgccagaggcttccctggacctcctggtccaataggtcttcagggtctgccaggcccacctggtgaaaaaggtgaaaatggggatgttggtcccatggggccacctggtcctccaggcccaagaggccctcaaggtcccaatggagctgatggaccacaaggacccccagggtctgttggttcagttggtggtgttggagaaaagggtgaacctggagaagcagggaacccagggcctcctggggaagcaggtgtaggcggtcccaaaggagaaagaggagagaaaggggaagctggtccacctggagctgctggacctccaggtgccaaggggccaccaggtgatgatggccctaagggtaacccgggtcctgttggttttcctggagatcctggtcctcctggggaacctggccctgcaggtcaagatggtgttggtggtgacaagggtgaagatggagatcctggtcaaccgggtcctcctggcccatctggtgaggctggcccaccaggtcctcctggaaaacgaggtcctcctggagctgcaggtgcagagggaagacaaggtgaaaaaggtgctaagggggaagcaggtgcagaaggtcctcctggaaaaaccggcccagtcggtcctcagggacctgcaggaaagcctggtccagaaggtcttcggggcatccctggtcctgtgggagaacaaggtctccctggagctgcaggccaagatggaccacctggtcctatgggacctcctggcttacctggtctcaaaggtgaccctggctccaagggtgaaaagggacatcctggtttaattggcctgattggtcctccaggagaacaaggggaaaaaggtgaccgagggctccctggaactcaaggatctccaggagcaaaaggggatgggggaattcctggtcctgctggtcccttaggtccacctggtcctccaggtttaccaggtcctcaaggcccaaagggtaacaaaggctctactggacccgctggccagaaaggtgacagtggtcttccagggcctcctgggtctccaggtccacctggtgaagtcattcagcctttaccaatcttgtcctccaaaaaaacgagaagacatactgaaggcatgcaagcagatgcagatgataatattcttgattactcggatggaatggaagaaatatttggttccctcaattccctgaaacaagacattgagcatatgaaatttccaatgggtactcagaccaatccagcccgaacttgtaaagacctgcaactcagccatcctgacttcccagatggtgaatattggattgatcctaaccaaggttgctcaggagattccttcaaagtttactgtaatttcacatctggtggtgagacttgcatttatccagacaaaaaatctgagggagtaagaatttcatcatggccaaaggagaaaccaggaagttggtttagtgaatttaagaggggaaaactgctttcatacttagatgttgaaggaaattccatcaatatggtgcaaatgacattcctgaaacttctgactgcctctgctcggcaaaatttcacctaccactgtcatcagtcagcagcctggtatgatgtgtcatcaggaagttatgacaaagcacttcgcttcctgggatcaaatgatgaggagatgtcctatgacaataatccttttatcaaaacactgtatgatggttgtgcgtccagaaaaggctatgaaaagactgtcattgaaatcaatacaccaaaaattgatcaagtacctattgttgatgtcatgatcaatgactttggtgatcagaatcagaagttcggatttgaagttggtcctgtttgttttcttggctaagattaagacaaagaacatatcaaatcaacagaaaatataccttggtgccaccaacccattttgtgccacatgcaagttttgaataaggatggtatagaaaacaacgctgcatatacaggtaccatttaggaaataccgatgcctttgtgggggcagaatcacatggcaaaagctttgaaaatcataaagatataagttggtgtggctaagatggaaacagggctgattcttgattcccaattctcaactctccttttcctatttgaatttctttggtgctgtagaaaacaaaaaaagaaaaatatatattcataaaaaatatggtgctcattctcatccatccaggatgtactaaaacagtgtgtttaataaattgtaattattttgtgtacagttctatactgttatctgtgtccatttccaaaacttgcacgtgtccctgaattccatctgactctaattttatgagaattgcagaactctgatggcaataaatatatgtattatgaaaaaataaagttgtaatttctgatgactctaagtccctttctttggttaataataaaatgcctttgtatatattgatgttgaagagttcaattatttgatgtcgccaacaaaattctcagagggcaaaaatctggaagacttttggaagcacactctgatcaactcttctctgccgacagtcattttgctgaatttcagccaaaaatattatgcattttgatgctttattcaaggctatacctcaaactttttcttctcagaatccaggatttcacaggatacttgtatatatggaaaacaagcaagtttatatttttggacagggaaatgtgtgtaagaaagtatattaacaaatcaatgcctccgtcaagcaaacaatcatatgtatactttttttctacgttatctcatctccttgttttcagtgtgcttcaataatgcaggttaatattaaagatggaaattaagcaattatttatgaatttgtgcaatgttagattttcttatcaatcaagttcttgaatttgattctaagttgcatattataacagtctcgaaaattattttacttgcccaacaaatattacttttttcctttcaagataattttataaatcatttgacctacctaattgctaaatgaataacatatggtggactgttattaagagtatttgttttaagtcattcaggaaaatctaaacttttttttccactaaggtatttactttaaggtagcttgaaatagcaatacaatttaaaaattaaaaactgaattttgtatctattttaagtaatatatgtaagacttgaaaataaatgttttatttcttatataaagtgttaaattaattgataccagatttcactggaacagtttcaactgataatttatgacaaaagaacatacctgtaatattgaaattaaaaagtgaaatttgtcataaagaatttcttttatttttgaaatcgagtttgtaaatgtccttttaagaagggagatatgaatccaataaataaactcaagtcttggctacctgga

SEQ ID NO: 121511 - DNA, 1709 bp, Homo sapiens
  Payload ID: 3829
  Gene Symbol: COL11A1
  Gene Name: collagen, type XI, alpha 1
  ENST ID: ENST00000427239
  CDS Start-End: 1-1709
atggagccgtggtcctctaggtggaaaacgaaacggtggctctgggatttcaccgtaacaaccctcgcattgaccttcctcttccaagctagagaggtcagaggagctgctccagttgatgtactaaaagcactagattttcacaattctccagagggaatatcaaaaacaacgggattttgcacaaacagaaagaattctaaaggctcagatactgcttacagagtttcaaagcaagcacaactcagtgccccaacaaaacagttatttccaggtggaactttcccagaagacttttcaatactatttacagtaaaaccaaaaaaaggaattcagtctttccttttatctatatataatgagcatggtattcagcaaattggtgttgaggttgggagatcacctgtttttctgtttgaagaccacactggaaaacctgccccagaagactatcccctcttcagaactgttaacatcgctgacgggaagtggcatcgggtagcaatcagcgtggagaagaaaactgtgacaatgattgttgattgtaagaagaaaaccacgaaaccacttgatagaagtgagagagcaattgttgataccaatggaatcacggtttttggaacaaggattttggatgaagaagtttttgagggggacattcagcagtttttgatcacaggtgatcccaaggcagcatatgactactgtgagcattatagtccagactgtgactcttcagcacccaaggctgctcaagctcaggaacctcagatagatgagaaaaagaaatccaatttcaaaaagaagatgaggacagtggctactaaatcaaaggaaaaatccaaaaagtttacaccccccaaatctgaaaaattttcatccaagaagaagaaaagttatcaagcatcagcaaaagccaaactaggggtaaaggcaaacatcgttgatgattttcaagaatacaactatggaacaatggaaagttaccagacagaagctcctaggcatgtttctgggacaaatgagccaaatccagttgaagaaatatttactgaagaatatctaacgggagaggattatgattcccagaggaaaaattctgaggatacactatatgaaaacaaagaaatagacggcagggattctgatcttctggtagatggagatttaggcgaatatgatttttatgaatataaagaatatgaagataaaccaacaagcccccctaatgaagaatttggtccaggtgtaccagcagaaactgatattacagaaacaagcataaatggccatggtgcatatggagagaaaggacagaaaggagaaccagcagtggttgagcctggtatgcttgtcgaaggaccaccaggaccagcaggacctgcaggtattatgggtcctccaggtctacaaggccccactggaccccctggtgaccctggcgataggggccccccaggacgtcctggcttaccaggggctgatggtctacctggtcctcctggtactatgttgatgttaccgttccgttatggtggtgatggttccaaaggaccaaccatctctgctcaggaagctcaggctcaagctattcttcagcaggctcggattgctctgagaggcccacctggcccaatgggtctaactggaagaccaggtcctgtgggggggcctggttcatctggggccaaaggtgagagtggtgatcc

SEQ ID NO: 121512 - DNA, 776 bp, Homo sapiens
  Payload ID: 3829
  Gene Symbol: COL11A1
  Gene Name: collagen, type XI, alpha 1
  ENST ID: ENST00000447608
  CDS Start-End: 1-603
tacagagtttcaaagcaagcacaactcagtgccccaacaaaacagttatttccaggtggaactttcccagaagacttttcaatactatttacagtaaaaccaaaaaaaggaattcagtctttccttttatctatatataatgagcatggtattcagcaaattggtgttgaggttgggagatcacctgtttttctgtttgaagaccacactggaaaacctgccccagaagactatcccctcttcagaactgttaacatcgctgacgggaagtggcatcgggtagcaatcagcgtggagaagaaaactgtgacaatgattgttgattgtaagaagaaaaccacgaaaccacttgatagaagtgagagagcaattgttgataccaatggaatcacggtttttggaacaaggattttggatgaagaagtttttgagggggacattcagcagtttttgatcacaggtgatcccaaggcagcatatgactactgtgagcattatagtccagactgtgactcttcagcacccaaggctgctcaagctcaggaacctcagatagatgaggtgaggagcacaagaccagagaaggtcttcgtatttcagtgatatggacatcgcagtgcagtttttgaacttatacttatttattccattttaattaagctatgctttgtattttaattgtgttgtaatatttccaggaaaaagtgacttgaatatatttggtacttgttttcttgctgtttaagcatttgattacataaatttattagcaataa

SEQ ID NO: 121513 - DNA, 5442 bp, Homo sapiens
  Payload ID: 3829
  Gene Symbol: COL11A1
  Gene Name: collagen, type XI, alpha 1
  Uniprot ID: P12107
  ENST ID: ENST00000512756
  CDS Start-End: 302-5374
tgttggtggaagcccctcatctgccttcattctgaaggcagggcccggcagaggaaggatcagagggtcgcggccggagggtcccggccggtggggccaactcagagggagaggaaagggctagagacacgaagaacgcaaaccatcaaatttagaagaaaaagccctttgactttttccccctctccctccccaatggctgtgtagcaaacatccctggcgataccttggaaaggacgaagttggtctgcagtcgcaatttcgtgggttgagttcacagttgtgagtgcggggctcggagatggagccgtggtcctctaggtggaaaacgaaacggtggctctgggatttcaccgtaacaaccctcgcattgaccttcctcttccaagctagagaggtcagaggagctgctccagttgatgtactaaaagcactagattttcacaattctccagagggaatatcaaaaacaacgggattttgcacaaacagaaagaattctaaaggctcagatactgcttacagagtttcaaagcaagcacaactcagtgccccaacaaaacagttatttccaggtggaactttcccagaagacttttcaatactatttacagtaaaaccaaaaaaaggaattcagtctttccttttatctatatataatgagcatggtattcagcaaattggtgttgaggttgggagatcacctgtttttctgtttgaagaccacactggaaaacctgccccagaagactatcccctcttcagaactgttaacatcgctgacgggaagtggcatcgggtagcaatcagcgtggagaagaaaactgtgacaatgattgttgattgtaagaagaaaaccacgaaaccacttgatagaagtgagagagcaattgttgataccaatggaatcacggtttttggaacaaggattttggatgaagaagtttttgagggggacattcagcagtttttgatcacaggtgatcccaaggcagcatatgactactgtgagcattatagtccagactgtgactcttcagcacccaaggctgctcaagctcaggaacctcagatagatgagtatgcaccagaggatataatcgaatatgactatgagtatggggaagcagagtataaagaggctgaaagtgtaacagagggacccactgtaactgaggagacaatagcacagacggagataaatggccatggtgcatatggagagaaaggacagaaaggagaaccagcagtggttgagcctggtatgcttgtcgaaggaccaccaggaccagcaggacctgcaggtattatgggtcctccaggtctacaaggccccactggaccccctggtgaccctggcgataggggccccccaggacgtcctggcttaccaggggctgatggtctacctggtcctcctggtactatgttgatgttaccgttccgttatggtggtgatggttccaaaggaccaaccatctctgctcaggaagctcaggctcaagctattcttcagcaggctcggattgctctgagaggcccacctggcccaatgggtctaactggaagaccaggtcctgtgggggggcctggttcatctggggccaaaggtgagagtggtgatccaggtcctcagggccctcgaggcgtccagggtccccctggtccaacgggaaaacctggaaaaaggggtcgtccaggtgcagatggaggaagaggaatgccaggagaacctggggcaaagggagatcgagggtttgatggacttccgggtctgccaggtgacaaaggtcacaggggtgaacgaggtcctcaaggtcctccaggtcctcctggtgatgatggaatgaggggagaagatggagaaattggaccaagaggtcttccaggtgaagctggcccacgaggtttgctgggtccaaggggaactccaggagctccagggcagcctggtatggcaggtgtagatggccccccaggaccaaaagggaacatgggtccccaaggggagcctgggcctccaggtcaacaagggaatccaggacctcagggtcttcctggtccacaaggtccaattggtcctcctggtgaaaaaggaccacaaggaaaaccaggacttgctggacttcctggtgctgatgggcctcctggtcatcctgggaaagaaggccagtctggagaaaagggggctctgggtccccctggtccacaaggtcctattggatacccgggcccccggggagtaaagggagcagatggtgtcagaggtctcaagggatctaaaggtgaaaagggtgaagatggttttccaggattcaaaggtgacatgggtctaaaaggtgacagaggagaagttggtcaaattggcccaagaggggaagatggccctgaaggacccaaaggtcgagcaggcccaactggagacccaggtccttcaggtcaagcaggagaaaagggaaaacttggagttccaggattaccaggatatccaggaagacaaggtccaaagggttccactggattccctgggtttccaggtgccaatggagagaaaggtgcacggggagtagctggcaaaccaggccctcggggtcagcgtggtccaacgggtcctcgaggttcaagaggtgcaagaggtcccactgggaaacctgggccaaagggcacttcaggtggcgatggccctcctggccctccaggtgaaagaggtcctcaaggacctcagggtccagttggattccctggaccaaaaggccctcctggaccacctgggaaggatgggctgccaggacaccctgggcaacgtggggagactggatttcaaggcaagaccggccctcctgggccagggggagtggttggaccacagggaccaaccggtgagactggtccaataggggaacgtgggcatcctggccctcctggccctcctggtgagcaaggtcttcctggtgctgcaggaaaagaaggtgcaaagggtgatccaggtcctcaaggtatctcagggaaagatggaccagcaggattacgtggtttcccaggggaaagaggtcttcctggagctcagggtgcacctggactgaaaggaggggaaggtccccagggcccaccaggtccagttggctcaccaggagaacgtgggtcagcaggtacagctggcccaattggtttaccagggcgcccgggacctcagggtcctcctggtccagctggagagaaaggtgctcctggagaaaaaggtccccaagggcctgcagggagagatggagttcaaggtcctgttggtctcccagggccagctggtcctgccggctcccctggggaagacggagacaagggtgaaattggtgagccgggacaaaaaggcagcaagggtgacaagggagaaaatggccctcccggtcccccaggtcttcaaggaccagttggtgcccctggaattgctggaggtgatggtgaaccaggtcctagaggacagcaggggatgtttgggcaaaaaggtgatgagggtgccagaggcttccctggacctcctggtccaataggtcttcagggtctgccaggcccacctggtgaaaaaggtgaaaatggggatgttggtcccatggggccacctggtcctccaggcccaagaggccctcaaggtcccaatggagctgatggaccacaaggacccccagggtctgttggttcagttggtggtgttggagaaaagggtgaacctggagaagcagggaacccagggcctcctggggaagcaggtgtaggcggtcccaaaggagaaagaggagagaaaggggaagctggtccacctggagctgctggacctccaggtgccaaggggccaccaggtgatgatggccctaagggtaacccgggtcctgttggttttcctggagatcctggtcctcctggggaacctggccctgcaggtcaagatggtgttggtggtgacaagggtgaagatggagatcctggtcaaccgggtcctcctggcccatctggtgaggctggcccaccaggtcctcctggaaaacgaggtcctcctggagctgcaggtgcagagggaagacaaggtgaaaaaggtgctaagggggaagcaggtgcagaaggtcctcctggaaaaaccggcccagtcggtcctcagggacctgcaggaaagcctggtccagaaggtcttcggggcatccctggtcctgtgggagaacaaggtctccctggagctgcaggccaagatggaccacctggtcctatgggacctcctggcttacctggtctcaaaggtgaccctggctccaagggtgaaaagggacatcctggtttaattggcctgattggtcctccaggagaacaaggggaaaaaggtgaccgagggctccctggaactcaaggatctccaggagcaaaaggggatgggggaattcctggtcctgctggtcccttaggtccacctggtcctccaggtttaccaggtcctcaaggcccaaagggtaacaaaggctctactggacccgctggccagaaaggtgacagtggtcttccagggcctcctgggtctccaggtccacctggtgaagtcattcagcctttaccaatcttgtcctccaaaaaaacgagaagacatactgaaggcatgcaagcagatgcagatgataatattcttgattactcggatggaatggaagaaatatttggttccctcaattccctgaaacaagacattgagcatatgaaatttccaatgggtactcagaccaatccagcccgaacttgtaaagacctgcaactcagccatcctgacttcccagatggtgaatattggattgatcctaaccaaggttgctcaggagattccttcaaagtttactgtaatttcacatctggtggtgagacttgcatttatccagacaaaaaatctgagggagtaagaatttcatcatggccaaaggagaaaccaggaagttggtttagtgaatttaagaggggaaaactgctttcatacttagatgttgaaggaaattccatcaatatggtgcaaatgacattcctgaaacttctgactgcctctgctcggcaaaatttcacctaccactgtcatcagtcagcagcctggtatgatgtgtcatcaggaagttatgacaaagcacttcgcttcctgggatcaaatgatgaggagatgtcctatgacaataatccttttatcaaaacactgtatgatggttgtgcgtccagaaaaggctatgaaaagactgtcattgaaatcaatacaccaaaaattgatcaagtacctattgttgatgtcatgatcaatgactttggtgatcagaatcagaagttcggatttgaagttggtcctgtttgttttcttggctaagattaagacaaagaacatatcaaatcaacagaaaatataccttggtgccaccaacccattttgtgcca

SEQ ID NO: 121514 - DNA, 5289 bp, Homo sapiens
  Payload ID: 3829
  Gene Symbol: COL11A1
  Gene Name: collagen, type XI, alpha 1
  ENST ID: ENST00000635193
  CDS Start-End: 1-2084
atcccaaggcagcatatgactactgtgagcattatagtccagactgtgactcttcagcacccaaggctgctcaagctcaggaacctcagatagatgagtatgcaccagaggatataatcgaatatgactatgagtatggggaagcagagtataaagaggctgaaagtgtaacagagggacccactgtaactgaggagacaatagcacagacggaggcaaacatcgttgatgattttcaagaatacaactatggaacaatggaaagttaccagacagaagctcctaggcatgtttctgggacaaatgagccaaatccagttgaagaaatatttactgaagaatatctaacgggagaggattatgattcccagaggaaaaattctgaggatacactatatgaaaacaaagaaatagacggcagggattctgatcttctggtagatggagatttaggcgaatatgatttttatgaatataaagaatatgaagataaaccaacaagcccccctaatgaagaatttggtccaggtgtaccagcagaaactgatattacagaaacaagcataaatggccatggtgcatatggagagaaaggacagaaaggagaaccagcagtggttgagcctggtatgcttgtcgaaggaccaccaggaccagcaggacctgcaggtattatgggtcctccaggtctacaaggccccactggaccccctggtgaccctggcgataggggccccccaggacgtcctggcttaccaggggctgatggtctacctggtcctcctggtactatgttgatgttaccgttccgttatggtggtgatggttccaaaggaccaaccatctctgctcaggaagctcaggctcaagctattcttcagcaggctcggattgctctgagaggcccacctggcccaatgggtctaactggaagaccaggtcctgtgggggggcctggttcatctggggccaaaggtgagagtggtgatccaggtcctcagggccctcgaggcgtccagggtccccctggtccaacgggaaaacctggaaaaaggggtcgtccaggtgcagatggaggaagaggaatgccaggagaacctggggcaaagggagatcgagggtttgatggacttccgggtctgccaggtgacaaaggtcacaggggtgaacgaggtcctcaaggtcctccaggtcctcctggtgatgatggaatgaggggagaagatggagaaattggaccaagaggtcttccaggtgaagctggcccacgaggtttgctgggtccaaggggaactccaggagctccagggcagcctggtatggcaggtgtagatggccccccaggaccaaaagggaacatgggtccccaaggggagcctgggcctccaggtcaacaagggaatccaggacctcagggtcttcctggtccacaaggtccaattggtcctcctggtgaaaaaggaccacaaggaaaaccaggacttgctggacttcctggtgctgatgggcctcctggtcatcctgggaaagaaggccagtctggagaaaagggggctctgggtccccctggtccacaaggtcctattggatacccgggcccccggggagtaaagggagcagatggtgtcagaggtctcaagggatctaaaggtgaaaagggtgaagatggttttccaggattcaaaggtgacatgggtctaaaaggtgacagaggagaagttggtcaaattggcccaagaggggaagatggccctgaaggacccaaaggtcgagcaggcccaactggagacccaggtccttcaggtcaagcaggagaaaagggaaaacttggagttccaggattaccaggatatccaggaagacaaggtccaaaggatttcagatgtcattggttccactggattccctgggtttccaggtgccaatggagagaaaggtgcacggggagtagctggcaaaccaggccctcggggtcagcgtggtccaacgggtcctcgaggttcaagaggtgcaagaggtcccactgggaaacctgggccaaagggcacttcaggtggcgatggccctcctggccctccaggtgaaagaggtcctcaaggacctcagggtccagttggattccctggaccaaaaggccctcctggaccacctgggaaggatgggctgccaggacaccctgggcaacgtggggagactggatttcaaggcaagaccggccctcctgggccagggggagtggttggaccacagggaccaaccggtgagactggtccaataggggaacgtgggcatcctggccctcctggccctcctggtgagcaaggtcttcctggtgctgcaggaaaagaaggtgcaaagggtgatccaggtcctcaaggtatctcagggaaagatggaccagcaggattacgtggtttcccaggggaaagaggtcttcctggagctcagggtgcacctggactgaaaggaggggaaggtccccagggcccaccaggtccagttggctcaccaggagaacgtgggtcagcaggtacagctggcccaattggtttaccagggcgcccgggacctcagggtcctcctggtccagctggagagaaaggtgctcctggagaaaaaggtccccaagggcctgcagggagagatggagttcaaggtcctgttggtctcccagggccagctggtcctgccggctcccctggggaagacggagacaagggtgaaattggtgagccgggacaaaaaggcagcaagggtgacaagggagaaaatggccctcccggtcccccaggtcttcaaggaccagttggtgcccctggaattgctggaggtgatggtgaaccaggtcctagaggacagcaggggatgtttgggcaaaaaggtgatgagggtgccagaggcttccctggacctcctggtccaataggtcttcagggtctgccaggcccacctggtgaaaaaggtgaaaatggggatgttggtcccatggggccacctggtcctccaggcccaagaggccctcaaggtcccaatggagctgatggaccacaaggacccccagggtctgttggttcagttggtggtgttggagaaaagggtgaacctggagaagcagggaacccagggcctcctggggaagcaggtgtaggcggtcccaaaggagaaagaggagagaaaggggaagctggtccacctggagctgctggacctccaggtgccaaggggccaccaggtgatgatggccctaagggtaacccgggtcctgttggttttcctggagatcctggtcctcctggggaacctggccctgcaggtcaagatggtgttggtggtgacaagggtgaagatggagatcctggtcaaccgggtcctcctggcccatctggtgaggctggcccaccaggtcctcctggaaaacgaggtcctcctggagctgcaggtgcagagggaagacaaggtgaaaaaggtgctaagggggaagcaggtgcagaaggtcctcctggaaaaaccggcccagtcggtcctcagggacctgcaggaaagcctggtccagaaggtcttcggggcatccctggtcctgtgggagaacaaggtctccctggagctgcaggccaagatggaccacctggtcctatgggacctcctggcttacctggtctcaaaggtgaccctggctccaagggtgaaaagggacatcctggtttaattggcctgattggtcctccaggagaacaaggggaaaaaggtgaccgagggctccctggaactcaaggatctccaggagcaaaaggggatgggggaattcctggtcctgctggtcccttaggtccacctggtcctccaggtttaccaggtcctcaaggcccaaagggtaacaaaggctctactggacccgctggccagaaaggtgacagtggtcttccagggcctcctgggtctccaggtccacctggtgaagtcattcagcctttaccaatcttgtcctccaaaaaaacgagaagacatactgaaggcatgcaagcagatgcagatgataatattcttgattactcggatggaatggaagaaatatttggttccctcaattccctgaaacaagacattgagcatatgaaatttccaatgggtactcagaccaatccagcccgaacttgtaaagacctgcaactcagccatcctgacttcccagatggtgaatattggattgatcctaaccaaggttgctcaggagattccttcaaagtttactgtaatttcacatctggtggtgagacttgcatttatccagacaaaaaatctgagggagtaagaatttcatcatggccaaaggagaaaccaggaagttggtttagtgaatttaagaggggaaaactgctttcatacttagatgttgaaggaaattccatcaatatggtgcaaatgacattcctgaaacttctgactgcctctgctcggcaaaatttcacctaccactgtcatcagtcagcagcctggtatgatgtgtcatcaggaagttatgacaaagcacttcgcttcctgggatcaaatgatgaggagatgtcctatgacaataatccttttatcaaaacactgtatgatggttgtgcgtccagaaaaggctatgaaaagactgtcattgaaatcaatacaccaaaaattgatcaagtacctattgttgatgtcatgatcaatgactttggtgatcagaatcagaagttcggatttgaagttggtcctgtttgttttcttggctaagattaagacaaagaacatatcaaatcaacagaaaatataccttggtgccaccaacccattttgtgccacatgcaagttttgaataaggatggtatagaaaacaacgctgcatatacaggtaccatttaggaaataccgatgcctttgtgggggcagaatcacatggcaaaagctttgaaaatcataaagatataagttggtgtggctaagatggaaacagggctgattcttgattcccaattctcaactctccttttcctatttgaatttctttggtgctgtagaaaacaaaaaaagaaaaatatatattcataaaaaatatggtgctcattctcatccatccaggatgtactaaaacagtgtgtttaataaattgtaattattttgtgtacagttctatactgttatctgtgtccatttccaaaacttgcacgtgtccctgaattccatctgactctaattttatgagaattgcagaactctgatggcaataaatatatgtattatgaaaaaataaagttgtaatttctgatg

SEQ ID NO: 121515 - DNA, 6425 bp, Homo sapiens
  Payload ID: 3830
  Gene Symbol: COL11A2
  Gene Name: collagen, type XI, alpha 2
  ENST ID: ENST00000341947
  CDS Start-End: 229-5439
cacacagaagcggcagccaccgaggagggagcagtgccgggagccccgacggcgccttgctgcatggagctgggccgctgacagctgtcgctgcccgcagcctctgacctccctgggaccccggcgtctgaggctcatagtctgctccctgtcttctgtcagcctcagggcatccagcgtctcaggccgacctgggtccctgggacccggcgtttcggcttctcagccatggagcggtgcagccgctgccatcgcctcctcctcctcctacctctggtgctggggctgagcgcggccccaggctgggcaggtgcaccccctgtggatgtgctccgggccctgaggttcccctccctccctgatggtgtccggagagcgaaaggcatctgtccagctgatgtggcctaccgagtggcacgacctgcccagctcagtgcacccactcgccagcttttcccaggaggatttcccaaagatttctctctgctgactgttgtccggacccgccctggtctccaagctcccctcctgactctctacagtgcccagggtgtccgacagctgggcctggagctgggccgacctgtccgcttcctgtatgaagaccagactgggcggcctcaacctccctctcagccagtcttccgaggcctcagcctagcagatggcaagtggcaccgtgtggctgtggctgtgaagggccagtctgtcaccctcattgttgactgcaagaagcgagtcacccggcctctcccccgaagtgctcgtccagtattggacacccatggagtgatcatctttggtgcccgtattctggatgaagaagtctttgagggtgatgtccaggagctggccattgtcccaggggtccaggcagcctatgaatcatgtgaacagaaggagctggaatgcgaggggggccagagggaaagaccccaaaaccaacagcctcacagagcccagagatctccacagcagcaaccatcaagacttcacaggccacaaaatcaggaaccccagagccagcccactgagtctctctactatgactacgagcccccctattatgatgtgatgactacggggacaacccctgattatcaggaccccaccccaggtgaagaggaagaaatcctggagtcgagcctcttgccaccccttgaggaggagcagacagatctccaggtcccccccacagccgacaggttccaggcagaggaatatggggagggtggcacagacccccctgaagggccctacgattacacctatggctatggggatgattatcgtgaggagacagagcttggccctgccctctctgcggagacagcccactcaggagccgctgcccatggaccccgagggctgaagggagagaaaggagagcctgcagtgttggaacctggtatgctcgtggaggggccccctggcccagaaggccctgcgggattgattggtccccctggcatccaggggaacccaggcccagttggagaccctggagagaggggcccccctggccgagcagggctccctggatcagatggggctcctggtcctcctggcacatctctcatgctcccattccggtttggcagtggtgggggtgacaagggccctgtggtggcggcccaggaggctcaggcccaggcgatcctgcagcaggcgaggctggcgctccgtggaccccctggccccatgggatacacagggcgccctggacccttgggccaacctgggagccctggcctgaaaggagagtctggagacttaggacctcagggccccagaggacctcagggcctcacaggccctcctggcaaggctgggcgaaggggccgggcaggtgctgatggagcccgagggatgcctggagatcctggagtgaagggtgaccgaggttttgatggactcccagggctccctggagagaagggccataggggtgatactggtgcccagggccttcctggtccccctggtgaggatggagagaggggagatgacggggagattgggcctcgagggctgcctggagagtcgggacctcgaggtctccttggccccaaaggcccacctggtattcctggaccccctggcgtccgaggcatggatggtccccagggccccaaagggagcttgggaccccagggagagccaggacctcctggacaacagggcacccctgggacccagggtcttcccgggccccagggtgccatcggccctcatggagagaagggtcctcaagggaagccagggctccccggcatgcctggctcagacggacccccgggtcacccagggaaggaaggtccccctggaaccaaaggaaaccagggtccctctggacctcagggacctctaggatacccaggacctcgaggggtcaagggtgtggacggaattcggggtctgaagggtcataagggtgagaagggtgaggatggctttcctgggttcaaaggtgacataggcgtgaaaggtgacaggggcgaagttggagtccctggttccaggggagaggatggtcctgaggggccaaagggacgcactggaccgactggagaccctgggcccccagggctcatgggcgagaagggcaagctgggtgttcctggtctgcctggctatcctggacgtcagggacccaaggggtccctaggatttcctggctttcctggtgccagtggagagaagggagcccggggcctgtcggggaagtcagggcctcggggagaacggggccccacgggtccacggggtcagcggggaccccgaggtgccactgggaagtctggagctaagggaacatctggtggtgatggcccccatgggccccctggagagaggggcctccctggacctcagggtcccaacgggtttcctggaccgaaaggacccccgggcccccctgggaaggatgggctgccgggacacccaggccaaagaggagaagtgggtttccaagggaagaccggcccccctggtcctccaggagtggtgggacctcagggagcagcaggagaaaccggccctatgggggagagaggtcacccaggccccccggggccccctggagagcagggactacctgggacagctggaaaagaaggaacaaagggtgaccctggtccccctggggccccagggaaggatggtcctgctggtctgaggggattcccaggagagagaggcctcccaggcactgctggtggacctggtttgaaggggaatgaaggtccgtctggcccccctggccctgcaggctcccctggggaacgaggtgcagcaggatcagggggacccattggtccgccagggcgcccaggcccgcagggtccccctggagcagcaggagagaaaggtgtcccaggtgagaagggccccattggcccgactggccgagatggagtgcagggtcctgtggggcttcctggtcctgctgggcctccaggtgtggctggagaggatggagacaagggtgaggtgggggaccccggacagaagggcaccaaagggaacaagggtgaacatggccctcctggaccccctggacccattggtcctgtggggcagcctggagcagcgggagcagatggggagcccggagctcggggaccccagggacactttggagccaaaggtgatgaaggaacaagaggattcaatgggcccccaggacccattggcctacagggtttgccaggcccctctggggagaagggagaaacaggagatgtgggtcctatgggaccacctggccccccaggacctcgaggtccagctggacccaatggcgctgatggcccacaaggtcccccaggaggtgttgggaacctgggtccccctggagagaagggggaaccaggagagtcaggatctccagggatccagggcgagccaggtgtcaagggtccacgcggggaacgtggagagaaaggagagtcggggcagccaggagagccagggccaccagggcctaaaggccccacaggcgatgatggccccaaagggaaccctggtcctgttggttttcctggtgaccctggcccccctggagaaggtggccctcggggccaggatggtgctaagggtgaccgaggcgaggatggtgagccaggacagcctggatcccctggtcccaccggggagaatggacccccagggccacttggaaagcgaggtcctgctggctcgcctggttccgaggggcgacaaggagggaagggagccaagggagatcctggcgctataggtgccccggggaagacaggcccggtgggtcctgcaggcccagcagggaaacctggccctgatggtctgagggggctcccaggctcagtgggtcagcaaggccgacctggagctacaggccaggctgggcccccaggtcctgtgggacccccagggctgcctggtctccggggcgatgctggagccaagggagagaagggccacccaggtctcattggactgattgggcccccgggtgagcagggagagaagggagatcggggacttcctgggcctcagggctcccctgggcagaagggtgagatgggtatcccaggagcatccggccccattggtcctggaggtccccccggcctccccggacctgctggccccaaaggagccaaaggagccacaggcccaggcggacccaagggagagaagggtgtgcagggccctccaggacacccgggtcccccaggcgaggtgatccagccactgcccattcagatgcccaagaagactcggcgctcggtggatggaagccgtctgatgcaggaagatgaggccataccgaccgggggagcccccggcagtcctggggggctggaggagatctttggctcactcgactccctgcgggaggagatcgagcagatgaggcggccaacagggacccaggacagccctgctcgcacctgccaggacctgaagctgtgccacccagagcttcccgatggagagtactgggtcgaccccaaccagggctgtgctcgggatgccttccgagttttctgcaacttcacagcagggggtgagacctgtgtgacgcctagggatgacgtcacgcagttctcttacgtggactcagagggctccccagtgggtgtggtccagctcaccttcctgcggctgctcagcgtctcagcccaccaggacgtctcctacccctgctctggagcagcccgtgacggtcccctgagactccgtggggccaatgaggatgagctgagcccggagactagcccctatgtcaaagaattcagagatggctgccagacacagcaaggccggacggtgctggaggtgcgaacgcctgtgctggagcagctgccagtgctggatgcctccttctcagacctgggagccccaccgaggcggggaggggtgctgctggggcctgtctgcttcatgggataggaccgtctctgtctgatcctgtccattcggaaccaggcccacctggaatcccacaacatcagctctgtgccacctcccaagagggctcctcactatctagggagccctgggccagggcgtggagagccctcagtcggggcaggccaggggaggggtgaagtggttgcctggacaccccacgggaggagtggcatctggggctcttggccctcccacctggagcctgttacccgttagagagctgagacccttatttaaaactcacctcccaatcaccccaaacaaatggaagagaagagaaaggacatggcgtattttgtatttaaaagtaattgtattaattatttaaagtgtggaaagcaaaataacaaaaaagagaaacgccaacaaaaatcagcagatgttgaagacaggggtctcgggggtgggctccggcacccacatcctggagtcaggactttcctcagtgactgtgtgtaggggggtttcagggctgaaccccacctccctcccaccttcctcccacctcacctgtcgcacccactgtgaaagttggaatatgtggtctccctggcctcagggctctgactctgccagggtggggctctctaacccacaggtgttggctgcctggcccatgtgcccactgtctcttccacttggtctgggtttggcaggcactgcctgctacttgagggccaggatgctcccccagggaagaaacggaatagtgtggggtgtgtgcagggctgcatcccgcagatggctggaatattaaaattcttctatattggctggtaaattgccatggccctgagccactgagtatgttcattgccacccctgtccctcccctgggcacccctcactttccctgatcctgcaattaaagggttaatgtgtggcatatggaagggactcccaggaccctgtgcccagcttccatgctgactgatggttaaataatgtgattgtctcctcccagg

SEQ ID NO: 121516 - DNA, 6104 bp, Homo sapiens
  Payload ID: 3830
  Gene Symbol: COL11A2
  Gene Name: collagen, type XI, alpha 2
  ENST ID: ENST00000361917
  CDS Start-End: 229-5118
cacacagaagcggcagccaccgaggagggagcagtgccgggagccccgacggcgccttgctgcatggagctgggccgctgacagctgtcgctgcccgcagcctctgacctccctgggaccccggcgtctgaggctcatagtctgctccctgtcttctgtcagcctcagggcatccagcgtctcaggccgacctgggtccctgggacccggcgtttcggcttctcagccatggagcggtgcagccgctgccatcgcctcctcctcctcctacctctggtgctggggctgagcgcggccccaggctgggcaggtgcaccccctgtggatgtgctccgggccctgaggttcccctccctccctgatggtgtccggagagcgaaaggcatctgtccagctgatgtggcctaccgagtggcacgacctgcccagctcagtgcacccactcgccagcttttcccaggaggatttcccaaagatttctctctgctgactgttgtccggacccgccctggtctccaagctcccctcctgactctctacagtgcccagggtgtccgacagctgggcctggagctgggccgacctgtccgcttcctgtatgaagaccagactgggcggcctcaacctccctctcagccagtcttccgaggcctcagcctagcagatggcaagtggcaccgtgtggctgtggctgtgaagggccagtctgtcaccctcattgttgactgcaagaagcgagtcacccggcctctcccccgaagtgctcgtccagtattggacacccatggagtgatcatctttggtgcccgtattctggatgaagaagtctttgagggtgatgtccaggagctggccattgtcccaggggtccaggcagcctatgaatcatgtgaacagaaggagctggaatgcgaggggggccagagggaaagaccccaaaaccaacagcctcacagagcccagagatctccacagcagcaaccatcaagacttcacaggccacaaaatcaggaaccccagagccaggctgcccatggaccccgagggctgaagggagagaaaggagagcctgcagtgttggaacctggtatgctcgtggaggggccccctggcccagaaggccctgcgggattgattggtccccctggcatccaggggaacccaggcccagttggagaccctggagagaggggcccccctggccgagcagggctccctggatcagatggggctcctggtcctcctggcacatctctcatgctcccattccggtttggcagtggtgggggtgacaagggccctgtggtggcggcccaggaggctcaggcccaggcgatcctgcagcaggcgaggctggcgctccgtggaccccctggccccatgggatacacagggcgccctggacccttgggccaacctgggagccctggcctgaaaggagagtctggagacttaggacctcagggccccagaggacctcagggcctcacaggccctcctggcaaggctgggcgaaggggccgggcaggtgctgatggagcccgagggatgcctggagatcctggagtgaagggtgaccgaggttttgatggactcccagggctccctggagagaagggccataggggtgatactggtgcccagggccttcctggtccccctggtgaggatggagagaggggagatgacggggagattgggcctcgagggctgcctggagagtcgggacctcgaggtctccttggccccaaaggcccacctggtattcctggaccccctggcgtccgaggcatggatggtccccagggccccaaagggagcttgggaccccagggagagccaggacctcctggacaacagggcacccctgggacccagggtcttcccgggccccagggtgccatcggccctcatggagagaagggtcctcaagggaagccagggctccccggcatgcctggctcagacggacccccgggtcacccagggaaggaaggtccccctggaaccaaaggaaaccagggtccctctggacctcagggacctctaggatacccaggacctcgaggggtcaagggtgtggacggaattcggggtctgaagggtcataagggtgagaagggtgaggatggctttcctgggttcaaaggtgacataggcgtgaaaggtgacaggggcgaagttggagtccctggttccaggggagaggatggtcctgaggggccaaagggacgcactggaccgactggagaccctgggcccccagggctcatgggcgagaagggcaagctgggtgttcctggtctgcctggctatcctggacgtcagggacccaaggggtccctaggatttcctggctttcctggtgccagtggagagaagggagcccggggcctgtcggggaagtcagggcctcggggagaacggggccccacgggtccacggggtcagcggggaccccgaggtgccactgggaagtctggagctaagggaacatctggtggtgatggcccccatgggccccctggagagaggggcctccctggacctcagggtcccaacgggtttcctggaccgaaaggacccccgggcccccctgggaaggatgggctgccgggacacccaggccaaagaggagaagtgggtttccaagggaagaccggcccccctggtcctccaggagtggtgggacctcagggagcagcaggagaaaccggccctatgggggagagaggtcacccaggccccccggggccccctggagagcagggactacctgggacagctggaaaagaaggaacaaagggtgaccctggtccccctggggccccagggaaggatggtcctgctggtctgaggggattcccaggagagagaggcctcccaggcactgctggtggacctggtttgaaggggaatgaaggtccgtctggcccccctggccctgcaggctcccctggggaacgaggtgcagcaggatcagggggacccattggtccgccagggcgcccaggcccgcagggtccccctggagcagcaggagagaaaggtgtcccaggtgagaagggccccattggcccgactggccgagatggagtgcagggtcctgtggggcttcctggtcctgctgggcctccaggtgtggctggagaggatggagacaagggtgaggtgggggaccccggacagaagggcaccaaagggaacaagggtgaacatggccctcctggaccccctggacccattggtcctgtggggcagcctggagcagcgggagcagatggggagcccggagctcggggaccccagggacactttggagccaaaggtgatgaaggaacaagaggattcaatgggcccccaggacccattggcctacagggtttgccaggcccctctggggagaagggagaaacaggagatgtgggtcctatgggaccacctggccccccaggacctcgaggtccagctggacccaatggcgctgatggcccacaaggtcccccaggaggtgttgggaacctgggtccccctggagagaagggggaaccaggagagtcaggatctccagggatccagggcgagccaggtgtcaagggtccacgcggggaacgtggagagaaaggagagtcggggcagccaggagagccagggccaccagggcctaaaggccccacaggcgatgatggccccaaagggaaccctggtcctgttggttttcctggtgaccctggcccccctggagaaggtggccctcggggccaggatggtgctaagggtgaccgaggcgaggatggtgagccaggacagcctggatcccctggtcccaccggggagaatggacccccagggccacttggaaagcgaggtcctgctggctcgcctggttccgaggggcgacaaggagggaagggagccaagggagatcctggcgctataggtgccccggggaagacaggcccggtgggtcctgcaggcccagcagggaaacctggccctgatggtctgagggggctcccaggctcagtgggtcagcaaggccgacctggagctacaggccaggctgggcccccaggtcctgtgggacccccagggctgcctggtctccggggcgatgctggagccaagggagagaagggccacccaggtctcattggactgattgggcccccgggtgagcagggagagaagggagatcggggacttcctgggcctcagggctcccctgggcagaagggtgagatgggtatcccaggagcatccggccccattggtcctggaggtccccccggcctccccggacctgctggccccaaaggagccaaaggagccacaggcccaggcggacccaagggagagaagggtgtgcagggccctccaggacacccgggtcccccaggcgaggtgatccagccactgcccattcagatgcccaagaagactcggcgctcggtggatggaagccgtctgatgcaggaagatgaggccataccgaccgggggagcccccggcagtcctggggggctggaggagatctttggctcactcgactccctgcgggaggagatcgagcagatgaggcggccaacagggacccaggacagccctgctcgcacctgccaggacctgaagctgtgccacccagagcttcccgatggagagtactgggtcgaccccaaccagggctgtgctcgggatgccttccgagttttctgcaacttcacagcagggggtgagacctgtgtgacgcctagggatgacgtcacgcagttctcttacgtggactcagagggctccccagtgggtgtggtccagctcaccttcctgcggctgctcagcgtctcagcccaccaggacgtctcctacccctgctctggagcagcccgtgacggtcccctgagactccgtggggccaatgaggatgagctgagcccggagactagcccctatgtcaaagaattcagagatggctgccagacacagcaaggccggacggtgctggaggtgcgaacgcctgtgctggagcagctgccagtgctggatgcctccttctcagacctgggagccccaccgaggcggggaggggtgctgctggggcctgtctgcttcatgggataggaccgtctctgtctgatcctgtccattcggaaccaggcccacctggaatcccacaacatcagctctgtgccacctcccaagagggctcctcactatctagggagccctgggccagggcgtggagagccctcagtcggggcaggccaggggaggggtgaagtggttgcctggacaccccacgggaggagtggcatctggggctcttggccctcccacctggagcctgttacccgttagagagctgagacccttatttaaaactcacctcccaatcaccccaaacaaatggaagagaagagaaaggacatggcgtattttgtatttaaaagtaattgtattaattatttaaagtgtggaaagcaaaataacaaaaaagagaaacgccaacaaaaatcagcagatgttgaagacaggggtctcgggggtgggctccggcacccacatcctggagtcaggactttcctcagtgactgtgtgtaggggggtttcagggctgaaccccacctccctcccaccttcctcccacctcacctgtcgcacccactgtgaaagttggaatatgtggtctccctggcctcagggctctgactctgccagggtggggctctctaacccacaggtgttggctgcctggcccatgtgcccactgtctcttccacttggtctgggtttggcaggcactgcctgctacttgagggccaggatgctcccccagggaagaaacggaatagtgtggggtgtgtgcagggctgcatcccgcagatggctggaatattaaaattcttctatattggctggtaaattgccatggccctgagccactgagtatgttcattgccacccctgtccctcccctgggcacccctcactttccctgatcctgcaattaaagggttaatgtgtggcatatggaagggactcccaggaccctgtgcccagcttccatgctgactgatggttaaataatgtgattgtctcctcccagg

SEQ ID NO: 121517 - DNA, 6209 bp, Homo sapiens
  Payload ID: 3830
  Gene Symbol: COL11A2
  Gene Name: collagen, type XI, alpha 2
  ENST ID: ENST00000374708
  CDS Start-End: 260-5212
tgggggctctgggcgccagggtggccggggacacacagaagcggcagccaccgaggagggagcagtgccgggagccccgacggcgccttgctgcatggagctgggccgctgacagctgtcgctgcccgcagcctctgacctccctgggaccccggcgtctgaggctcatagtctgctccctgtcttctgtcagcctcagggcatccagcgtctcaggccgacctgggtccctgggacccggcgtttcggcttctcagccatggagcggtgcagccgctgccatcgcctcctcctcctcctacctctggtgctggggctgagcgcggccccaggctgggcaggtgcaccccctgtggatgtgctccgggccctgaggttcccctccctccctgatggtgtccggagagcgaaaggcatctgtccagctgatgtggcctaccgagtggcacgacctgcccagctcagtgcacccactcgccagcttttcccaggaggatttcccaaagatttctctctgctgactgttgtccggacccgccctggtctccaagctcccctcctgactctctacagtgcccagggtgtccgacagctgggcctggagctgggccgacctgtccgcttcctgtatgaagaccagactgggcggcctcaacctccctctcagccagtcttccgaggcctcagcctagcagatggcaagtggcaccgtgtggctgtggctgtgaagggccagtctgtcaccctcattgttgactgcaagaagcgagtcacccggcctctcccccgaagtgctcgtccagtattggacacccatggagtgatcatctttggtgcccgtattctggatgaagaagtctttgagggtgatgtccaggagctggccattgtcccaggggtccaggcagcctatgaatcatgtgaacagaaggagctggaatgcgaggggggccagagggaaagaccccaaaaccaacagcctcacagagcccagagatctccacagcagcaaccatcaagacttcacaggccacaaaatcaggaaccccagagccaggaccccaccccaggtgaagaggaagaaatcctggagtcgagcctcttgccaccccttgaggaggctgcccatggaccccgagggctgaagggagagaaaggagagcctgcagtgttggaacctggtatgctcgtggaggggccccctggcccagaaggccctgcgggattgattggtccccctggcatccaggggaacccaggcccagttggagaccctggagagaggggcccccctggccgagcagggctccctggatcagatggggctcctggtcctcctggcacatctctcatgctcccattccggtttggcagtggtgggggtgacaagggccctgtggtggcggcccaggaggctcaggcccaggcgatcctgcagcaggcgaggctggcgctccgtggaccccctggccccatgggatacacagggcgccctggacccttgggccaacctgggagccctggcctgaaaggagagtctggagacttaggacctcagggccccagaggacctcagggcctcacaggccctcctggcaaggctgggcgaaggggccgggcaggtgctgatggagcccgagggatgcctggagatcctggagtgaagggtgaccgaggttttgatggactcccagggctccctggagagaagggccataggggtgatactggtgcccagggccttcctggtccccctggtgaggatggagagaggggagatgacggggagattgggcctcgagggctgcctggagagtcgggacctcgaggtctccttggccccaaaggcccacctggtattcctggaccccctggcgtccgaggcatggatggtccccagggccccaaagggagcttgggaccccagggagagccaggacctcctggacaacagggcacccctgggacccagggtcttcccgggccccagggtgccatcggccctcatggagagaagggtcctcaagggaagccagggctccccggcatgcctggctcagacggacccccgggtcacccagggaaggaaggtccccctggaaccaaaggaaaccagggtccctctggacctcagggacctctaggatacccaggacctcgaggggtcaagggtgtggacggaattcggggtctgaagggtcataagggtgagaagggtgaggatggctttcctgggttcaaaggtgacataggcgtgaaaggtgacaggggcgaagttggagtccctggttccaggggagaggatggtcctgaggggccaaagggacgcactggaccgactggagaccctgggcccccagggctcatgggcgagaagggcaagctgggtgttcctggtctgcctggctatcctggacgtcagggacccaaggggtccctaggatttcctggctttcctggtgccagtggagagaagggagcccggggcctgtcggggaagtcagggcctcggggagaacggggccccacgggtccacggggtcagcggggaccccgaggtgccactgggaagtctggagctaagggaacatctggtggtgatggcccccatgggccccctggagagaggggcctccctggacctcagggtcccaacgggtttcctggaccgaaaggacccccgggcccccctgggaaggatgggctgccgggacacccaggccaaagaggagaagtgggtttccaagggaagaccggcccccctggtcctccaggagtggtgggacctcagggagcagcaggagaaaccggccctatgggggagagaggtcacccaggccccccggggccccctggagagcagggactacctgggacagctggaaaagaaggaacaaagggtgaccctggtccccctggggccccagggaaggatggtcctgctggtctgaggggattcccaggagagagaggcctcccaggcactgctggtggacctggtttgaaggggaatgaaggtccgtctggcccccctggccctgcaggctcccctggggaacgaggtgcagcaggatcagggggacccattggtccgccagggcgcccaggcccgcagggtccccctggagcagcaggagagaaaggtgtcccaggtgagaagggccccattggcccgactggccgagatggagtgcagggtcctgtggggcttcctggtcctgctgggcctccaggtgtggctggagaggatggagacaagggtgaggtgggggaccccggacagaagggcaccaaagggaacaagggtgaacatggccctcctggaccccctggacccattggtcctgtggggcagcctggagcagcgggagcagatggggagcccggagctcggggaccccagggacactttggagccaaaggtgatgaaggaacaagaggattcaatgggcccccaggacccattggcctacagggtttgccaggcccctctggggagaagggagaaacaggagatgtgggtcctatgggaccacctggccccccaggacctcgaggtccagctggacccaatggcgctgatggcccacaaggtcccccaggaggtgttgggaacctgggtccccctggagagaagggggaaccaggagagtcaggatctccagggatccagggcgagccaggtgtcaagggtccacgcggggaacgtggagagaaaggagagtcggggcagccaggagagccagggccaccagggcctaaaggccccacaggcgatgatggccccaaagggaaccctggtcctgttggttttcctggtgaccctggcccccctggagaaggtggccctcggggccaggatggtgctaagggtgaccgaggcgaggatggtgagccaggacagcctggatcccctggtcccaccggggagaatggacccccagggccacttggaaagcgaggtcctgctggctcgcctggttccgaggggcgacaaggagggaagggagccaagggagatcctggcgctataggtgccccggggaagacaggcccggtgggtcctgcaggcccagcagggaaacctggccctgatggtctgagggggctcccaggctcagtgggtcagcaaggccgacctggagctacaggccaggctgggcccccaggtcctgtgggacccccagggctgcctggtctccggggcgatgctggagccaagggagagaagggccacccaggtctcattggactgattgggcccccgggtgagcagggagagaagggagatcggggacttcctgggcctcagggctcccctgggcagaagggtgagatgggtatcccaggagcatccggccccattggtcctggaggtccccccggcctccccggacctgctggccccaaaggagccaaaggagccacaggcccaggcggacccaagggagagaagggtgtgcagggccctccaggacacccgggtcccccaggcgaggtgatccagccactgcccattcagatgcccaagaagactcggcgctcggtggatggaagccgtctgatgcaggaagatgaggccataccgaccgggggagcccccggcagtcctggggggctggaggagatctttggctcactcgactccctgcgggaggagatcgagcagatgaggcggccaacagggacccaggacagccctgctcgcacctgccaggacctgaagctgtgccacccagagcttcccgatggagagtactgggtcgaccccaaccagggctgtgctcgggatgccttccgagttttctgcaacttcacagcagggggtgagacctgtgtgacgcctagggatgacgtcacgcagttctcttacgtggactcagagggctccccagtgggtgtggtccagctcaccttcctgcggctgctcagcgtctcagcccaccaggacgtctcctacccctgctctggagcagcccgtgacggtcccctgagactccgtggggccaatgaggatgagctgagcccggagactagcccctatgtcaaagaattcagagatggctgccagacacagcaaggccggacggtgctggaggtgcgaacgcctgtgctggagcagctgccagtgctggatgcctccttctcagacctgggagccccaccgaggcggggaggggtgctgctggggcctgtctgcttcatgggataggaccgtctctgtctgatcctgtccattcggaaccaggcccacctggaatcccacaacatcagctctgtgccacctcccaagagggctcctcactatctagggagccctgggccagggcgtggagagccctcagtcggggcaggccaggggaggggtgaagtggttgcctggacaccccacgggaggagtggcatctggggctcttggccctcccacctggagcctgttacccgttagagagctgagacccttatttaaaactcacctcccaatcaccccaaacaaatggaagagaagagaaaggacatggcgtattttgtatttaaaagtaattgtattaattatttaaagtgtggaaagcaaaataacaaaaaagagaaacgccaacaaaaatcagcagatgttgaagacaggggtctcgggggtgggctccggcacccacatcctggagtcaggactttcctcagtgactgtgtgtaggggggtttcagggctgaaccccacctccctcccaccttcctcccacctcacctgtcgcacccactgtgaaagttggaatatgtggtctccctggcctcagggctctgactctgccagggtggggctctctaacccacaggtgttggctgcctggcccatgtgcccactgtctcttccacttggtctgggtttggcaggcactgcctgctacttgagggccaggatgctcccccagggaagaaacggaatagtgtggggtgtgtgcagggctgcatcccgcagatggctggaatattaaaattcttctatattggctggtaaattgccatggccctgagccactgagtatgttcattgccacccctgtccctcccctgggcacccctcactttccctgatcctgcaattaaagggttaatgtgtggcatatggaagggactcccaggaccctgtgcccagcttccatgctgactgatggttaaataatgtgattgtctcctcccaggtgtctgtgtca

SEQ ID NO: 121518 - DNA, 6209 bp, Homo sapiens
  Payload ID: 3830
  Gene Symbol: COL11A2
  Gene Name: collagen, type XI, alpha 2
  Uniprot ID: P13942
  ENST ID: ENST00000383087
  CDS Start-End: 260-5212
tgggggctctgggcgccagggtggccggggacacacagaagcggcagccaccgaggagggagcagtgccgggagccccgacggcgccttgctgcatggagctgggccgctgacagctgtcgctgcccgcagcctctgacctccctgggaccccggcgtctgaggctcatagtctgctccctgtcttctgtcagcctcagggcatccagcgtctcaggccgacctgggtccctgggacccggcgtttcggcttctcagccatggagcggtgcagccgctgccatcgcctcctcctcctcctacctctggtgctggggctgagcgcggccccaggctgggcaggtgcaccccctgtggatgtgctccgggccctgaggttcccctccctccctgatggtgtccggagagcgaaaggcatctgtccagctgatgtggcctaccgagtggcacgacctgcccagctcagtgcacccactcgccagcttttcccaggaggatttcccaaagatttctctctgctgactgttgtccggacccgccctggtctccaagctcccctcctgactctctacagtgcccagggtgtccgacagctgggcctggagctgggccgacctgtccgcttcctgtatgaagaccagactgggcggcctcaacctccctctcagccagtcttccgaggcctcagcctagcagatggcaagtggcaccgtgtggctgtggctgtgaagggccagtctgtcaccctcattgttgactgcaagaagcgagtcacccggcctctcccccgaagtgctcgtccagtattggacacccatggagtgatcatctttggtgcccgtattctggatgaagaagtctttgagggtgatgtccaggagctggccattgtcccaggggtccaggcagcctatgaatcatgtgaacagaaggagctggaatgcgaggggggccagagggaaagaccccaaaaccaacagcctcacagagcccagagatctccacagcagcaaccatcaagacttcacaggccacaaaatcaggaaccccagagccaggaccccaccccaggtgaagaggaagaaatcctggagtcgagcctcttgccaccccttgaggaggctgcccatggaccccgagggctgaagggagagaaaggagagcctgcagtgttggaacctggtatgctcgtggaggggccccctggcccagaaggccctgcgggattgattggtccccctggcatccaggggaacccaggcccagttggagaccctggagagaggggcccccctggccgagcagggctccctggatcagatggggctcctggtcctcctggcacatctctcatgctcccattccggtttggcagtggtgggggtgacaagggccctgtggtggcggcccaggaggctcaggcccaggcgatcctgcagcaggcgaggctggcgctccgtggaccccctggccccatgggatacacagggcgccctggacccttgggccaacctgggagccctggcctgaaaggagagtctggagacttaggacctcagggccccagaggacctcagggcctcacaggccctcctggcaaggctgggcgaaggggccgggcaggtgctgatggagcccgagggatgcctggagatcctggagtgaagggtgaccgaggttttgatggactcccagggctccctggagagaagggccataggggtgatactggtgcccagggccttcctggtccccctggtgaggatggagagaggggagatgacggggagattgggcctcgagggctgcctggagagtcgggacctcgaggtctccttggccccaaaggcccacctggtattcctggaccccctggcgtccgaggcatggatggtccccagggccccaaagggagcttgggaccccagggagagccaggacctcctggacaacagggcacccctgggacccagggtcttcccgggccccagggtgccatcggccctcatggagagaagggtcctcaagggaagccagggctccccggcatgcctggctcagacggacccccgggtcacccagggaaggaaggtccccctggaaccaaaggaaaccagggtccctctggacctcagggtcctctaggatacccaggacctcgaggggtcaagggtgtggacggaattcggggtctgaagggtcataagggtgagaagggtgaggatggctttcctgggttcaaaggtgacataggcgtgaaaggtgacaggggcgaagttggagtccctggttccaggggagaggatggtcctgaggggccaaagggacgcactggaccgactggagaccctgggcccccagggctcatgggcgagaagggcaagctgggtgttcctggtctgcctggctatcctggacgtcagggacccaaggggtccctaggatttcctggctttcctggtgccagtggagagaagggagcccggggcctgtcggggaagtcagggcctcggggagaacggggccccacgggtccacggggtcagcggggaccccgaggtgccactgggaagtctggagctaagggaacatctggtggtgatggcccccatgggccccctggagagaggggcctccctggacctcagggtcccaacgggtttcctggaccgaaaggacccctgggcccccctgggaaggacgggctgccgggacacccaggccaaagaggagaagtgggtttccaagggaagaccggcccccctggtcctccaggagtggtgggacctcagggagcagcaggagaaaccggccctatgggggagagaggtcacccaggccccccggggccccctggagagcagggactacctgggacagctggaaaagaaggaacaaagggtgaccctggtccccctggggccccagggaaggatggtcctgctggtctgaggggattcccaggagagagaggcctcccaggcactgctggtggacctggtttgaaggggaatgaaggtccgtctggcccccctggccctgcaggctcccctggggaacgaggtgcagcaggatcagggggacccattggtccgccagggcgcccaggcccgcagggtccccctggagcagcaggagagaaaggtgtcccaggtgagaagggccccattggcccaactggccgagatggagtgcagggtcctgtggggcttcctggtcctgctgggcctccaggtgtggctggagaggatggagacaagggtgaggtgggggaccccggacagaagggcaccaaagggaacaagggtgaacatggccctcctggaccccctggacccattggtcctgtggggcagcctggagcagcgggagcagatggggagcccggagctcggggaccccagggacactttggagccaaaggtgatgaaggaacaagaggattcaatgggcccccaggacccattggcctacagggtttgccaggcccctctggggagaagggagaaacaggagatgtgggtcctatgggaccacctggccccccaggacctcgaggtccagctggacccaatggcgctgatggcccacaaggtcccccaggaggtgttgggaacctgggtccccctggagagaagggggaaccaggagagtcaggatctccagggatccagggcgagccaggtgtcaagggtccacgcggggaacgtggagagaaaggagagtcggggcagccaggagagccagggccaccagggcctaaaggccccacaggcgatgatggccccaaagggaaccctggtcctgttggttttcctggtgaccctggcccccctggagaaggtggccctcggggccaggatggtgctaagggtgaccgaggcgaggatggtgagccaggacagcctggatcccctggtcccaccggggagaatggacccccagggccacttggaaagcgaggtcctgctggctcgcctggttccgaggggcgacaaggagggaagggagccaagggagatcctggcgctataggtgccccggggaagacaggcccggtgggtcctgcaggcccagcagggaaacctggccctgatggtctgagggggctcccaggctcagtgggtcagcaaggccgacctggagctacaggccaggctgggcccccaggtcctgtgggacccccagggctgcctggtctccggggcgatgctggagccaagggagagaagggccacccaggtctcattggactgattgggcccccgggtgagcagggagagaagggagatcggggacttcctgggcctcagggctcccctgggcagaagggtgagatgggtatcccaggagcatccggccccattggtcctggaggtccccccggcctccccggacctgctggccccaaaggagccaaaggagccacaggcccaggcggacccaagggagagaagggtgtgcagggccctccaggacacccgggtcccccaggcgaggtgatccagccactgcccattcagatgcccaagaagactcggcgctcggtggatggaagccgtctgatgcaggaagatgaggccataccgaccgggggagcccccggcagtcctggggggctggaggagatctttggctcactcgactccctgcgggaggagatcgagcagatgaggcggccaacagggacccaggacagccctgctcgcacctgccaggacctgaagctgtgccacccagagcttcccgatggagagtactgggtcgaccccaaccagggctgtgctcgggatgccttccgagttttctgcaacttcacagcagggggtgagacctgtgtgacgcctagggatgacgtcacgcagttctcttacgtggactcagagggctccccagtgggtgtggtccagctcaccttcctgcggctgctcagcgtctcagcccaccaggacgtctcctacccctgctctggagcagcccgtgacggtcccctgagactccgtggggccaatgaggatgagctgagcccggagactagcccctatgtcaaagaattcagagatggctgccagacacagcaaggccggacggtgctggaggtgcgaacgcctgtgctggagcagctgccagtgctggatgcctccttctcagacctgggagccccaccgaggcggggaggggtgctgctggggcctgtctgcttcatgggataggaccgtctctgtctgatcctgtccattcggaaccaggcccacctggaatcccacaacatcagctctgtgccacctcccaagagggctcctcactatctagggagccctgggccagggcgtggagagccctcagtcggggcaggccaggggaggggtgaagtggttgcctggacaccccacgggaggagtggcatctggggctcttggccctcccacctggagcctgttacccgttagagagctgagacccttatttaaaactcacctcccaatcaccccaaacaaatggaagagaagagaaaggacatggcgtattttgtatttaaaagtaattgtattaattatttaaagtgtggaaagcaaaataacaaaaaagagaaacgccaacaaaaatcagcagatgttgaagacaggggtctcgggggtgggctccggcacccacatcctggagtcaggactttcctcagtgactgtgtgtaggggggtttcagggctgaaccccacctccctcccaccttcctcccacctcacctgtcgcacccactgtgaaagttggaatatgtggtctccctggcctcagggctctgactctgccagggtggggctctctaacccacaggtgttggctgcctggcccatgtgcccactgtctcttccacttggtctgggtttggcaggcactgcctgctacttgagggccaggatgctcccccagggaagaaacggaatagtgtggggtgtgtgcagggctgcatcccgcagatggctggaatattaaaattcttctatattggctggtaaattgccatggccctgagccactgagtatgttcattgccacccctgtccctcccctgggcacccctcactttccctgatcctgcaattaaagggttaatgtgtggcatatggaagggactcccaggaccctgtgcccagcttccatgctgactgatggttaaataatgtgattgtctcctcccaggtgtctgtgtca

SEQ ID NO: 121519 - DNA, 1194 bp, Homo sapiens
  Payload ID: 3830
  Gene Symbol: COL11A2
  Gene Name: collagen, type XI, alpha 2
  Uniprot ID: P13942
  ENST ID: ENST00000383088
  CDS Start-End: 215-1087
agccaccgaggagggagcagtgccgggagccccgacggcgccttgctgcatggagctgggccgctgacagctgtcgctgcccgcagcctctgacctccctgggaccccggcgtctgaggctcatagtctgctccctgtcttctgtcagcctcagggcatccagcgtctcaggccgacctgggtccctgggacccggcgtttcggcttctcagccatggagcggtgcagccgctgccatcgcctcctcctcctcctacctctggtgctggggctgagcgcggccccaggctgggcaggtgcaccccctgtggatgtgctccgggccctgaggttcccctccctccctgatggtgtccggagagcgaaaggcatctgtccagctgatgtggcctaccgagtggcacgacctgcccagctcagtgcacccactcgccagcttttcccaggaggatttcccaaagatttctctctgctgactgttgtccggacccgccctggtctccaagctcccctcctgactctctacagtgcccagggtgtccgacagctgggcctggagctgggccgacctgtccgcttcctgtatgaagaccagactgggcggcctcaacctccctctcagccagtcttccgaggcctcagcctagcagatggcaagtggcaccgtgtggctgtggctgtgaagggccagtctgtcaccctcattgttgactgcaagaagcgagtcacccggcctctcccccgaagtgctcgtccagtattggacacccatggagtgatcatctttggtgcccgtattctggatgaagaagtctttgagggtgatgtccaggagctggccattgtcccaggggtccaggcagcctatgaatcatgtgaacagaaggagctggaatgcgaggggggccagagggaaagaccccaaaaccaacagcctcacagagcccagagatctccacagcagcaaccatcaagacttcacaggccacaaaatcaggaaccccagagccaggtgagggagctgggagaacccccaagtgcagcacaccccagagagggaagacacccaggcatctctcctccttagttgtcctccccaccctcatctccctattcccatcaccccctcctcctagtcctcattcatcagcctttttattttcatctaaaaataaaaagagttgttatgaagaa

SEQ ID NO: 121520 - DNA, 6209 bp, Homo sapiens
  Payload ID: 3830
  Gene Symbol: COL11A2
  Gene Name: collagen, type XI, alpha 2
  ENST ID: ENST00000383219
  CDS Start-End: 260-5212
tgggggctctgggcgccagggtggccggggacacacagaagcggcagccaccgaggagggagcagtgccgggagccccgacggcgccttgctgcatggagctgggccgctgacagctgtcgctgcccgcagcctctgacctccctgggaccccggcgtctgaggctcatagtctgctccctgtcttctgtcagcctcagggcatccagcgtctcaggccgacctgggtccctgggacccggcgtttcggcttctcagccatggagcggtgcagccgctgccatcgcctcctcctcctcctacctctggtgctggggctgagcgcggccccaggctgggcaggtgcaccccctgtggatgtgctccgggccctgaggttcccctccctccctgatggtgtccggagagcgaaaggcatctgtccagctgatgtggcctaccgagtggcacgacctgcccagctcagtgcacccactcgccagcttttcccaggaggatttcccaaagatttctctctgctgactgttgtccggacccgccctggtctccaagctcccctcctgactctctacagtgcccagggtgtccgacagctgggcctggagctgggccgacctgtccgcttcctgtatgaagaccagactgggcggcctcaacctccctctcagccagtcttccgaggcctcagcctagcagatggcaagtggcaccgtgtggctgtggctgtgaagggccagtctgtcaccctcattgttgactgcaagaagcgagtcacccggcctctcccccgaagtgctcgtccagtattggacacccatggagtgatcatctttggtgcccgtattctggatgaagaagtctttgagggtgatgtccaggagctggccattgtcccaggggtccaggcagcctatgaatcatgtgaacagaaggagctggaatgcgaggggggccagagggaaagaccccaaaaccaacagcctcacagagcccagagatctccacagcagcaaccatcaagacttcacaggccacaaaatcaggaaccccagagccaggaccccaccccaggtgaagaggaagaaatcctggagtcgagcctcttgccaccccttgaggaggctgcccatggaccccgagggctgaagggagagaaaggagagcctgcagtgttggaacctggtatgctcgtggaggggccccctggcccagaaggccctgcgggattgattggtccccctggcatccaggggaacccaggcccagttggagaccctggagagaggggcccccctggccgagcagggctccctggatcagatggggctcctggtcctcctggcacatctctcatgctcccattccggtttggcagtggtgggggtgacaagggccctgtggtggcggcccaggaggctcaggcccaggcgatcctgcagcaggcgaggctggcgctccgtggaccccctggccccatgggatacacagggcgccctggacccttgggccaacctgggagccctggcctgaaaggagagtctggagacttaggacctcagggccccagaggacctcagggcctcacaggccctcctggcaaggctgggcgaaggggccgggcaggtgctgatggagcccgagggatgcctggagatcctggagtgaagggtgaccgaggttttgatggactcccagggctccctggagagaagggccataggggtgatactggtgcccagggccttcctggtccccctggtgaggatggagagaggggagatgacggggagattgggcctcgagggctgcctggagagtcgggacctcgaggtctccttggccccaaaggcccacctggtattcctggaccccctggcgtccgaggcatggatggtccccagggccccaaagggagcttgggaccccagggagagccaggacctcctggacaacagggcacccctgggacccagggtcttcccgggccccagggtgccatcggccctcatggagagaagggtcctcaagggaagccagggctccccggcatgcctggctcagacggacccccgggtcacccagggaaggaaggtccccctggaaccaaaggaaaccagggtccctctggacctcagggacctctaggatacccaggacctcgaggggtcaagggtgtggacggaattcggggtctgaagggtcataagggtgagaagggtgaggatggctttcctgggttcaaaggtgacataggcgtgaaaggtgacaggggcgaagttggagtccctggttccaggggagaggatggtcctgaggggccaaagggacgcactggaccgactggagaccctgggcccccagggctcatgggcgagaagggcaagctgggtgttcctggtctgcctggctatcctggacgtcagggacccaaggggtccctaggatttcctggctttcctggtgccagtggagagaagggagcccggggcctgtcggggaagtcagggcctcggggagaacggggccccacgggtccacggggtcagcggggaccccgaggtgccactgggaagtctggagctaagggaacatctggtggtgatggcccccatgggccccctggagagaggggcctccctggacctcagggtcccaacgggtttcctggaccgaaaggacccccgggcccccctgggaaggacgggctgccgggacacccaggccaaagaggagaagtgggtttccaagggaagaccggcccccctggtcctccaggagtggtgggacctcagggagcagcaggagaaaccggccctatgggggagagaggtcacccaggccccccggggccccctggagagcagggactacctgggacagctggaaaagaaggaacaaagggtgaccctggtccccctggggccccagggaaggatggtcctgctggtctgaggggattcccaggagagagaggcctcccaggcactgctggtggacctggtttgaaggggaatgaaggtccgtctggcccccctggccctgcaggctcccctggggaacgaggtgcagcaggatcagggggacccattggtccgccagggcgcccaggcccgcagggtccccctggagcagcaggagagaaaggtgtcccaggtgagaagggccccattggcccaactggccgagatggagtgcagggtcctgtggggcttcctggtcctgctgggcctccaggtgtggctggagaggatggagacaagggtgaggtgggggaccccggacagaagggcaccaaagggaacaagggtgaacatggccctcctggaccccctggacccattggtcctgtggggcagcctggagcagcgggagcagatggggagcctggagctcggggaccccagggacactttggagccaaaggtgatgaaggaacaagaggattcaatgggcccccaggacccattggcctacagggtttgccaggcccctctggggagaagggagaaacaggagatgtgggtcctatgggaccacctggccccccaggacctcgaggtccagctggacccaatggcgctgatggcccacaaggtcccccaggaggtgttgggaacctgggtccccctggagagaagggggaaccaggagagtcaggatctccagggatccagggcgagccaggtgtcaagggtccacgcggggaacgtggagagaaaggagagtcggggcagccaggagagccagggccaccagggcctaaaggccccacaggcgatgatggccccaaagggaaccctggtcctgttggttttcctggtgaccctggcccccctggagaaggtggccctcggggccaggatggtgctaagggtgaccgaggcgaggatggtgagccaggacagcctggatcccctggtcccaccggggagaatggacccccagggccacttggaaagcgaggtcctgctggctcgcctggttccgaggggcgacaaggagggaagggagccaagggagatcctggcgctataggtgccccggggaagacaggcccggtgggtcctgcaggcccagcagggaaacctggccctgatggtctgagggggctcccaggctcagtgggtcagcaaggccgacctggagctacaggccaggctgggcccccaggtcctgtgggacccccagggctgcctggtctccggggcgatgctggagccaagggagagaagggccacccaggtctcattggactgattgggcccccgggtgagcagggagagaagggagatcggggacttcctgggcctcagggctcccctgggcagaagggtgagatgggtatcccaggagcatccggccccattggtcctggaggtccccccggcctccccggacctgctggccccaaaggagccaaaggagccacaggcccaggcggacccaagggagagaagggtgtgcagggccctccaggacacccgggtcccccaggcgaggtgatccagccactgcccattcagatgcccaagaagactcggcgctcggtggatggaagccgtctgatgcaggaagatgaggccataccgaccgggggagcccccggcagtcctggggggctggaggagatctttggctcactcgactccctgcgggaggagatcgagcagatgaggcggccaacagggacccaggacagccctgctcgcacctgccaggacctgaagctgtgccacccagagcttcccgatggagagtactgggtcgaccccaaccagggctgtgctcgggatgccttccgagttttctgcaacttcacagcagggggtgagacctgtgtgacgcctagggatgacgtcacgcagttctcttacgtggactcagagggctccccagtgggtgtggtccagctcaccttcctgcggctgctcagcgtctcagcccaccaggacgtctcctacccctgctctggagcagcccgtgacggtcccctgagactccgtggggccaatgaggatgagctgagcccggagactagcccctatgtcaaagaattcagagatggctgccagacacagcaaggccggacggtgctggaggtgcgaacgcctgtgctggagcagctgccagtgctggatgcctccttctcagacctgggagccccaccgaggcggggaggggtgctgctggggcctgtctgcttcatgggataggaccgtctctgtctgatcctgtccattcggaaccaggcccacctggaatcccacaacatcagctctgtgccacctcccaagagggctcctcactatctagggagccctgggccagggcgtggagagccctcagtcggggcaggccaggggaggggtgaagtggttgcctggacaccccacgggaggagtggcatctggggctcttggccctcccacctggagcctgttacccgttagagagctgagacccttatttaaaactcacctcccaatcaccccaaacaaatggaagagaagagaaaggacatggcgtattttgtatttaaaagtaattgtattaattatttaaagtgtggaaagcaaaataacaaaaaagagaaacgccaacaaaaatcagcagatgttgaagacaggggtctcgggggtgggctccggcacccacatcctggagtcaggactttcctcagtgactgtgtgtaggggggtttcagggctgaaccccacctccctcccaccttcctcccacctcacctgtcgcacccactgtgaaagttggaatatgtggtctccctggcctcagggctctgactctgccagggtggggctctctaacccacaggtgttggctgcctggcccatgtgcccactgtctcttccacttggtctgggtttggcaggcactgcctgctacttgagggccaggatgctcccccagggaagaaacggaatagtgtggggtgtgtgcagggctgcatcccgcagatggctggaatattaaaattcttctatattggctggtaaattgccatggccctgagccactgagtatgttcattgccacccctgtccctcccctgggcacccctcactttccctgatcctgcaattaaagggttaatgtgtggcatatggaagggactcccaggaccctgtgcccagcttccatgctgactgatggttaaataatgtgattgtctcctcccaggtgtctgtgtca

SEQ ID NO: 121521 - DNA, 1194 bp, Homo sapiens; identical to SEQ ID NO: 121519
  Payload ID: 3830
  Gene Symbol: COL11A2
  Gene Name: collagen, type XI, alpha 2
  Uniprot ID: P13942
  ENST ID: ENST00000395194
  CDS Start-End: 215-1087

SEQ ID NO: 121522 - DNA, 1984 bp, Homo sapiens
  Payload ID: 3830
  Gene Symbol: COL11A2
  Gene Name: collagen, type XI, alpha 2
  ENST ID: ENST00000433947
  CDS Start-End: 1-1001
aaaaccaaagcccacaagcccacagatccacagtcccacacactgcaggcctgggccagctgtgtttgcttgggtttgggatggattggagggcgtccgaggcatggatggtccccagggccccaaagggagcttgggaccccagggagagccaggacctcctggacaacagggcacccctgggacccagggtcttcccgggccccagggtgccatcggccctcatggagagaagggtcctcaagggaagccagggctccccggcatgcctgggtcccccaggcgaggtgatccagccactgcccattcagatgcccaagaagactcggcgctcggtggatggaagccgtctgatgcaggaagatgaggccataccgaccgggggagcccccggcagtcctggggggctggaggagatctttggctcactcgactccctgcgggaggagatcgagcagatgaggcggccaacagggacccaggacagccctgctcgcacctgccaggacctgaagctgtgccacccagagcttcccgatggagagtactgggtcgaccccaaccagggctgtgctcgggatgccttccgagttttctgcaacttcacagcagggggtgagacctgtgtgacgcctagggatgacgtcacgcagttctcttacgtggactcagagggctccccagtgggtgtggtccagctcaccttcctgcggctgctcagcgtctcagcccaccaggacgtctcctacccctgctctggagcagcccgtgacggtcccctgagactccgtggggccaatgaggatgagctgagcccggagactagcccctatgtcaaagaattcagagatggctgccagacacagcaaggccggacggtgctggaggtgcgaacgcctgtgctggagcagctgccagtgctggatgcctccttctcagacctgggagccccaccgaggcggggaggggtgctgctggggcctgtctgcttcatgggataggaccgtctctgtctgatcctgtccattcggaaccaggcccacctggaatcccacaacatcagctctgtgccacctcccaagagggctcctcactatctagggagccctgggccagggcgtggagagccctcagtcggggcaggccaggggaggggtgaagtggttgcctggacaccccacgggaggagtggcatctggggctcttggccctcccacctggagcctgttacccgttagagagctgagacccttatttaaaactcacctcccaatcaccccaaacaaatggaagagaagagaaaggacatggcgtattttgtatttaaaagtaattgtattaattatttaaagtgtggaaagcaaaataacaaaaaagagaaacgccaacaaaaatcagcagatgttgaagacaggggtctcgggggtgggctccggcacccacatcctggagtcaggactttcctcagtgactgtgtgtaggggggtttcagggctgaaccccacctccctcccaccttcctcccacctcacctgtcgcacccactgtgaaagttggaatatgtggtctccctggcctcagggctctgactctgccagggtggggctctctaacccacaggtgttggctgcctggcccatgtgcccactgtctcttccacttggtctgggtttggcaggcactgcctgctacttgagggccaggatgctcccccagggaagaaacggaatagtgtggggtgtgtgcagggctgcatcccgcagatggctggaatattaaaattcttctatattggctggtaaattgccatggccctgagccactgagtatgttcattgccacccctgtccctcccctgggcacccctcactttccctgatcctgcaattaaagggttaatgtgtggcatatggaagggactcccaggaccctgtgcccagcttccatgctgactgatggttaaataatgtgattgtctcctccc

SEQ ID NO: 121523 - DNA, 6209 bp, Homo sapiens
  Payload ID: 3830
  Gene Symbol: COL11A2
  Gene Name: collagen, type XI, alpha 2
  ENST ID: ENST00000447349
  CDS Start-End: 260-5212
tgggggctctgggcgccagggtggccggggacacacagaagcggcagccaccgaggagggagcagtgccgggagccccgacggcgccttgctgcatggagctgggccgctgacagctgtcgctgcccgcagcctctgacctccctgggaccccggcgtctgaggctcatagtctgctccctgtcttctgtcagcctcagggcatccagcgtctcaggccgacctgggtccctgggacccggcgtttcggcttctcagccatggagcggtgcagccgctgccatcgcctcctcctcctcctacctctggtgctggggctgagcgcggccccaggctgggcaggtgcaccccctgtggatgtgctccgggccctgaggttcccctccctccctgatggtgtccggagagcgaaaggcatctgtccagctgatgtggcctaccgagtggcacgacctgcccagctcagtgcacccactcgccagcttttcccaggaggatttcccaaagatttctctctgctgactgttgtccggacccgccctggtctccaagctcccctcctgactctctacagtgcccagggtgtccgacagctgggcctggagctgggccgacctgtccgcttcctgtatgaagaccagactgggcggcctcaacctccctctcagccagtcttccgaggcctcagcctagcagatggcaagtggcaccgtgtggctgtggctgtgaagggccagtctgtcaccctcattgttgactgcaagaagcgagtcacccggcctctcccccgaagtgctcgtccagtattggacacccatggagtgatcatctttggtgcccgtattctggatgaagaagtctttgagggtgatgtccaggagctggccattgtcccaggggtccaggcagcctatgaatcatgtgaacagaaggagctggaatgcgaggggggccagagggaaagaccccaaaaccaacagcctcacagagcccagagatctccacagcagcaaccatcaagacttcacaggccacaaaatcaggaaccccagagccaggaccccaccccaggtgaagaggaagaaatcctggagtcgagcctcttgccaccccttgaggaggctgcccatggaccccgagggctgaagggagagaaaggagagcctgcagtgttggaacctggtatgctcgtggaggggccccctggcccagaaggccctgcgggattgattggtccccctggcatccaggggaacccaggcccagttggagaccctggagagaggggcccccctggccgagcagggctccctggatcagatggggctcctggtcctcctggcacatctctcatgctcccattccggtttggcagtggtgggggtgacaagggccctgtggtggcggcccaggaggctcaggcccaggcgatcctgcagcaggcgaggctggcgctccgtggaccccctggccccatgggatacacagggcgccctggacccttgggccaacctgggagccctggcctgaaaggagagtctggagacttaggacctcagggccccagaggacctcagggcctcacaggccctcctggcaaggctgggcgaaggggccgggcaggtgctgatggagcccgagggatgcctggagatcctggagtgaagggtgaccgaggttttgatggactcccagggctccctggagagaagggccataggggtgatactggtgcccagggccttcctggtccccctggtgaggatggagagaggggagatgacggggagattgggcctcgagggctgcctggagagtcgggacctcgaggtctccttggccccaaaggcccacctggtattcctggaccccctggcgtccgaggcatggatggtccccagggccccaaagggagcttgggaccccagggagagccaggacctcctggacaacagggcacccctgggacccagggtcttcccgggccccagggtgccatcggccctcatggagagaagggtcctcaagggaagccagggctccccggcatgcctggctcagacggacccccgggtcacccagggaaggaaggtccccctggaaccaaaggaaaccagggtccctctggacctcagggacctctaggatacccaggacctcgaggggtcaagggtgtggacggaattcggggtctgaagggtcataagggtgagaagggtgaggatggctttcctgggttcaaaggtgacataggcgtgaaaggtgacaggggcgaagttggagtccctggttccaggggagaggatggtcctgaggggccaaagggacgcactggaccgactggagaccctgggcccccagggctcatgggcgagaagggcaagctgggtgttcctggtctgcctggctatcctggacgtcagggacccaaggggtccctaggatttcctggctttcctggtgccagtggagagaagggagcccggggcctgtcggggaagtcagggcctcggggagaacggggccccacgggtccacggggtcagcggggaccccgaggtgccactgggaagtctggagctaagggaacatctggtggtgatggcccccatgggccccctggagagaggggcctccctggacctcagggtcccaacgggtttcctggaccgaaaggacccccgggcccccctgggaaggacgggctgccgggacacccaggccaaagaggagaagtgggtttccaagggaagaccggcccccctggtcctccaggagtggtgggacctcagggagcagcaggagaaaccggccctatgggggagagaggtcacccaggccccccggggccccctggagagcagggactacctgggacagctggaaaagaaggaacaaagggtgaccctggtccccctggggccccagggaaggatggtcctgctggtctgaggggattcccaggagagagaggcctcccaggcactgctggtggacctggtttgaaggggaatgaaggtccgtctggcccccctggccctgcaggctcccctggggaacgaggtgcagcaggatcagggggacccattggtccgccagggcgcccaggcccgcagggtccccctggagcagcaggagagaaaggtgtcccaggtgagaagggccccattggcccaactggccgagatggagtgcagggtcctgtggggcttcctggtcctgctgggcctccaggtgtggctggagaggatggagacaagggtgaggtgggggaccccggacagaagggcaccaaagggaacaagggtgaacatggccctcctggaccccctggacccattggtcctgtggggcagcctggagcagcgggagcagatggggagcccggagctcggggaccccagggacactttggagccaaaggtgatgaaggaacaagaggattcaatgggcccccaggacccattggcctacagggtttgccaggcccctctggggagaagggagaaacaggagatgtgggtcctatgggaccacctggccccccaggacctcgaggtccagctggacccaatggcgctgatggcccacaaggtcccccaggaggtgttgggaacctgggtccccctggagagaagggggaaccaggagagtcaggatctccagggatccagggcgagccaggtgtcaagggtccacgcggggaacgtggagagaaaggagagtcggggcagccaggagagccagggccaccagggcctaaaggccccacaggcgatgatggccccaaagggaaccctggtcctgttggttttcctggtgaccctggcccccctggagaaggtggccctcggggccaggatggtgctaagggtgaccgaggcgaggatggtgagccaggacagcctggatcccctggtcccaccggggagaatggacccccagggccacttggaaagcgaggtcctgctggctcgcctggttccgaggggcgacaaggagggaagggagccaagggagatcctggcgctataggtgccccggggaagacaggcccggtgggtcctgcaggcccagcagggaaacctggccctgatggtctgagggggctcccaggctcagtgggtcagcaaggccgacctggagctacaggccaggctgggcccccaggtcctgtgggacccccagggctgcctggtctccggggcgatgctggagccaagggagagaagggccacccaggtctcattggactgattgggcccccgggtgagcagggagagaagggagatcggggacttcctgggcctcagggctcccctgggcagaagggtgagatgggtatcccaggagcatccggccccattggtcctggaggtccccccggcctccccggacctgctggccccaaaggagccaaaggagccacaggcccaggcggacccaagggagagaagggtgtgcagggccctccaggacacccgggtcccccaggcgaggtgatccagccactgcccattcagatgcccaagaagactcggcgctcggtggatggaagccgtctgatgcaggaagatgaggccataccgaccgggggagcccccggcagtcctggggggctggaggagatctttggctcactcgactccctgcgggaggagatcgagcagatgaggcggccaacagggacccaggacagccctgctcgcacctgccaggacctgaagctgtgccacccagagcttcccgatggagagtactgggtcgaccccaaccagggctgtgctcgggatgccttccgagttttctgcaacttcacagcagggggtgagacctgtgtgacgcctagggatgacgtcacgcagttctcttacgtggactcagagggctccccagtgggtgtggtccagctcaccttcctgcggctgctcagcgtctcagcccaccaggacgtctcctacccctgctctggagcagcccgtgacggtcccctgagactccgtggggccaatgaggatgagctgagcccggagactagcccctatgtcaaagaattcagagatggctgccagacacagcaaggccggacggtgctggaggtgcgaacgcctgtgctggagcagctgccagtgctggatgcctccttctcagacctgggagccccaccgaggcggggaggggtgctgctggggcctgtctgcttcatgggataggaccgtctctgtctgatcctgtccattcggaaccaggcccacctggaatcccacaacatcagctctgtgccacctcccaagagggctcctcactatctagggagccctgggccagggcgtggagagccctcagtcggggcaggccaggggaggggtgaagtggttgcctggacaccccacgggaggagtggcatctggggctcttggccctcccacctggagcctgttacccgttagagagctgagacccttatttaaaactcacctcccaatcaccccaaacaaatggaagagaagagaaaggacatggcgtattttgtatttaaaagtaattgtattaattatttaaagtgtggaaagcaaaataacaaaaaagagaaacgccaacaaaaatcagcagatgttgaagacaggggtctcgggggtgggctccggcacccacatcctggagtcaggactttcctcagtgactgtgtgtaggggggtttcagggctgaaccccacctccctcccaccttcctcccacctcacctgtcgcacccactgtgaaagttggaatatgtggtctccctggcctcagggctctgactctgccagggtggggctctctaacccacaggtgttggctgcctggcccatgtgcccactgtctcttccacttggtctgggtttggcaggcactgcctgctacttgagggccaggatgctcccccagggaagaaacggaatagtgtggggtgtgtgcagggctgcatcccgcagatggctggaatattaaaattcttctatattggctggtaaattgccatggccctgagccactgagtatgttcattgccacccctgtccctcccctgggcacccctcactttccctgatcctgcaattaaagggttaatgtgtggcatatggaagggactcccaggaccctgtgcccagcttccatgctgactgatggttaaataatgtgattgtctcctcccaggtgtctgtgtca

SEQ ID NO: 121524 - DNA, 2099 bp, Homo sapiens
  Payload ID: 3830
  Gene Symbol: COL11A2
  Gene Name: collagen, type XI, alpha 2
  ENST ID: ENST00000452730
  CDS Start-End: 228-2099
acacagaagcggcagccaccgaggagggagcagtgccgggagccccgacggcgccttgctgcatggagctgggccgctgacagctgtcgctgcccgcagcctctgacctccctgggaccccggcgtctgaggctcatagtctgctccctgtcttctgtcagcctcagggcatccagcgtctcaggccgacctgggtccctgggacccggcgtttcggcttctcagccatggagcggtgcagccgctgccatcgcctcctcctcctcctacctctggtgctggggctgagcgcggccccaggctgggcaggtgcaccccctgtggatgtgctccgggccctgaggttcccctccctccctgatggtgtccggagagcgaaaggcatctgtccagctgatgtggcctaccgagtggcacgacctgcccagctcagtgcacccactcgccagcttttcccaggaggatttcccaaagatttctctctgctgactgttgtccggacccgccctggtctccaagctcccctcctgactctctacagtgcccagggtgtccgacagctgggcctggagctgggccgacctgtccgcttcctgtatgaagaccagactgggcggcctcaacctccctctcagccagtcttccgaggcctcagcctagcagatggcaagtggcaccgtgtggctgtggctgtgaagggccagtctgtcaccctcattgttgactgcaagaagcgagtcacccggcctctcccccgaagtgctcgtccagtattggacacccatggagtgatcatctttggtgcccgtattctggatgaagaagtctttgagggtgatgtccaggagctggccattgtcccaggggtccaggcagcctatgaatcatgtgaacagaaggagctggaatgcgaggggggccagagggaaagaccccaaaaccaacagcctcacagagcccagagatctccacagcagcaaccatcaagacttcacaggccacaaaatcaggaaccccagagccagcccactgagtctctctactatgactacaagcccccctattatgatgtgatgactacggggacaacccctgattatcaggaccccaccccaggtgaagaggaagaaatcctggagtcgagcctcttgccaccccttgaggaggagcagacagatctccaggtcccccccacagccgacaggttccaggcagaggaatatggggagggtggcacagacccccctgaagggccctacgattacacctatggctatggggatgattatcgtgaggagacagagcttggccctgccctctctgcggagacagcccactcaggagccgctgcccatggaccccgagggctgaagggagagaaaggagagcctgcagtgttggaacctggtatgctcgtggaggggccccctggcccagaaggccctgcgggattgattggtccccctggcatccaggggaacccaggcccagttggagaccctggagagaggggcccccctggccgagcagggctccctggatcagatggggctcctggtcctcctggcacatctctcatgctcccattccggtttggcagtggtgggggtgacaagggccctgtggtggcggcccaggaggctcaggcccaggcgatcctgcagcaggcgaggctggcgctccgtggaccccctggccccatgggatacacagggcgccctggacccttgggccaacctgggagccctggcctgaaaggagagtctggagacttaggacctcagggccccagaggacctcagggcctcacaggccctcctggcaaggctgggcgaaggggccgggcaggtgctgatggagcccgagggatgcctggagatcctggagtgaagggtgaccgaggttttgatggactcccagggctccctggagagaagggccataggggtgatactggtgcccagggccttcctggtccccctggtgaggatggagagaggggagatgacggggagattgggcctcgagggctgcctggagagtcgggacctcgaggtctccttggccccaaaggcccacctggtattcctggaccccct

SEQ ID NO: 121525 - DNA, 2099 bp, Homo sapiens; identical to SEQ ID NO: 121524
  Payload ID: 3830
  Gene Symbol: COL11A2
  Gene Name: collagen, type XI, alpha 2
  ENST ID: ENST00000420405
  CDS Start-End: 228-2099

SEQ ID NO: 121526 - DNA, 1194 bp, Homo sapiens
  Payload ID: 3830
  Gene Symbol: COL11A2
  Gene Name: collagen, type XI, alpha 2
  ENST ID: ENST00000435763
  CDS Start-End: 215-1087
agccaccgaggagggagcagtgccgggagccccgacggcgccttgctgcatggagctgggccgctgacagctgtcgctgcccgcagcctctgacctccctgggaccccggcgtctgaggctcatagtctgctccctgtcttctgtcagcctcagggcatccagcgtctcaggccgacctgggtccctgggacccggcgtttcggcttctcagccatggagcggtgcagccgctgccatcgcctcctcctcctcctacctctggtgctggggctgagcgcggccccaggctgggcaggtgcaccccctgtggatgtgctccgggccctgaggttcccctccctccctgatggtgtccggagagcgaaaggcatctgtccagctgatgtggcctaccgagtggcacgacctgcccagctcagtgcacccactcgccagcttttcccaggaggatttcccaaagatttctctctgctgactgttgtccggacccgccctggtctccaagctcccctcctgactctctacagtgcccagggtgtccgacagctgggcctggagctgggcccacctgtccgcttcctgtatgaagaccagactgggcggcctcaacctccctctcagccagtcttccgaggcctcagcctagcagatggcaagtggcaccgtgtggctgtggctgtgaagggccagtctgtcaccctcattgttgactgcaagaagcgagtcacccggcctctcccccgaagtgctcgtccagtattggacacccatggagtgatcatctttggtgcccgtattctggatgaagaagtctttgagggtgatgtccaggagctggccattgtcccaggggtccaggcagcctatgaatcatgtgaacagaaggagctggaatgcgaggggggccagagggaaagaccccaaaaccaacagcctcacagagcccagagatctccacagcagcaaccatcaagacttcacaggccacaaaatcaggaaccccagagccaggtgagggagctgggagaacccccaagtgcagcacaccccagagagggaagacacccaggcatctctcctccttagttgtcctccccaccctcatctccctattcccatcaccccctcctcctagtcctcattcatcagcctttttattttcatctaaaaataaaaagagttgttatgaagaa

SEQ ID NO: 121527 - DNA, 2099 bp, Homo sapiens
  Payload ID: 3830
  Gene Symbol: COL11A2
  Gene Name: collagen, type XI, alpha 2
  ENST ID: ENST00000451040
  CDS Start-End: 228-2099
acacagaagcggcagccaccgaggagggagcagtgccgggagccccgacggcgccttgctgcatggagctgggccgctgacagctgtcgctgcccgcagcctctgacctccctgggaccccggcgtctgaggctcatagtctgctccctgtcttctgtcagcctcagggcatccagcgtctcaggccgacctgggtccctgggacccggcgtttcggcttctcagccatggagcggtgcagccgctgccatcgcctcctcctcctcctacctctggtgctggggctgagcgcggccccaggctgggcaggtgcaccccctgtggatgtgctccgggccctgaggttcccctccctccctgatggtgtccggagagcgaaaggcatctgtccagctgatgtggcctaccgagtggcacgacctgcccagctcagtgcacccactcgccagcttttcccaggaggatttcccaaagatttctctctgctgactgttgtccggacccgccctggtctccaagctcccctcctgactctctacagtgcccagggtgtccgacagctgggcctggagctgggccgacctgtccgcttcctgtatgaagaccagactgggcggcctcaacctccctctcagccagtcttccgaggcctcagcctagcagatggcaagtggcaccgtgtggctgtggctgtgaagggccagtctgtcaccctcattgttgactgcaagaagcgagtcacccggcctctcccccgaagtgctcgtccagtattggacacccatggagtgatcatctttggtgcccgtattctggatgaagaagtctttgagggtgatgtccaggagctggccattgtcccaggggtccaggcagcctatgaatcatgtgaacagaaggagctggaatgcgaggggggccagagggaaagaccccaaaaccaacagcctcacagagcccagagatctccacagcagcaaccatcaagacttcacaggccacaaaatcaggaaccccagagccagcccactgagtctctctactatgactacgagcccccctattatgatgtgatgactacggggacaacccctgattatcaggaccccaccccaggtgaagaggaagaaatcctggagtcgagcctcttgccaccccttgaggaggagcagacagatctccaggtcccccccacagccgacaggttccaggcagaggaatatggggagggtggcacagacccccctgaagggccctacgattacacctatggctatggggatgattatcgtgaggagacagagcttggccctgccctctctgcggagacagcccactcaggagccgctgcccatggaccccgagggctgaagggagagaaaggagagcctgcagtgttggaacctggtatgctcgtggaggggccccctggcccagaaggccctgcgggattgattggtccccctggcatccaggggaacccaggcccagttggagaccctggagagaggggcccccctggccgagcagggctccctggatcagatggggctcctggtcctcctggcacatctctcatgctcccattccggtttggcagtggtgggggtgacaagggccctgtggtggcggcccaggaggctcaggcccaggcgatcctgcagcaggcgaggctggcgctccgtggaccccctggccccatgggatacacagggcgccctggacccttgggccaacctgggagccctggcctgaaaggagagtctggagacttaggacctcagggccccagaggacctcagggcctcacaggccctcctggcaaggctgggcgaaggggccgggcaggtgctgatggagcccgagggatgcctggagatcctggagtgaagggtgaccgaggttttgatggactcccagggctccctggagagaagggccataggggtgatactggtgcccagggccttcctggtccccctggtgaggatggagagaggggagatgacggggagattgggcctcgagggctgcctggagagtcgggacctcgaggtctccttggccccaaaggcccacctggtattcctggaccccct

SEQ ID NO: 121528 - DNA, 2099 bp, Homo sapiens; identical to SEQ ID NO: 121527
  Payload ID: 3830
  Gene Symbol: COL11A2
  Gene Name: collagen, type XI, alpha 2
  ENST ID: ENST00000438711
  CDS Start-End: 228-2099

SEQ ID NO: 121529 - DNA, 1194 bp, Homo sapiens; identical to SEQ ID NO: 121519
  Payload ID: 3830
  Gene Symbol: COL11A2
  Gene Name: collagen, type XI, alpha 2
  Uniprot ID: P13942
  ENST ID: ENST00000447741
  CDS Start-End: 215-1087

SEQ ID NO: 121530 - DNA, 1984 bp, Homo sapiens; identical to SEQ ID NO: 121522
  Payload ID: 3830
  Gene Symbol: COL11A2
  Gene Name: collagen, type XI, alpha 2
  ENST ID: ENST00000443125
  CDS Start-End: 1-1001

SEQ ID NO: 121531 - DNA, 5868 bp, Homo sapiens
  Payload ID: 3830
  Gene Symbol: COL11A2
  Gene Name: collagen, type XI, alpha 2
  ENST ID: ENST00000443138
  CDS Start-End: 1-4871
gtgcaccccctgtggatgtgctccgggccctgaggttcccctccctccctgatggtgtccggagagcgaaaggcatctgtccagctgatgtggcctaccgagtggcacgacctgcccagctcagtgcacccactcgccagcttttcccaggaggatttcccaaagatttctctctgctgactgttgtccggacccgccctggtctccaagctcccctcctgactctctacagtgcccagggtgtccgacagctgggcctggagctgggccgacctgtccgcttcctgtatgaagaccagactgggcggcctcaacctccctctcagccagtcttccgaggcctcagcctagcagatggcaagtggcaccgtgtggctgtggctgtgaagggccagtctgtcaccctcattgttgactgcaagaagcgagtcacccggcctctcccccgaagtgctcgtccagtattggacacccatggagtgatcatctttggtgcccgtattctggatgaagaagtctttgagggtgatgtccaggagctggccattgtcccaggggtccaggcagcctatgaatcatgtgaacagaaggagctggaatgcgaggggggccagagggaaagaccccaaaaccaacagcctcacagagcccagagatctccacagcagcaaccatcaagacttcacaggccacaaaatcaggaaccccagagccaggaccccaccccaggtgaagaggaagaaatcctggagtcgagcctcttgccaccccttgaggaggctgcccatggaccccgagggctgaagggagagaaaggagagcctgcagtgttggaacctggtatgctcgtggaggggccccctggcccagaaggccctgcgggattgattggtccccctggcatccaggggaacccaggcccagttggagaccctggagagaggggcccccctggccgagcagggctccctggatcagatggggctcctggtcctcctggcacatctctcatgctcccattccggtttggcagtggtgggggtgacaagggccctgtggtggcggcccaggaggctcaggcccaggcgatcctgcagcaggcgaggctggcgctccgtggaccccctggccccatgggatacacagggcgccctggacccttgggccaacctgggagccctggcctgaaaggagagtctggagacttaggacctcagggccccagaggacctcagggcctcacaggccctcctggcaaggctgggcgaaggggccgggcaggtgctgatggagcccgagggatgcctggagatcctggagtgaagggtgaccgaggttttgatggactcccagggctccctggagagaagggccataggggtgatactggtgcccagggccttcctggtccccctggtgaggatggagagaggggagatgacggggagattgggcctcgagggctgcctggagagtcgggacctcgaggtctccttggccccaaaggcccacctggtattcctggaccccctggcgtccgaggcatggatggtccccagggccccaaagggagcttgggaccccagggagagccaggacctcctggacaacagggcacccctgggacccagggtcttcccgggccccagggtgccatcggccctcatggagagaagggtcctcaagggaagccagggctccccggcatgcctggctcagacggacccccgggtcacccagggaaggaaggtccccctggaaccaaaggaaaccagggtccctctggacctcagggacctctaggatacccaggacctcgaggggtcaagggtgtggacggaattcggggtctgaagggtcataagggtgagaagggtgaggatggctttcctgggttcaaaggtgacataggcgtgaaaggtgacaggggcgaagttggagtccctggttccaggggagaggatggtcctgaggggccaaagggacgcactggaccgactggagaccctgggcccccagggctcatgggcgagaagggcaagctgggtgttcctggtctgcctggctatcctggacgtcagggacccaaggggtccctaggatttcctggctttcctggtgccagtggagagaagggagcccggggcctgtcggggaagtcagggcctcggggagaacggggccccacgggtccacggggtcagcggggaccccgaggtgccactgggaagtctggagctaagggaacatctggtggtgatggcccccatgggccccctggagagaggggcctccctggacctcagggtcccaacgggtttcctggaccgaaaggacccccgggcccccctgggaaggacgggctgccgggacacccaggccaaagaggagaagtgggtttccaagggaagaccggcccccctggtcctccaggagtggtgggacctcagggagcagcaggagaaaccggccctatgggggagagaggtcacccaggccccccggggccccctggagagcagggactacctgggacagctggaaaagaaggaacaaagggtgaccctggtccccctggggccccagggaaggatggtcctgctggtctgaggggattcccaggagagagaggcctcccaggcactgctggtggacctggtttgaaggggaatgaaggtccgtctggcccccctggccctgcaggctcccctggggaacgaggtgcagcaggatcagggggacccattggtccgccagggcgcccaggcccgcagggtccccctggagcagcaggagagaaaggtgtcccaggtgagaagggccccattggcccaactggccgagatggagtgcagggtcctgtggggcttcctggtcctgctgggcctccaggtgtggctggagaggatggagacaagggtgaggtgggggaccccggacagaagggcaccaaagggaacaagggtgaacatggccctcctggaccccctggacccattggtcctgtggggcagcctggagcagcgggagcagatggggagcctggagctcggggaccccagggacactttggagccaaaggtgatgaaggaacaagaggattcaatgggcccccaggacccattggcctacagggtttgccaggcccctctggggagaagggagaaacaggagatgtgggtcctatgggaccacctggccccccaggacctcgaggtccagctggacccaatggcgctgatggcccacaaggtcccccaggaggtgttgggaacctgggtccccctggagagaagggggaaccaggagagtcaggatctccagggatccagggcgagccaggtgtcaagggtccacgcggggaacgtggagagaaaggagagtcggggcagccaggagagccagggccaccagggcctaaaggccccacaggcgatgatggccccaaagggaaccctggtcctgttggttttcctggtgaccctggcccccctggagaaggtggccctcggggccaggatggtgctaagggtgaccgaggcgaggatggtgagccaggacagcctggatcccctggtcccaccggggagaatggacccccagggccacttggaaagcgaggtcctgctggctcgcctggttccgaggggcgacaaggagggaagggagccaagggagatcctggcgctataggtgccccggggaagacaggcccggtgggtcctgcaggcccagcagggaaacctggccctgatggtctgagggggctcccaggctcagtgggtcagcaaggccgacctggagctacaggccaggctgggcccccaggtcctgtgggacccccagggctgcctggtctccggggcgatgctggagccaagggagagaagggccacccaggtctcattggactgattgggcccccgggtgagcagggagagaagggagatcggggacttcctgggcctcagggctcccctgggcagaagggtgagatgggtatcccaggagcatccggccccattggtcctggaggtccccccggcctccccggacctgctggccccaaaggagccaaaggagccacaggcccaggcggacccaagggagagaagggtgtgcagggccctccaggacacccgggtcccccaggcgaggtgatccagccactgcccattcagatgcccaagaagactcggcgctcggtggatggaagccgtctgatgcaggaagatgaggccataccgaccgggggagcccccggcagtcctggggggctggaggagatctttggctcactcgactccctgcgggaggagatcgagcagatgaggcggccaacagggacccaggacagccctgctcgcacctgccaggacctgaagctgtgccacccagagcttcccgatggagagtactgggtcgaccccaaccagggctgtgctcgggatgccttccgagttttctgcaacttcacagcagggggtgagacctgtgtgacgcctagggatgacgtcacgcagttctcttacgtggactcagagggctccccagtgggtgtggtccagctcaccttcctgcggctgctcagcgtctcagcccaccaggacgtctcctacccctgctctggagcagcccgtgacggtcccctgagactccgtggggccaatgaggatgagctgagcccggagactagcccctatgtcaaagaattcagagatggctgccagacacagcaaggccggacggtgctggaggtgcgaacgcctgtgctggagcagctgccagtgctggatgcctccttctcagacctgggagccccaccgaggcggggaggggtgctgctggggcctgtctgcttcatgggataggaccgtctctgtctgatcctgtccattcggaaccaggcccacctggaatcccacaacatcagctctgtgccacctcccaagagggctcctcactatctagggagccctgggccagggcgtggagagccctcagtcggggcaggccaggggaggggtgaagtggttgcctggacaccccacgggaggagtggcatctggggctcttggccctcccacctggagcctgttacccgttagagagctgagacccttatttaaaactcacctcccaatcaccccaaacaaatggaagagaagagaaaggacatggcgtattttgtatttaaaagtaattgtattaattatttaaagtgtggaaagcaaaataacaaaaaagagaaacgccaacaaaaatcagcagatgttgaagacaggggtctcgggggtgggctccggcacccacatcctggagtcaggactttcctcagtgactgtgtgtaggggggtttcagggctgaaccccacctccctcccaccttcctcccacctcacctgtcgcacccactgtgaaagttggaatatgtggtctccctggcctcagggctctgactctgccagggtggggctctctaacccacaggtgttggctgcctggcccatgtgcccactgtctcttccacttggtctgggtttggcaggcactgcctgctacttgagggccaggatgctcccccagggaagaaacggaatagtgtggggtgtgtgcagggctgcatcccgcagatggctggaatattaaaattcttctatattggctggtaaattgccatggccctgagccactgagtatgttcattgccacccctgtccctcccctgggcacccctcactttccctgatcctgcaattaaagggttaatgtgtggcatatggaagggactcccaggaccctgtgcccagcttccatgctgactgatggttaaataatgtgattgtctcctcccaggtgtctgtgtca

SEQ ID NO: 121532 - DNA, 2099 bp, Homo sapiens; identical to SEQ ID NO: 121527
  Payload ID: 3830
  Gene Symbol: COL11A2
  Gene Name: collagen, type XI, alpha 2
  ENST ID: ENST00000457788
  CDS Start-End: 228-2099

SEQ ID NO: 121533 - DNA, 1194 bp, Homo sapiens; identical to SEQ ID NO: 121519
  Payload ID: 3830
  Gene Symbol: COL11A2
  Gene Name: collagen, type XI, alpha 2
  Uniprot ID: P13942
  ENST ID: ENST00000452937
  CDS Start-End: 215-1087

SEQ ID NO: 121534 - DNA, 6209 bp, Homo sapiens
  Payload ID: 3830
  Gene Symbol: COL11A2
  Gene Name: collagen, type XI, alpha 2
  ENST ID: ENST00000425729
  CDS Start-End: 260-5212
tgggggctctgggcgccagggtggccggggacacacagaagcggcagccaccgaggagggagcagtgccgggagccccgacggcgccttgctgcatggagctgggccgctgacagctgtcgctgcccgcagcctctgacctccctgggaccccggcgtctgaggctcatagtctgctccctgtcttctgtcagcctcagggcatccagcgtctcaggccgacctgggtccctgggacccggcgtttcggcttctcagccatggagcggtgcagccgctgccatcgcctcctcctcctcctacctctggtgctggggctgagcgcggccccaggctgggcaggtgcaccccctgtggatgtgctccgggccctgaggttcccctccctccctgatggtgtccggagagcgaaaggcatctgtccagctgatgtggcctaccgagtggcacgacctgcccagctcagtgcacccactcgccagcttttcccaggaggatttcccaaagatttctctctgctgactgttgtccggacccgccctggtctccaagctcccctcctgactctctacagtgcccagggtgtccgacagctgggcctggagctgggcccacctgtccgcttcctgtatgaagaccagactgggcggcctcaacctccctctcagccagtcttccgaggcctcagcctagcagatggcaagtggcaccgtgtggctgtggctgtgaagggccagtctgtcaccctcattgttgactgcaagaagcgagtcacccggcctctcccccgaagtgctcgtccagtattggacacccatggagtgatcatctttggtgcccgtattctggatgaagaagtctttgagggtgatgtccaggagctggccattgtcccaggggtccaggcagcctatgaatcatgtgaacagaaggagctggaatgcgaggggggccagagggaaagaccccaaaaccaacagcctcacagagcccagagatctccacagcagcaaccatcaagacttcacaggccacaaaatcaggaaccccagagccaggaccccaccccaggtgaagaggaagaaatcctggagtcgagcctcttgccaccccttgaggaggctgcccatggaccccgagggctgaagggagagaaaggagagcctgcagtgttggaacctggtatgctcgtggaggggccccctggcccagaaggccctgcgggattgattggtccccctggcatccaggggaacccaggcccagttggagaccctggagagaggggcccccctggccgagcagggctccctggatcagatggggctcctggtcctcctggcacatctctcatgctcccattccggtttggcagtggtgggggtgacaagggccctgtggtggcggcccaggaggctcaggcccaggcgatcctgcagcaggcgaggctggcgctccgtggaccccctggccccatgggatacacagggcgccctggacccttgggccaacctgggagccctggcctgaaaggagagtctggagacttaggacctcagggccccagaggacctcagggcctcacaggccctcctggcaaggctgggcgaaggggccgggcaggtgctgatggagcccgagggatgcctggagatcctggagtgaagggtgaccgaggttttgatggactcccagggctccctggagagaagggccataggggtgatactggtgcccagggccttcctggtccccctggtgaggatggagagaggggagatgacggggagattgggcctcgagggctgcctggagagtcgggacctcgaggtctccttggccccaaaggcccacctggtattcctggaccccctggcgtccgaggcatggatggtccccagggccccaaagggagcttgggaccccagggagagccaggacctcctggacaacagggcacccctgggacccagggtcttcccgggccccagggtgccatcggccctcatggagagaagggtcctcaagggaagccagggctccccggcatgcctggctcagacggacccccgggtcacccagggaaggaaggtccccctggaaccaaaggaaaccagggtccctctggacctcagggacctctaggatacccaggacctcgaggggtcaagggtgtggacggaattcggggtctgaagggtcataagggtgagaagggtgaggatggctttcctgggttcaaaggtgacataggcgtgaaaggtgacaggggcgaagttggagtccctggttccaggggagaggatggtcctgaggggccaaagggacgcactggaccgactggagaccctgggcccccagggctcatgggcgagaagggcaagctgggtgttcctggtctgcctggctatcctggacgtcagggacccaaggggtccctaggatttcctggctttcctggtgccagtggagagaagggagcccggggcctgtcggggaagtcagggcctcggggagaacggggccccacgggtccacggggtcagcggggaccccgaggtgccactgggaagtctggagctaagggaacatctggtggtgatggcccccatgggccccctggagagaggggcctccctggacctcagggtcccaacgggtttcctggaccgaaaggacccccgggcccccctgggaaggacgggctgccgggacacccaggccaaagaggagaagtgggtttccaagggaagaccggcccccctggtcctccaggagtggtgggacctcagggagcagcaggagaaaccggccctatgggggagagaggtcacccaggccccccggggccccctggagagcagggactacctgggacagctggaaaagaaggaacaaagggtgaccctggtccccctggggccccagggaaggatggtcctgctggtctgaggggattcccaggagagagaggcctcccaggcactgctggtggacctggtttgaaggggaatgaaggtccgtctggcccccctggccctgcaggctcccctggggaacgaggtgcagcaggatcagggggacccattggtccgccagggcgcccaggcccgcagggtccccctggagcagcaggagagaaaggtgtcccaggtgagaagggccccattggcccaactggccgagatggagtgcagggtcctgtggggcttcctggtcctgctgggcctccaggtgtggctggagaggatggagacaagggtgaggtgggggaccccggacagaagggcaccaaagggaacaagggtgaacatggccctcctggaccccctggacccattggtcctgtggggcagcctggagcagcgggagcagatggggagcctggagctcggggaccccagggacactttggagccaaaggtgatgaaggaacaagaggattcaatgggcccccaggacccattggcctacagggtttgccaggcccctctggggagaagggagaaacaggagatgtgggtcctatgggaccacctggccccccaggacctcgaggtccagctggacccaatggcgctgatggcccacaaggtcccccaggaggtgttgggaacctgggtccccctggagagaagggggaaccaggagagtcaggatctccagggatccagggcgagccaggtgtcaagggtccacgcggggaacgtggagagaaaggagagtcggggcagccaggagagccagggccaccagggcctaaaggccccacaggcgatgatggccccaaagggaaccctggtcctgttggttttcctggtgaccctggcccccctggagaaggtggccctcggggccaggatggtgctaagggtgaccgaggcgaggatggtgagccaggacagcctggatcccctggtcccaccggggagaatggacccccagggccacttggaaagcgaggtcctgctggctcgcctggttccgaggggcgacaaggagggaagggagccaagggagatcctggcgctataggtgccccggggaagacaggcccggtgggtcctgcaggcccagcagggaaacctggccctgatggtctgagggggctcccaggctcagtgggtcagcaaggccgacctggagctacaggccaggctgggcccccaggtcctgtgggacccccagggctgcctggtctccggggcgatgctggagccaagggagagaagggccacccaggtctcattggactgattgggcccccgggtgagcagggagagaagggagatcggggacttcctgggcctcagggctcccctgggcagaagggtgagatgggtatcccaggagcatccggccccattggtcctggaggtccccccggcctccccggacctgctggccccaaaggagccaaaggagccacaggcccaggcggacccaagggagagaagggtgtgcagggccctccaggacacccgggtcccccaggcgaggtgatccagccactgcccattcagatgcccaagaagactcggcgctcggtggatggaagccgtctgatgcaggaagatgaggccataccgaccgggggagcccccggcagtcctggggggctggaggagatctttggctcactcgactccctgcgggaggagatcgagcagatgaggcggccaacagggacccaggacagccctgctcgcacctgccaggacctgaagctgtgccacccagagcttcccgatggagagtactgggtcgaccccaaccagggctgtgctcgggatgccttccgagttttctgcaacttcacagcagggggtgagacctgtgtgacgcctagggatgacgtcacgcagttctcttacgtggactcagagggctccccagtgggtgtggtccagctcaccttcctgcggctgctcagcgtctcagcccaccaggacgtctcctacccctgctctggagcagcccgtgacggtcccctgagactccgtggggccaatgaggatgagctgagcccggagactagcccctatgtcaaagaattcagagatggctgccagacacagcaaggccggacggtgctggaggtgcgaacgcctgtgctggagcagctgccagtgctggatgcctccttctcagacctgggagccccaccgaggcggggaggggtgctgctggggcctgtctgcttcatgggataggaccgtctctgtctgatcctgtccattcggaaccaggcccacctggaatcccacaacatcagctctgtgccacctcccaagagggctcctcactatctagggagccctgggccagggcgtggagagccctcagtcggggcaggccaggggaggggtgaagtggttgcctggacaccccacgggaggagtggcatctggggctcttggccctcccacctggagcctgttacccgttagagagctgagacccttatttaaaactcacctcccaatcaccccaaacaaatggaagagaagagaaaggacatggcgtattttgtatttaaaagtaattgtattaattatttaaagtgtggaaagcaaaataacaaaaaagagaaacgccaacaaaaatcagcagatgttgaagacaggggtctcgggggtgggctccggcacccacatcctggagtcaggactttcctcagtgactgtgtgtaggggggtttcagggctgaaccccacctccctcccaccttcctcccacctcacctgtcgcacccactgtgaaagttggaatatgtggtctccctggcctcagggctctgactctgccagggtggggctctctaacccacaggtgttggctgcctggcccatgtgcccactgtctcttccacttggtctgggtttggcaggcactgcctgctacttgagggccaggatgctcccccagggaagaaacggaatagtgtggggtgtgtgcagggctgcatcccgcagatggctggaatattaaaattcttctatattggctggtaaattgccatggccctgagccactgagtatgttcattgccacccctgtccctcccctgggcacccctcactttccctgatcctgcaattaaagggttaatgtgtggcatatggaagggactcccaggaccctgtgcccagcttccatgctgactgatggttaaataatgtgattgtctcctcccaggtgtctgtgtca

SEQ ID NO: 121535 - DNA, 898 bp, Homo sapiens
  Payload ID: 3830
  Gene Symbol: COL11A2
  Gene Name: collagen, type XI, alpha 2
  ENST ID: ENST00000434780
  CDS Start-End: 1-791
gtgcaccccctgtggatgtgctccgggccctgaggttcccctccctccctgatggtgtccggagagcgaaaggcatctgtccagctgatgtggcctaccgagtggcacgacctgcccagctcagtgcacccactcgccagcttttcccaggaggatttcccaaagatttctctctgctgactgttgtccggacccgccctggtctccaagctcccctcctgactctctacagtgcccagggtgtccgacagctgggcctggagctgggccgacctgtccgcttcctgtatgaagaccagactgggcggcctcaacctccctctcagccagtcttccgaggcctcagcctagcagatggcaagtggcaccgtgtggctgtggctgtgaagggccagtctgtcaccctcattgttgactgcaagaagcgagtcacccggcctctcccccgaagtgctcgtccagtattggacacccatggagtgatcatctttggtgcccgtattctggatgaagaagtctttgagggtgatgtccaggagctggccattgtcccaggggtccaggcagcctatgaatcatgtgaacagaaggagctggaatgcgaggggggccagagggaaagaccccaaaaccaacagcctcacagagcccagagatctccacagcagcaaccatcaagacttcacaggccacaaaatcaggaaccccagagccaggtgagggagctgggagaacccccaagtgcagcacaccccagagagggaagacacccaggcatctctcctccttagttgtcctccccaccctcatctccctattcccatcaccccctcctcctagtcctcattcatcagcctttttattttcatctaaaaataaaaagagttgttatgaagaa

SEQ ID NO: 121536 - DNA, 6209 bp, Homo sapiens; identical to SEQ ID NO: 121517
  Payload ID: 3830
  Gene Symbol: COL11A2
  Gene Name: collagen, type XI, alpha 2
  ENST ID: ENST00000448717
  CDS Start-End: 260-5212

SEQ ID NO: 121537 - DNA, 1194 bp, Homo sapiens; identical to SEQ ID NO: 121519
  Payload ID: 3830
  Gene Symbol: COL11A2
  Gene Name: collagen, type XI, alpha 2
  Uniprot ID: P13942
  ENST ID: ENST00000439039
  CDS Start-End: 215-1087

SEQ ID NO: 121538 - DNA, 1790 bp, Homo sapiens
  Payload ID: 3830
  Gene Symbol: COL11A2
  Gene Name: collagen, type XI, alpha 2
  ENST ID: ENST00000447855
  CDS Start-End: 1-1790
gtgcaccccctgtggatgtgctccgggccctgaggttcccctccctccctgatggtgtccggagagcgaaaggcatctgtccagctgatgtggcctaccgagtggcacgacctgcccagctcagtgcacccactcgccagcttttcccaggaggatttcccaaagatttctctctgctgactgttgtccggacccgccctggtctccaagctcccctcctgactctctacagtgcccagggtgtccgacagctgggcctggagctgggccgacctgtccgcttcctgtatgaagaccagactgggcggcctcaacctccctctcagccagtcttccgaggcctcagcctagcagatggcaagtggcaccgtgtggctgtggctgtgaagggccagtctgtcaccctcattgttgactgcaagaagcgagtcacccggcctctcccccgaagtgctcgtccagtattggacacccatggagtgatcatctttggtgcccgtattctggatgaagaagtctttgagggtgatgtccaggagctggccattgtcccaggggtccaggcagcctatgaatcatgtgaacagaaggagctggaatgcgaggggggccagagggaaagaccccaaaaccaacagcctcacagagcccagagatctccacagcagcaaccatcaagacttcacaggccacaaaatcaggaaccccagagccagcccactgagtctctctactatgactacaagcccccctattatgatgtgatgactacggggacaacccctgattatcaggaccccaccccaggtgaagaggaagaaatcctggagtcgagcctcttgccaccccttgaggaggagcagacagatctccaggtcccccccacagccgacaggttccaggcagaggaatatggggagggtggcacagacccccctgaagggccctacgattacacctatggctatggggatgattatcgtgaggagacagagcttggccctgccctctctgcggagacagcccactcaggagccgctgcccatggaccccgagggctgaagggagagaaaggagagcctgcagtgttggaacctggtatgctcgtggaggggccccctggcccagaaggccctgcgggattgattggtccccctggcatccaggggaacccaggcccagttggagaccctggagagaggggcccccctggccgagcagggctccctggatcagatggggctcctggtcctcctggcacatctctcatgctcccattccggtttggcagtggtgggggtgacaagggccctgtggtggcggcccaggaggctcaggcccaggcgatcctgcagcaggcgaggctggcgctccgtggaccccctggccccatgggatacacagggcgccctggacccttgggccaacctgggagccctggcctgaaaggagagtctggagacttaggacctcagggccccagaggacctcagggcctcacaggccctcctggcaaggctgggcgaaggggccgggcaggtgctgatggagcccgagggatgcctggagatcctggagtgaagggtgaccgaggttttgatggactcccagggctccctggagagaagggccataggggtgatactggtgcccagggccttcctggtccccctggtgaggatggagagaggggagatgacggggagattgggcctcgagggctgcctggagagtcgggacctcgaggtctccttggccccaaaggcccacctggtattcctggaccccct

SEQ ID NO: 121539 - DNA, 2099 bp, Homo sapiens
  Payload ID: 3830
  Gene Symbol: COL11A2
  Gene Name: collagen, type XI, alpha 2
  ENST ID: ENST00000452044
  CDS Start-End: 228-2099
acacagaagcggcagccaccgaggagggagcagtgccgggagccccgacggcgccttgctgcatggagctgggccgctgacagctgtcgctgcccgcagcctctgacctccctgggaccccggcgtctgaggctcatagtctgctccctgtcttctgtcagcctcagggcatccagcgtctcaggccgacctgggtccctgggacccggcgtttcggcttctcagccatggagcggtgcagccgctgccatcgcctcctcctcctcctacctctggtgctggggctgagcgcggccccaggctgggcaggtgcaccccctgtggatgtgctccgggccctgaggttcccctccctccctgatggtgtccggagagcgaaaggcatctgtccagctgatgtggcctaccgagtggcacgacctgcccagctcagtgcacccactcgccagcttttcccaggaggatttcccaaagatttctctctgctgactgttgtccggacccgccctggtctccaagctcccctcctgactctctacagtgcccagggtgtccgacagctgggcctggagctgggcccacctgtccgcttcctgtatgaagaccagactgggcggcctcaacctccctctcagccagtcttccgaggcctcagcctagcagatggcaagtggcaccgtgtggctgtggctgtgaagggccagtctgtcaccctcattgttgactgcaagaagcgagtcacccggcctctcccccgaagtgctcgtccagtattggacacccatggagtgatcatctttggtgcccgtattctggatgaagaagtctttgagggtgatgtccaggagctggccattgtcccaggggtccaggcagcctatgaatcatgtgaacagaaggagctggaatgcgaggggggccagagggaaagaccccaaaaccaacagcctcacagagcccagagatctccacagcagcaaccatcaagacttcacaggccacaaaatcaggaaccccagagccagcccactgagtctctctactatgactacaagcccccctattatgatgtgatgactacggggacaacccctgattatcaggaccccaccccaggtgaagaggaagaaatcctggagtcgagcctcttgccaccccttgaggaggagcagacagatctccaggtcccccccacagccgacaggttccaggcagaggaatatggggagggtggcacagacccccctgaagggccctacgattacacctatggctatggggatgattatcgtgaggagacagagcttggccctgccctctctgcggagacagcccactcaggagccgctgcccatggaccccgagggctgaagggagagaaaggagagcctgcagtgttggaacctggtatgctcgtggaggggccccctggcccagaaggccctgcgggattgattggtccccctggcatccaggggaacccaggcccagttggagaccctggagagaggggcccccctggccgagcagggctccctggatcagatggggctcctggtcctcctggcacatctctcatgctcccattccggtttggcagtggtgggggtgacaagggccctgtggtggcggcccaggaggctcaggcccaggcgatcctgcagcaggcgaggctggcgctccgtggaccccctggccccatgggatacacagggcgccctggacccttgggccaacctgggagccctggcctgaaaggagagtctggagacttaggacctcagggccccagaggacctcagggcctcacaggccctcctggcaaggctgggcgaaggggccgggcaggtgctgatggagcccgagggatgcctggagatcctggagtgaagggtgaccgaggttttgatggactcccagggctccctggagagaagggccataggggtgatactggtgcccagggccttcctggtccccctggtgaggatggagagaggggagatgacggggagattgggcctcgagggctgcctggagagtcgggacctcgaggtctccttggccccaaaggcccacctggtattcctggaccccct

SEQ ID NO: 121540 - DNA, 6104 bp, Homo sapiens
  Payload ID: 3830
  Gene Symbol: COL11A2
  Gene Name: collagen, type XI, alpha 2
  ENST ID: ENST00000552473
  CDS Start-End: 229-5118
cacacagaagcggcagccaccgaggagggagcagtgccgggagccccgacggcgccttgctgcatggagctgggccgctgacagctgtcgctgcccgcagcctctgacctccctgggaccccggcgtctgaggctcatagtctgctccctgtcttctgtcagcctcagggcatccagcgtctcaggccgacctgggtccctgggacccggcgtttcggcttctcagccatggagcggtgcagccgctgccatcgcctcctcctcctcctacctctggtgctggggctgagcgcggccccaggctgggcaggtgcaccccctgtggatgtgctccgggccctgaggttcccctccctccctgatggtgtccggagagcgaaaggcatctgtccagctgatgtggcctaccgagtggcacgacctgcccagctcagtgcacccactcgccagcttttcccaggaggatttcccaaagatttctctctgctgactgttgtccggacccgccctggtctccaagctcccctcctgactctctacagtgcccagggtgtccgacagctgggcctggagctgggccgacctgtccgcttcctgtatgaagaccagactgggcggcctcaacctccctctcagccagtcttccgaggcctcagcctagcagatggcaagtggcaccgtgtggctgtggctgtgaagggccagtctgtcaccctcattgttgactgcaagaagcgagtcacccggcctctcccccgaagtgctcgtccagtattggacacccatggagtgatcatctttggtgcccgtattctggatgaagaagtctttgagggtgatgtccaggagctggccattgtcccaggggtccaggcagcctatgaatcatgtgaacagaaggagctggaatgcgaggggggccagagggaaagaccccaaaaccaacagcctcacagagcccagagatctccacagcagcaaccatcaagacttcacaggccacaaaatcaggaaccccagagccaggctgcccatggaccccgagggctgaagggagagaaaggagagcctgcagtgttggaacctggtatgctcgtggaggggccccctggcccagaaggccctgcgggattgattggtccccctggcatccaggggaacccaggcccagttggagaccctggagagaggggcccccctggccgagcagggctccctggatcagatggggctcctggtcctcctggcacatctctcatgctcccattccggtttggcagtggtgggggtgacaagggccctgtggtggcggcccaggaggctcaggcccaggcgatcctgcagcaggcgaggctggcgctccgtggaccccctggccccatgggatacacagggcgccctggacccttgggccaacctgggagccctggcctgaaaggagagtctggagacttaggacctcagggccccagaggacctcagggcctcacaggccctcctggcaaggctgggcgaaggggccgggcaggtgctgatggagcccgagggatgcctggagatcctggagtgaagggtgaccgaggttttgatggactcccagggctccctggagagaagggccataggggtgatactggtgcccagggccttcctggtccccctggtgaggatggagagaggggagatgacggggagattgggcctcgagggctgcctggagagtcgggacctcgaggtctccttggccccaaaggcccacctggtattcctggaccccctggcgtccgaggcatggatggtccccagggccccaaagggagcttgggaccccagggagagccaggacctcctggacaacagggcacccctgggacccagggtcttcccgggccccagggtgccatcggccctcatggagagaagggtcctcaagggaagccagggctccccggcatgcctggctcagacggacccccgggtcacccagggaaggaaggtccccctggaaccaaaggaaaccagggtccctctggacctcagggacctctaggatacccaggacctcgaggggtcaagggtgtggacggaattcggggtctgaagggtcataagggtgagaagggtgaggatggctttcctgggttcaaaggtgacataggcgtgaaaggtgacaggggcgaagttggagtccctggttccaggggagaggatggtcctgaggggccaaagggacgcactggaccgactggagaccctgggcccccagggctcatgggcgagaagggcaagctgggtgttcctggtctgcctggctatcctggacgtcagggacccaaggggtccctaggatttcctggctttcctggtgccagtggagagaagggagcccggggcctgtcggggaagtcagggcctcggggagaacggggccccacgggtccacggggtcagcggggaccccgaggtgccactgggaagtctggagctaagggaacatctggtggtgatggcccccatgggccccctggagagaggggcctccctggacctcagggtcccaacgggtttcctggaccgaaaggacccccgggcccccctgggaaggacgggctgccgggacacccaggccaaagaggagaagtgggtttccaagggaagaccggcccccctggtcctccaggagtggtgggacctcagggagcagcaggagaaaccggccctatgggggagagaggtcacccaggccccccggggccccctggagagcagggactacctgggacagctggaaaagaaggaacaaagggtgaccctggtccccctggggccccagggaaggatggtcctgctggtctgaggggattcccaggagagagaggcctcccaggcactgctggtggacctggtttgaaggggaatgaaggtccgtctggcccccctggccctgcaggctcccctggggaacgaggtgcagcaggatcagggggacccattggtccgccagggcgcccaggcccgcagggtccccctggagcagcaggagagaaaggtgtcccaggtgagaagggccccattggcccaactggccgagatggagtgcagggtcctgtggggcttcctggtcctgctgggcctccaggtgtggctggagaggatggagacaagggtgaggtgggggaccccggacagaagggcaccaaagggaacaagggtgaacatggccctcctggaccccctggacccattggtcctgtggggcagcctggagcagcgggagcagatggggagcccggagctcggggaccccagggacactttggagccaaaggtgatgaaggaacaagaggattcaatgggcccccaggacccattggcctacagggtttgccaggcccctctggggagaagggagaaacaggagatgtgggtcctatgggaccacctggccccccaggacctcgaggtccagctggacccaatggcgctgatggcccacaaggtcccccaggaggtgttgggaacctgggtccccctggagagaagggggaaccaggagagtcaggatctccagggatccagggcgagccaggtgtcaagggtccacgcggggaacgtggagagaaaggagagtcggggcagccaggagagccagggccaccagggcctaaaggccccacaggcgatgatggccccaaagggaaccctggtcctgttggttttcctggtgaccctggcccccctggagaaggtggccctcggggccaggatggtgctaagggtgaccgaggcgaggatggtgagccaggacagcctggatcccctggtcccaccggggagaatggacccccagggccacttggaaagcgaggtcctgctggctcgcctggttccgaggggcgacaaggagggaagggagccaagggagatcctggcgctataggtgccccggggaagacaggcccggtgggtcctgcaggcccagcagggaaacctggccctgatggtctgagggggctcccaggctcagtgggtcagcaaggccgacctggagctacaggccaggctgggcccccaggtcctgtgggacccccagggctgcctggtctccggggcgatgctggagccaagggagagaagggccacccaggtctcattggactgattgggcccccgggtgagcagggagagaagggagatcggggacttcctgggcctcagggctcccctgggcagaagggtgagatgggtatcccaggagcatccggccccattggtcctggaggtccccccggcctccccggacctgctggccccaaaggagccaaaggagccacaggcccaggcggacccaagggagagaagggtgtgcagggccctccaggacacccgggtcccccaggcgaggtgatccagccactgcccattcagatgcccaagaagactcggcgctcggtggatggaagccgtctgatgcaggaagatgaggccataccgaccgggggagcccccggcagtcctggggggctggaggagatctttggctcactcgactccctgcgggaggagatcgagcagatgaggcggccaacagggacccaggacagccctgctcgcacctgccaggacctgaagctgtgccacccagagcttcccgatggagagtactgggtcgaccccaaccagggctgtgctcgggatgccttccgagttttctgcaacttcacagcagggggtgagacctgtgtgacgcctagggatgacgtcacgcagttctcttacgtggactcagagggctccccagtgggtgtggtccagctcaccttcctgcggctgctcagcgtctcagcccaccaggacgtctcctacccctgctctggagcagcccgtgacggtcccctgagactccgtggggccaatgaggatgagctgagcccggagactagcccctatgtcaaagaattcagagatggctgccagacacagcaaggccggacggtgctggaggtgcgaacgcctgtgctggagcagctgccagtgctggatgcctccttctcagacctgggagccccaccgaggcggggaggggtgctgctggggcctgtctgcttcatgggataggaccgtctctgtctgatcctgtccattcggaaccaggcccacctggaatcccacaacatcagctctgtgccacctcccaagagggctcctcactatctagggagccctgggccagggcgtggagagccctcagtcggggcaggccaggggaggggtgaagtggttgcctggacaccccacgggaggagtggcatctggggctcttggccctcccacctggagcctgttacccgttagagagctgagacccttatttaaaactcacctcccaatcaccccaaacaaatggaagagaagagaaaggacatggcgtattttgtatttaaaagtaattgtattaattatttaaagtgtggaaagcaaaataacaaaaaagagaaacgccaacaaaaatcagcagatgttgaagacaggggtctcgggggtgggctccggcacccacatcctggagtcaggactttcctcagtgactgtgtgtaggggggtttcagggctgaaccccacctccctcccaccttcctcccacctcacctgtcgcacccactgtgaaagttggaatatgtggtctccctggcctcagggctctgactctgccagggtggggctctctaacccacaggtgttggctgcctggcccatgtgcccactgtctcttccacttggtctgggtttggcaggcactgcctgctacttgagggccaggatgctcccccagggaagaaacggaatagtgtggggtgtgtgcagggctgcatcccgcagatggctggaatattaaaattcttctatattggctggtaaattgccatggccctgagccactgagtatgttcattgccacccctgtccctcccctgggcacccctcactttccctgatcctgcaattaaagggttaatgtgtggcatatggaagggactcccaggaccctgtgcccagcttccatgctgactgatggttaaataatgtgattgtctcctcccagg

SEQ ID NO: 121541 - DNA, 6425 bp, Homo sapiens; identical to SEQ ID NO: 121515
  Payload ID: 3830
  Gene Symbol: COL11A2
  Gene Name: collagen, type XI, alpha 2
  ENST ID: ENST00000551758
  CDS Start-End: 229-5439

SEQ ID NO: 121542 - DNA, 6104 bp, Homo sapiens
  Payload ID: 3830
  Gene Symbol: COL11A2
  Gene Name: collagen, type XI, alpha 2
  Uniprot ID: P13942
  ENST ID: ENST00000551542
  CDS Start-End: 229-5118
cacacagaagcggcagccaccgaggagggagcagtgccgggagccccgacggcgccttgctgcatggagctgggccgctgacagctgtcgctgcccgcagcctctgacctccctgggaccccggcgtctgaggctcatagtctgctccctgtcttctgtcagcctcagggcatccagcgtctcaggccgacctgggtccctgggacccggcgtttcggcttctcagccatggagcggtgcagccgctgccatcgcctcctcctcctcctacctctggtgctggggctgagcgcggccccaggctgggcaggtgcaccccctgtggatgtgctccgggccctgaggttcccctccctccctgatggtgtccggagagcgaaaggcatctgtccagctgatgtggcctaccgagtggcacgacctgcccagctcagtgcacccactcgccagcttttcccaggaggatttcccaaagatttctctctgctgactgttgtccggacccgccctggtctccaagctcccctcctgactctctacagtgcccagggtgtccgacagctgggcctggagctgggccgacctgtccgcttcctgtatgaagaccagactgggcggcctcaacctccctctcagccagtcttccgaggcctcagcctagcagatggcaagtggcaccgtgtggctgtggctgtgaagggccagtctgtcaccctcattgttgactgcaagaagcgagtcacccggcctctcccccgaagtgctcgtccagtattggacacccatggagtgatcatctttggtgcccgtattctggatgaagaagtctttgagggtgatgtccaggagctggccattgtcccaggggtccaggcagcctatgaatcatgtgaacagaaggagctggaatgcgaggggggccagagggaaagaccccaaaaccaacagcctcacagagcccagagatctccacagcagcaaccatcaagacttcacaggccacaaaatcaggaaccccagagccaggctgcccatggaccccgagggctgaagggagagaaaggagagcctgcagtgttggaacctggtatgctcgtggaggggccccctggcccagaaggccctgcgggattgattggtccccctggcatccaggggaacccaggcccagttggagaccctggagagaggggcccccctggccgagcagggctccctggatcagatggggctcctggtcctcctggcacatctctcatgctcccattccggtttggcagtggtgggggtgacaagggccctgtggtggcggcccaggaggctcaggcccaggcgatcctgcagcaggcgaggctggcgctccgtggaccccctggccccatgggatacacagggcgccctggacccttgggccaacctgggagccctggcctgaaaggagagtctggagacttaggacctcagggccccagaggacctcagggcctcacaggccctcctggcaaggctgggcgaaggggccgggcaggtgctgatggagcccgagggatgcctggagatcctggagtgaagggtgaccgaggttttgatggactcccagggctccctggagagaagggccataggggtgatactggtgcccagggccttcctggtccccctggtgaggatggagagaggggagatgacggggagattgggcctcgagggctgcctggagagtcgggacctcgaggtctccttggccccaaaggcccacctggtattcctggaccccctggcgtccgaggcatggatggtccccagggccccaaagggagcttgggaccccagggagagccaggacctcctggacaacagggcacccctgggacccagggtcttcccgggccccagggtgccatcggccctcatggagagaagggtcctcaagggaagccagggctccccggcatgcctggctcagacggacccccgggtcacccagggaaggaaggtccccctggaaccaaaggaaaccagggtccctctggacctcagggtcctctaggatacccaggacctcgaggggtcaagggtgtggacggaattcggggtctgaagggtcataagggtgagaagggtgaggatggctttcctgggttcaaaggtgacataggcgtgaaaggtgacaggggcgaagttggagtccctggttccaggggagaggatggtcctgaggggccaaagggacgcactggaccgactggagaccctgggcccccagggctcatgggcgagaagggcaagctgggtgttcctggtctgcctggctatcctggacgtcagggacccaaggggtccctaggatttcctggctttcctggtgccagtggagagaagggagcccggggcctgtcggggaagtcagggcctcggggagaacggggccccacgggtccacggggtcagcggggaccccgaggtgccactgggaagtctggagctaagggaacatctggtggtgatggcccccatgggccccctggagagaggggcctccctggacctcagggtcccaacgggtttcctggaccgaaaggacccctgggcccccctgggaaggacgggctgccgggacacccaggccaaagaggagaagtgggtttccaagggaagaccggcccccctggtcctccaggagtggtgggacctcagggagcagcaggagaaaccggccctatgggggagagaggtcacccaggccccccggggccccctggagagcagggactacctgggacagctggaaaagaaggaacaaagggtgaccctggtccccctggggccccagggaaggatggtcctgctggtctgaggggattcccaggagagagaggcctcccaggcactgctggtggacctggtttgaaggggaatgaaggtccgtctggcccccctggccctgcaggctcccctggggaacgaggtgcagcaggatcagggggacccattggtccgccagggcgcccaggcccgcagggtccccctggagcagcaggagagaaaggtgtcccaggtgagaagggccccattggcccaactggccgagatggagtgcagggtcctgtggggcttcctggtcctgctgggcctccaggtgtggctggagaggatggagacaagggtgaggtgggggaccccggacagaagggcaccaaagggaacaagggtgaacatggccctcctggaccccctggacccattggtcctgtggggcagcctggagcagcgggagcagatggggagcccggagctcggggaccccagggacactttggagccaaaggtgatgaaggaacaagaggattcaatgggcccccaggacccattggcctacagggtttgccaggcccctctggggagaagggagaaacaggagatgtgggtcctatgggaccacctggccccccaggacctcgaggtccagctggacccaatggcgctgatggcccacaaggtcccccaggaggtgttgggaacctgggtccccctggagagaagggggaaccaggagagtcaggatctccagggatccagggcgagccaggtgtcaagggtccacgcggggaacgtggagagaaaggagagtcggggcagccaggagagccagggccaccagggcctaaaggccccacaggcgatgatggccccaaagggaaccctggtcctgttggttttcctggtgaccctggcccccctggagaaggtggccctcggggccaggatggtgctaagggtgaccgaggcgaggatggtgagccaggacagcctggatcccctggtcccaccggggagaatggacccccagggccacttggaaagcgaggtcctgctggctcgcctggttccgaggggcgacaaggagggaagggagccaagggagatcctggcgctataggtgccccggggaagacaggcccggtgggtcctgcaggcccagcagggaaacctggccctgatggtctgagggggctcccaggctcagtgggtcagcaaggccgacctggagctacaggccaggctgggcccccaggtcctgtgggacccccagggctgcctggtctccggggcgatgctggagccaagggagagaagggccacccaggtctcattggactgattgggcccccgggtgagcagggagagaagggagatcggggacttcctgggcctcagggctcccctgggcagaagggtgagatgggtatcccaggagcatccggccccattggtcctggaggtccccccggcctccccggacctgctggccccaaaggagccaaaggagccacaggcccaggcggacccaagggagagaagggtgtgcagggccctccaggacacccgggtcccccaggcgaggtgatccagccactgcccattcagatgcccaagaagactcggcgctcggtggatggaagccgtctgatgcaggaagatgaggccataccgaccgggggagcccccggcagtcctggggggctggaggagatctttggctcactcgactccctgcgggaggagatcgagcagatgaggcggccaacagggacccaggacagccctgctcgcacctgccaggacctgaagctgtgccacccagagcttcccgatggagagtactgggtcgaccccaaccagggctgtgctcgggatgccttccgagttttctgcaacttcacagcagggggtgagacctgtgtgacgcctagggatgacgtcacgcagttctcttacgtggactcagagggctccccagtgggtgtggtccagctcaccttcctgcggctgctcagcgtctcagcccaccaggacgtctcctacccctgctctggagcagcccgtgacggtcccctgagactccgtggggccaatgaggatgagctgagcccggagactagcccctatgtcaaagaattcagagatggctgccagacacagcaaggccggacggtgctggaggtgcgaacgcctgtgctggagcagctgccagtgctggatgcctccttctcagacctgggagccccaccgaggcggggaggggtgctgctggggcctgtctgcttcatgggataggaccgtctctgtctgatcctgtccattcggaaccaggcccacctggaatcccacaacatcagctctgtgccacctcccaagagggctcctcactatctagggagccctgggccagggcgtggagagccctcagtcggggcaggccaggggaggggtgaagtggttgcctggacaccccacgggaggagtggcatctggggctcttggccctcccacctggagcctgttacccgttagagagctgagacccttatttaaaactcacctcccaatcaccccaaacaaatggaagagaagagaaaggacatggcgtattttgtatttaaaagtaattgtattaattatttaaagtgtggaaagcaaaataacaaaaaagagaaacgccaacaaaaatcagcagatgttgaagacaggggtctcgggggtgggctccggcacccacatcctggagtcaggactttcctcagtgactgtgtgtaggggggtttcagggctgaaccccacctccctcccaccttcctcccacctcacctgtcgcacccactgtgaaagttggaatatgtggtctccctggcctcagggctctgactctgccagggtggggctctctaacccacaggtgttggctgcctggcccatgtgcccactgtctcttccacttggtctgggtttggcaggcactgcctgctacttgagggccaggatgctcccccagggaagaaacggaatagtgtggggtgtgtgcagggctgcatcccgcagatggctggaatattaaaattcttctatattggctggtaaattgccatggccctgagccactgagtatgttcattgccacccctgtccctcccctgggcacccctcactttccctgatcctgcaattaaagggttaatgtgtggcatatggaagggactcccaggaccctgtgcccagcttccatgctgactgatggttaaataatgtgattgtctcctcccagg

SEQ ID NO: 121543 - DNA, 6425 bp, Homo sapiens
  Payload ID: 3830
  Gene Symbol: COL11A2
  Gene Name: collagen, type XI, alpha 2
  ENST ID: ENST00000549836
  CDS Start-End: 229-5439
cacacagaagcggcagccaccgaggagggagcagtgccgggagccccgacggcgccttgctgcatggagctgggccgctgacagctgtcgctgcccgcagcctctgacctccctgggaccccggcgtctgaggctcatagtctgctccctgtcttctgtcagcctcagggcatccagcgtctcaggccgacctgggtccctgggacccggcgtttcggcttctcagccatggagcggtgcagccgctgccatcgcctcctcctcctcctacctctggtgctggggctgagcgcggccccaggctgggcaggtgcaccccctgtggatgtgctccgggccctgaggttcccctccctccctgatggtgtccggagagcgaaaggcatctgtccagctgatgtggcctaccgagtggcacgacctgcccagctcagtgcacccactcgccagcttttcccaggaggatttcccaaagatttctctctgctgactgttgtccggacccgccctggtctccaagctcccctcctgactctctacagtgcccagggtgtccgacagctgggcctggagctgggccgacctgtccgcttcctgtatgaagaccagactgggcggcctcaacctccctctcagccagtcttccgaggcctcagcctagcagatggcaagtggcaccgtgtggctgtggctgtgaagggccagtctgtcaccctcattgttgactgcaagaagcgagtcacccggcctctcccccgaagtgctcgtccagtattggacacccatggagtgatcatctttggtgcccgtattctggatgaagaagtctttgagggtgatgtccaggagctggccattgtcccaggggtccaggcagcctatgaatcatgtgaacagaaggagctggaatgcgaggggggccagagggaaagaccccaaaaccaacagcctcacagagcccagagatctccacagcagcaaccatcaagacttcacaggccacaaaatcaggaaccccagagccagcccactgagtctctctactatgactacaagcccccctattatgatgtgatgactacggggacaacccctgattatcaggaccccaccccaggtgaagaggaagaaatcctggagtcgagcctcttgccaccccttgaggaggagcagacagatctccaggtcccccccacagccgacaggttccaggcagaggaatatggggagggtggcacagacccccctgaagggccctacgattacacctatggctatggggatgattatcgtgaggagacagagcttggccctgccctctctgcggagacagcccactcaggagccgctgcccatggaccccgagggctgaagggagagaaaggagagcctgcagtgttggaacctggtatgctcgtggaggggccccctggcccagaaggccctgcgggattgattggtccccctggcatccaggggaacccaggcccagttggagaccctggagagaggggcccccctggccgagcagggctccctggatcagatggggctcctggtcctcctggcacatctctcatgctcccattccggtttggcagtggtgggggtgacaagggccctgtggtggcggcccaggaggctcaggcccaggcgatcctgcagcaggcgaggctggcgctccgtggaccccctggccccatgggatacacagggcgccctggacccttgggccaacctgggagccctggcctgaaaggagagtctggagacttaggacctcagggccccagaggacctcagggcctcacaggccctcctggcaaggctgggcgaaggggccgggcaggtgctgatggagcccgagggatgcctggagatcctggagtgaagggtgaccgaggttttgatggactcccagggctccctggagagaagggccataggggtgatactggtgcccagggccttcctggtccccctggtgaggatggagagaggggagatgacggggagattgggcctcgagggctgcctggagagtcgggacctcgaggtctccttggccccaaaggcccacctggtattcctggaccccctggcgtccgaggcatggatggtccccagggccccaaagggagcttgggaccccagggagagccaggacctcctggacaacagggcacccctgggacccagggtcttcccgggccccagggtgccatcggccctcatggagagaagggtcctcaagggaagccagggctccccggcatgcctggctcagacggacccccgggtcacccagggaaggaaggtccccctggaaccaaaggaaaccagggtccctctggacctcagggacctctaggatacccaggacctcgaggggtcaagggtgtggacggaattcggggtctgaagggtcataagggtgagaagggtgaggatggctttcctgggttcaaaggtgacataggcgtgaaaggtgacaggggcgaagttggagtccctggttccaggggagaggatggtcctgaggggccaaagggacgcactggaccgactggagaccctgggcccccagggctcatgggcgagaagggcaagctgggtgttcctggtctgcctggctatcctggacgtcagggacccaaggggtccctaggatttcctggctttcctggtgccagtggagagaagggagcccggggcctgtcggggaagtcagggcctcggggagaacggggccccacgggtccacggggtcagcggggaccccgaggtgccactgggaagtctggagctaagggaacatctggtggtgatggcccccatgggccccctggagagaggggcctccctggacctcagggtcccaacgggtttcctggaccgaaaggacccccgggcccccctgggaaggacgggctgccgggacacccaggccaaagaggagaagtgggtttccaagggaagaccggcccccctggtcctccaggagtggtgggacctcagggagcagcaggagaaaccggccctatgggggagagaggtcacccaggccccccggggccccctggagagcagggactacctgggacagctggaaaagaaggaacaaagggtgaccctggtccccctggggccccagggaaggatggtcctgctggtctgaggggattcccaggagagagaggcctcccaggcactgctggtggacctggtttgaaggggaatgaaggtccgtctggcccccctggccctgcaggctcccctggggaacgaggtgcagcaggatcagggggacccattggtccgccagggcgcccaggcccgcagggtccccctggagcagcaggagagaaaggtgtcccaggtgagaagggccccattggcccaactggccgagatggagtgcagggtcctgtggggcttcctggtcctgctgggcctccaggtgtggctggagaggatggagacaagggtgaggtgggggaccccggacagaagggcaccaaagggaacaagggtgaacatggccctcctggaccccctggacccattggtcctgtggggcagcctggagcagcgggagcagatggggagcctggagctcggggaccccagggacactttggagccaaaggtgatgaaggaacaagaggattcaatgggcccccaggacccattggcctacagggtttgccaggcccctctggggagaagggagaaacaggagatgtgggtcctatgggaccacctggccccccaggacctcgaggtccagctggacccaatggcgctgatggcccacaaggtcccccaggaggtgttgggaacctgggtccccctggagagaagggggaaccaggagagtcaggatctccagggatccagggcgagccaggtgtcaagggtccacgcggggaacgtggagagaaaggagagtcggggcagccaggagagccagggccaccagggcctaaaggccccacaggcgatgatggccccaaagggaaccctggtcctgttggttttcctggtgaccctggcccccctggagaaggtggccctcggggccaggatggtgctaagggtgaccgaggcgaggatggtgagccaggacagcctggatcccctggtcccaccggggagaatggacccccagggccacttggaaagcgaggtcctgctggctcgcctggttccgaggggcgacaaggagggaagggagccaagggagatcctggcgctataggtgccccggggaagacaggcccggtgggtcctgcaggcccagcagggaaacctggccctgatggtctgagggggctcccaggctcagtgggtcagcaaggccgacctggagctacaggccaggctgggcccccaggtcctgtgggacccccagggctgcctggtctccggggcgatgctggagccaagggagagaagggccacccaggtctcattggactgattgggcccccgggtgagcagggagagaagggagatcggggacttcctgggcctcagggctcccctgggcagaagggtgagatgggtatcccaggagcatccggccccattggtcctggaggtccccccggcctccccggacctgctggccccaaaggagccaaaggagccacaggcccaggcggacccaagggagagaagggtgtgcagggccctccaggacacccgggtcccccaggcgaggtgatccagccactgcccattcagatgcccaagaagactcggcgctcggtggatggaagccgtctgatgcaggaagatgaggccataccgaccgggggagcccccggcagtcctggggggctggaggagatctttggctcactcgactccctgcgggaggagatcgagcagatgaggcggccaacagggacccaggacagccctgctcgcacctgccaggacctgaagctgtgccacccagagcttcccgatggagagtactgggtcgaccccaaccagggctgtgctcgggatgccttccgagttttctgcaacttcacagcagggggtgagacctgtgtgacgcctagggatgacgtcacgcagttctcttacgtggactcagagggctccccagtgggtgtggtccagctcaccttcctgcggctgctcagcgtctcagcccaccaggacgtctcctacccctgctctggagcagcccgtgacggtcccctgagactccgtggggccaatgaggatgagctgagcccggagactagcccctatgtcaaagaattcagagatggctgccagacacagcaaggccggacggtgctggaggtgcgaacgcctgtgctggagcagctgccagtgctggatgcctccttctcagacctgggagccccaccgaggcggggaggggtgctgctggggcctgtctgcttcatgggataggaccgtctctgtctgatcctgtccattcggaaccaggcccacctggaatcccacaacatcagctctgtgccacctcccaagagggctcctcactatctagggagccctgggccagggcgtggagagccctcagtcggggcaggccaggggaggggtgaagtggttgcctggacaccccacgggaggagtggcatctggggctcttggccctcccacctggagcctgttacccgttagagagctgagacccttatttaaaactcacctcccaatcaccccaaacaaatggaagagaagagaaaggacatggcgtattttgtatttaaaagtaattgtattaattatttaaagtgtggaaagcaaaataacaaaaaagagaaacgccaacaaaaatcagcagatgttgaagacaggggtctcgggggtgggctccggcacccacatcctggagtcaggactttcctcagtgactgtgtgtaggggggtttcagggctgaaccccacctccctcccaccttcctcccacctcacctgtcgcacccactgtgaaagttggaatatgtggtctccctggcctcagggctctgactctgccagggtggggctctctaacccacaggtgttggctgcctggcccatgtgcccactgtctcttccacttggtctgggtttggcaggcactgcctgctacttgagggccaggatgctcccccagggaagaaacggaatagtgtggggtgtgtgcagggctgcatcccgcagatggctggaatattaaaattcttctatattggctggtaaattgccatggccctgagccactgagtatgttcattgccacccctgtccctcccctgggcacccctcactttccctgatcctgcaattaaagggttaatgtgtggcatatggaagggactcccaggaccctgtgcccagcttccatgctgactgatggttaaataatgtgattgtctcctcccagg

SEQ ID NO: 121544 - DNA, 6425 bp, Homo sapiens
  Payload ID: 3830
  Gene Symbol: COL11A2
  Gene Name: collagen, type XI, alpha 2
  ENST ID: ENST00000551413
  CDS Start-End: 229-5439
cacacagaagcggcagccaccgaggagggagcagtgccgggagccccgacggcgccttgctgcatggagctgggccgctgacagctgtcgctgcccgcagcctctgacctccctgggaccccggcgtctgaggctcatagtctgctccctgtcttctgtcagcctcagggcatccagcgtctcaggccgacctgggtccctgggacccggcgtttcggcttctcagccatggagcggtgcagccgctgccatcgcctcctcctcctcctacctctggtgctggggctgagcgcggccccaggctgggcaggtgcaccccctgtggatgtgctccgggccctgaggttcccctccctccctgatggtgtccggagagcgaaaggcatctgtccagctgatgtggcctaccgagtggcacgacctgcccagctcagtgcacccactcgccagcttttcccaggaggatttcccaaagatttctctctgctgactgttgtccggacccgccctggtctccaagctcccctcctgactctctacagtgcccagggtgtccgacagctgggcctggagctgggcccacctgtccgcttcctgtatgaagaccagactgggcggcctcaacctccctctcagccagtcttccgaggcctcagcctagcagatggcaagtggcaccgtgtggctgtggctgtgaagggccagtctgtcaccctcattgttgactgcaagaagcgagtcacccggcctctcccccgaagtgctcgtccagtattggacacccatggagtgatcatctttggtgcccgtattctggatgaagaagtctttgagggtgatgtccaggagctggccattgtcccaggggtccaggcagcctatgaatcatgtgaacagaaggagctggaatgcgaggggggccagagggaaagaccccaaaaccaacagcctcacagagcccagagatctccacagcagcaaccatcaagacttcacaggccacaaaatcaggaaccccagagccagcccactgagtctctctactatgactacaagcccccctattatgatgtgatgactacggggacaacccctgattatcaggaccccaccccaggtgaagaggaagaaatcctggagtcgagcctcttgccaccccttgaggaggagcagacagatctccaggtcccccccacagccgacaggttccaggcagaggaatatggggagggtggcacagacccccctgaagggccctacgattacacctatggctatggggatgattatcgtgaggagacagagcttggccctgccctctctgcggagacagcccactcaggagccgctgcccatggaccccgagggctgaagggagagaaaggagagcctgcagtgttggaacctggtatgctcgtggaggggccccctggcccagaaggccctgcgggattgattggtccccctggcatccaggggaacccaggcccagttggagaccctggagagaggggcccccctggccgagcagggctccctggatcagatggggctcctggtcctcctggcacatctctcatgctcccattccggtttggcagtggtgggggtgacaagggccctgtggtggcggcccaggaggctcaggcccaggcgatcctgcagcaggcgaggctggcgctccgtggaccccctggccccatgggatacacagggcgccctggacccttgggccaacctgggagccctggcctgaaaggagagtctggagacttaggacctcagggccccagaggacctcagggcctcacaggccctcctggcaaggctgggcgaaggggccgggcaggtgctgatggagcccgagggatgcctggagatcctggagtgaagggtgaccgaggttttgatggactcccagggctccctggagagaagggccataggggtgatactggtgcccagggccttcctggtccccctggtgaggatggagagaggggagatgacggggagattgggcctcgagggctgcctggagagtcgggacctcgaggtctccttggccccaaaggcccacctggtattcctggaccccctggcgtccgaggcatggatggtccccagggccccaaagggagcttgggaccccagggagagccaggacctcctggacaacagggcacccctgggacccagggtcttcccgggccccagggtgccatcggccctcatggagagaagggtcctcaagggaagccagggctccccggcatgcctggctcagacggacccccgggtcacccagggaaggaaggtccccctggaaccaaaggaaaccagggtccctctggacctcagggacctctaggatacccaggacctcgaggggtcaagggtgtggacggaattcggggtctgaagggtcataagggtgagaagggtgaggatggctttcctgggttcaaaggtgacataggcgtgaaaggtgacaggggcgaagttggagtccctggttccaggggagaggatggtcctgaggggccaaagggacgcactggaccgactggagaccctgggcccccagggctcatgggcgagaagggcaagctgggtgttcctggtctgcctggctatcctggacgtcagggacccaaggggtccctaggatttcctggctttcctggtgccagtggagagaagggagcccggggcctgtcggggaagtcagggcctcggggagaacggggccccacgggtccacggggtcagcggggaccccgaggtgccactgggaagtctggagctaagggaacatctggtggtgatggcccccatgggccccctggagagaggggcctccctggacctcagggtcccaacgggtttcctggaccgaaaggacccccgggcccccctgggaaggacgggctgccgggacacccaggccaaagaggagaagtgggtttccaagggaagaccggcccccctggtcctccaggagtggtgggacctcagggagcagcaggagaaaccggccctatgggggagagaggtcacccaggccccccggggccccctggagagcagggactacctgggacagctggaaaagaaggaacaaagggtgaccctggtccccctggggccccagggaaggatggtcctgctggtctgaggggattcccaggagagagaggcctcccaggcactgctggtggacctggtttgaaggggaatgaaggtccgtctggcccccctggccctgcaggctcccctggggaacgaggtgcagcaggatcagggggacccattggtccgccagggcgcccaggcccgcagggtccccctggagcagcaggagagaaaggtgtcccaggtgagaagggccccattggcccaactggccgagatggagtgcagggtcctgtggggcttcctggtcctgctgggcctccaggtgtggctggagaggatggagacaagggtgaggtgggggaccccggacagaagggcaccaaagggaacaagggtgaacatggccctcctggaccccctggacccattggtcctgtggggcagcctggagcagcgggagcagatggggagcctggagctcggggaccccagggacactttggagccaaaggtgatgaaggaacaagaggattcaatgggcccccaggacccattggcctacagggtttgccaggcccctctggggagaagggagaaacaggagatgtgggtcctatgggaccacctggccccccaggacctcgaggtccagctggacccaatggcgctgatggcccacaaggtcccccaggaggtgttgggaacctgggtccccctggagagaagggggaaccaggagagtcaggatctccagggatccagggcgagccaggtgtcaagggtccacgcggggaacgtggagagaaaggagagtcggggcagccaggagagccagggccaccagggcctaaaggccccacaggcgatgatggccccaaagggaaccctggtcctgttggttttcctggtgaccctggcccccctggagaaggtggccctcggggccaggatggtgctaagggtgaccgaggcgaggatggtgagccaggacagcctggatcccctggtcccaccggggagaatggacccccagggccacttggaaagcgaggtcctgctggctcgcctggttccgaggggcgacaaggagggaagggagccaagggagatcctggcgctataggtgccccggggaagacaggcccggtgggtcctgcaggcccagcagggaaacctggccctgatggtctgagggggctcccaggctcagtgggtcagcaaggccgacctggagctacaggccaggctgggcccccaggtcctgtgggacccccagggctgcctggtctccggggcgatgctggagccaagggagagaagggccacccaggtctcattggactgattgggcccccgggtgagcagggagagaagggagatcggggacttcctgggcctcagggctcccctgggcagaagggtgagatgggtatcccaggagcatccggccccattggtcctggaggtccccccggcctccccggacctgctggccccaaaggagccaaaggagccacaggcccaggcggacccaagggagagaagggtgtgcagggccctccaggacacccgggtcccccaggcgaggtgatccagccactgcccattcagatgcccaagaagactcggcgctcggtggatggaagccgtctgatgcaggaagatgaggccataccgaccgggggagcccccggcagtcctggggggctggaggagatctttggctcactcgactccctgcgggaggagatcgagcagatgaggcggccaacagggacccaggacagccctgctcgcacctgccaggacctgaagctgtgccacccagagcttcccgatggagagtactgggtcgaccccaaccagggctgtgctcgggatgccttccgagttttctgcaacttcacagcagggggtgagacctgtgtgacgcctagggatgacgtcacgcagttctcttacgtggactcagagggctccccagtgggtgtggtccagctcaccttcctgcggctgctcagcgtctcagcccaccaggacgtctcctacccctgctctggagcagcccgtgacggtcccctgagactccgtggggccaatgaggatgagctgagcccggagactagcccctatgtcaaagaattcagagatggctgccagacacagcaaggccggacggtgctggaggtgcgaacgcctgtgctggagcagctgccagtgctggatgcctccttctcagacctgggagccccaccgaggcggggaggggtgctgctggggcctgtctgcttcatgggataggaccgtctctgtctgatcctgtccattcggaaccaggcccacctggaatcccacaacatcagctctgtgccacctcccaagagggctcctcactatctagggagccctgggccagggcgtggagagccctcagtcggggcaggccaggggaggggtgaagtggttgcctggacaccccacgggaggagtggcatctggggctcttggccctcccacctggagcctgttacccgttagagagctgagacccttatttaaaactcacctcccaatcaccccaaacaaatggaagagaagagaaaggacatggcgtattttgtatttaaaagtaattgtattaattatttaaagtgtggaaagcaaaataacaaaaaagagaaacgccaacaaaaatcagcagatgttgaagacaggggtctcgggggtgggctccggcacccacatcctggagtcaggactttcctcagtgactgtgtgtaggggggtttcagggctgaaccccacctccctcccaccttcctcccacctcacctgtcgcacccactgtgaaagttggaatatgtggtctccctggcctcagggctctgactctgccagggtggggctctctaacccacaggtgttggctgcctggcccatgtgcccactgtctcttccacttggtctgggtttggcaggcactgcctgctacttgagggccaggatgctcccccagggaagaaacggaatagtgtggggtgtgtgcagggctgcatcccgcagatggctggaatattaaaattcttctatattggctggtaaattgccatggccctgagccactgagtatgttcattgccacccctgtccctcccctgggcacccctcactttccctgatcctgcaattaaagggttaatgtgtggcatatggaagggactcccaggaccctgtgcccagcttccatgctgactgatggttaaataatgtgattgtctcctcccagg

SEQ ID NO: 121545 - DNA, 6425 bp, Homo sapiens
  Payload ID: 3830
  Gene Symbol: COL11A2
  Gene Name: collagen, type XI, alpha 2
  ENST ID: ENST00000549885
  CDS Start-End: 229-5439
cacacagaagcggcagccaccgaggagggagcagtgccgggagccccgacggcgccttgctgcatggagctgggccgctgacagctgtcgctgcccgcagcctctgacctccctgggaccccggcgtctgaggctcatagtctgctccctgtcttctgtcagcctcagggcatccagcgtctcaggccgacctgggtccctgggacccggcgtttcggcttctcagccatggagcggtgcagccgctgccatcgcctcctcctcctcctacctctggtgctggggctgagcgcggccccaggctgggcaggtgcaccccctgtggatgtgctccgggccctgaggttcccctccctccctgatggtgtccggagagcgaaaggcatctgtccagctgatgtggcctaccgagtggcacgacctgcccagctcagtgcacccactcgccagcttttcccaggaggatttcccaaagatttctctctgctgactgttgtccggacccgccctggtctccaagctcccctcctgactctctacagtgcccagggtgtccgacagctgggcctggagctgggccgacctgtccgcttcctgtatgaagaccagactgggcggcctcaacctccctctcagccagtcttccgaggcctcagcctagcagatggcaagtggcaccgtgtggctgtggctgtgaagggccagtctgtcaccctcattgttgactgcaagaagcgagtcacccggcctctcccccgaagtgctcgtccagtattggacacccatggagtgatcatctttggtgcccgtattctggatgaagaagtctttgagggtgatgtccaggagctggccattgtcccaggggtccaggcagcctatgaatcatgtgaacagaaggagctggaatgcgaggggggccagagggaaagaccccaaaaccaacagcctcacagagcccagagatctccacagcagcaaccatcaagacttcacaggccacaaaatcaggaaccccagagccagcccactgagtctctctactatgactacaagcccccctattatgatgtgatgactacggggacaacccctgattatcaggaccccaccccaggtgaagaggaagaaatcctggagtcgagcctcttgccaccccttgaggaggagcagacagatctccaggtcccccccacagccgacaggttccaggcagaggaatatggggagggtggcacagacccccctgaagggccctacgattacacctatggctatggggatgattatcgtgaggagacagagcttggccctgccctctctgcggagacagcccactcaggagccgctgcccatggaccccgagggctgaagggagagaaaggagagcctgcagtgttggaacctggtatgctcgtggaggggccccctggcccagaaggccctgcgggattgattggtccccctggcatccaggggaacccaggcccagttggagaccctggagagaggggcccccctggccgagcagggctccctggatcagatggggctcctggtcctcctggcacatctctcatgctcccattccggtttggcagtggtgggggtgacaagggccctgtggtggcggcccaggaggctcaggcccaggcgatcctgcagcaggcgaggctggcgctccgtggaccccctggccccatgggatacacagggcgccctggacccttgggccaacctgggagccctggcctgaaaggagagtctggagacttaggacctcagggccccagaggacctcagggcctcacaggccctcctggcaaggctgggcgaaggggccgggcaggtgctgatggagcccgagggatgcctggagatcctggagtgaagggtgaccgaggttttgatggactcccagggctccctggagagaagggccataggggtgatactggtgcccagggccttcctggtccccctggtgaggatggagagaggggagatgacggggagattgggcctcgagggctgcctggagagtcgggacctcgaggtctccttggccccaaaggcccacctggtattcctggaccccctggcgtccgaggcatggatggtccccagggccccaaagggagcttgggaccccagggagagccaggacctcctggacaacagggcacccctgggacccagggtcttcccgggccccagggtgccatcggccctcatggagagaagggtcctcaagggaagccagggctccccggcatgcctggctcagacggacccccgggtcacccagggaaggaaggtccccctggaaccaaaggaaaccagggtccctctggacctcagggacctctaggatacccaggacctcgaggggtcaagggtgtggacggaattcggggtctgaagggtcataagggtgagaagggtgaggatggctttcctgggttcaaaggtgacataggcgtgaaaggtgacaggggcgaagttggagtccctggttccaggggagaggatggtcctgaggggccaaagggacgcactggaccgactggagaccctgggcccccagggctcatgggcgagaagggcaagctgggtgttcctggtctgcctggctatcctggacgtcagggacccaaggggtccctaggatttcctggctttcctggtgccagtggagagaagggagcccggggcctgtcggggaagtcagggcctcggggagaacggggccccacgggtccacggggtcagcggggaccccgaggtgccactgggaagtctggagctaagggaacatctggtggtgatggcccccatgggccccctggagagaggggcctccctggacctcagggtcccaacgggtttcctggaccgaaaggacccccgggcccccctgggaaggacgggctgccgggacacccaggccaaagaggagaagtgggtttccaagggaagaccggcccccctggtcctccaggagtggtgggacctcagggagcagcaggagaaaccggccctatgggggagagaggtcacccaggccccccggggccccctggagagcagggactacctgggacagctggaaaagaaggaacaaagggtgaccctggtccccctggggccccagggaaggatggtcctgctggtctgaggggattcccaggagagagaggcctcccaggcactgctggtggacctggtttgaaggggaatgaaggtccgtctggcccccctggccctgcaggctcccctggggaacgaggtgcagcaggatcagggggacccattggtccgccagggcgcccaggcccgcagggtccccctggagcagcaggagagaaaggtgtcccaggtgagaagggccccattggcccaactggccgagatggagtgcagggtcctgtggggcttcctggtcctgctgggcctccaggtgtggctggagaggatggagacaagggtgaggtgggggaccccggacagaagggcaccaaagggaacaagggtgaacatggccctcctggaccccctggacccattggtcctgtggggcagcctggagcagcgggagcagatggggagcccggagctcggggaccccagggacactttggagccaaaggtgatgaaggaacaagaggattcaatgggcccccaggacccattggcctacagggtttgccaggcccctctggggagaagggagaaacaggagatgtgggtcctatgggaccacctggccccccaggacctcgaggtccagctggacccaatggcgctgatggcccacaaggtcccccaggaggtgttgggaacctgggtccccctggagagaagggggaaccaggagagtcaggatctccagggatccagggcgagccaggtgtcaagggtccacgcggggaacgtggagagaaaggagagtcggggcagccaggagagccagggccaccagggcctaaaggccccacaggcgatgatggccccaaagggaaccctggtcctgttggttttcctggtgaccctggcccccctggagaaggtggccctcggggccaggatggtgctaagggtgaccgaggcgaggatggtgagccaggacagcctggatcccctggtcccaccggggagaatggacccccagggccacttggaaagcgaggtcctgctggctcgcctggttccgaggggcgacaaggagggaagggagccaagggagatcctggcgctataggtgccccggggaagacaggcccggtgggtcctgcaggcccagcagggaaacctggccctgatggtctgagggggctcccaggctcagtgggtcagcaaggccgacctggagctacaggccaggctgggcccccaggtcctgtgggacccccagggctgcctggtctccggggcgatgctggagccaagggagagaagggccacccaggtctcattggactgattgggcccccgggtgagcagggagagaagggagatcggggacttcctgggcctcagggctcccctgggcagaagggtgagatgggtatcccaggagcatccggccccattggtcctggaggtccccccggcctccccggacctgctggccccaaaggagccaaaggagccacaggcccaggcggacccaagggagagaagggtgtgcagggccctccaggacacccgggtcccccaggcgaggtgatccagccactgcccattcagatgcccaagaagactcggcgctcggtggatggaagccgtctgatgcaggaagatgaggccataccgaccgggggagcccccggcagtcctggggggctggaggagatctttggctcactcgactccctgcgggaggagatcgagcagatgaggcggccaacagggacccaggacagccctgctcgcacctgccaggacctgaagctgtgccacccagagcttcccgatggagagtactgggtcgaccccaaccagggctgtgctcgggatgccttccgagttttctgcaacttcacagcagggggtgagacctgtgtgacgcctagggatgacgtcacgcagttctcttacgtggactcagagggctccccagtgggtgtggtccagctcaccttcctgcggctgctcagcgtctcagcccaccaggacgtctcctacccctgctctggagcagcccgtgacggtcccctgagactccgtggggccaatgaggatgagctgagcccggagactagcccctatgtcaaagaattcagagatggctgccagacacagcaaggccggacggtgctggaggtgcgaacgcctgtgctggagcagctgccagtgctggatgcctccttctcagacctgggagccccaccgaggcggggaggggtgctgctggggcctgtctgcttcatgggataggaccgtctctgtctgatcctgtccattcggaaccaggcccacctggaatcccacaacatcagctctgtgccacctcccaagagggctcctcactatctagggagccctgggccagggcgtggagagccctcagtcggggcaggccaggggaggggtgaagtggttgcctggacaccccacgggaggagtggcatctggggctcttggccctcccacctggagcctgttacccgttagagagctgagacccttatttaaaactcacctcccaatcaccccaaacaaatggaagagaagagaaaggacatggcgtattttgtatttaaaagtaattgtattaattatttaaagtgtggaaagcaaaataacaaaaaagagaaacgccaacaaaaatcagcagatgttgaagacaggggtctcgggggtgggctccggcacccacatcctggagtcaggactttcctcagtgactgtgtgtaggggggtttcagggctgaaccccacctccctcccaccttcctcccacctcacctgtcgcacccactgtgaaagttggaatatgtggtctccctggcctcagggctctgactctgccagggtggggctctctaacccacaggtgttggctgcctggcccatgtgcccactgtctcttccacttggtctgggtttggcaggcactgcctgctacttgagggccaggatgctcccccagggaagaaacggaatagtgtggggtgtgtgcagggctgcatcccgcagatggctggaatattaaaattcttctatattggctggtaaattgccatggccctgagccactgagtatgttcattgccacccctgtccctcccctgggcacccctcactttccctgatcctgcaattaaagggttaatgtgtggcatatggaagggactcccaggaccctgtgcccagcttccatgctgactgatggttaaataatgtgattgtctcctcccagg

SEQ ID NO: 121546 - DNA, 6425 bp, Homo sapiens
  Payload ID: 3830
  Gene Symbol: COL11A2
  Gene Name: collagen, type XI, alpha 2
  Uniprot ID: P13942
  ENST ID: ENST00000549811
  CDS Start-End: 229-5439
cacacagaagcggcagccaccgaggagggagcagtgccgggagccccgacggcgccttgctgcatggagctgggccgctgacagctgtcgctgcccgcagcctctgacctccctgggaccccggcgtctgaggctcatagtctgctccctgtcttctgtcagcctcagggcatccagcgtctcaggccgacctgggtccctgggacccggcgtttcggcttctcagccatggagcggtgcagccgctgccatcgcctcctcctcctcctacctctggtgctggggctgagcgcggccccaggctgggcaggtgcaccccctgtggatgtgctccgggccctgaggttcccctccctccctgatggtgtccggagagcgaaaggcatctgtccagctgatgtggcctaccgagtggcacgacctgcccagctcagtgcacccactcgccagcttttcccaggaggatttcccaaagatttctctctgctgactgttgtccggacccgccctggtctccaagctcccctcctgactctctacagtgcccagggtgtccgacagctgggcctggagctgggccgacctgtccgcttcctgtatgaagaccagactgggcggcctcaacctccctctcagccagtcttccgaggcctcagcctagcagatggcaagtggcaccgtgtggctgtggctgtgaagggccagtctgtcaccctcattgttgactgcaagaagcgagtcacccggcctctcccccgaagtgctcgtccagtattggacacccatggagtgatcatctttggtgcccgtattctggatgaagaagtctttgagggtgatgtccaggagctggccattgtcccaggggtccaggcagcctatgaatcatgtgaacagaaggagctggaatgcgaggggggccagagggaaagaccccaaaaccaacagcctcacagagcccagagatctccacagcagcaaccatcaagacttcacaggccacaaaatcaggaaccccagagccagcccactgagtctctctactatgactacgagcccccctattatgatgtgatgactacggggacaacccctgattatcaggaccccaccccaggtgaagaggaagaaatcctggagtcgagcctcttgccaccccttgaggaggagcagacagatctccaggtcccccccacagccgacaggttccaggcagaggaatatggggagggtggcacagacccccctgaagggccctacgattacacctatggctatggggatgattatcgtgaggagacagagcttggccctgccctctctgcggagacagcccactcaggagccgctgcccatggaccccgagggctgaagggagagaaaggagagcctgcagtgttggaacctggtatgctcgtggaggggccccctggcccagaaggccctgcgggattgattggtccccctggcatccaggggaacccaggcccagttggagaccctggagagaggggcccccctggccgagcagggctccctggatcagatggggctcctggtcctcctggcacatctctcatgctcccattccggtttggcagtggtgggggtgacaagggccctgtggtggcggcccaggaggctcaggcccaggcgatcctgcagcaggcgaggctggcgctccgtggaccccctggccccatgggatacacagggcgccctggacccttgggccaacctgggagccctggcctgaaaggagagtctggagacttaggacctcagggccccagaggacctcagggcctcacaggccctcctggcaaggctgggcgaaggggccgggcaggtgctgatggagcccgagggatgcctggagatcctggagtgaagggtgaccgaggttttgatggactcccagggctccctggagagaagggccataggggtgatactggtgcccagggccttcctggtccccctggtgaggatggagagaggggagatgacggggagattgggcctcgagggctgcctggagagtcgggacctcgaggtctccttggccccaaaggcccacctggtattcctggaccccctggcgtccgaggcatggatggtccccagggccccaaagggagcttgggaccccagggagagccaggacctcctggacaacagggcacccctgggacccagggtcttcccgggccccagggtgccatcggccctcatggagagaagggtcctcaagggaagccagggctccccggcatgcctggctcagacggacccccgggtcacccagggaaggaaggtccccctggaaccaaaggaaaccagggtccctctggacctcagggtcctctaggatacccaggacctcgaggggtcaagggtgtggacggaattcggggtctgaagggtcataagggtgagaagggtgaggatggctttcctgggttcaaaggtgacataggcgtgaaaggtgacaggggcgaagttggagtccctggttccaggggagaggatggtcctgaggggccaaagggacgcactggaccgactggagaccctgggcccccagggctcatgggcgagaagggcaagctgggtgttcctggtctgcctggctatcctggacgtcagggacccaaggggtccctaggatttcctggctttcctggtgccagtggagagaagggagcccggggcctgtcggggaagtcagggcctcggggagaacggggccccacgggtccacggggtcagcggggaccccgaggtgccactgggaagtctggagctaagggaacatctggtggtgatggcccccatgggccccctggagagaggggcctccctggacctcagggtcccaacgggtttcctggaccgaaaggacccctgggcccccctgggaaggacgggctgccgggacacccaggccaaagaggagaagtgggtttccaagggaagaccggcccccctggtcctccaggagtggtgggacctcagggagcagcaggagaaaccggccctatgggggagagaggtcacccaggccccccggggccccctggagagcagggactacctgggacagctggaaaagaaggaacaaagggtgaccctggtccccctggggccccagggaaggatggtcctgctggtctgaggggattcccaggagagagaggcctcccaggcactgctggtggacctggtttgaaggggaatgaaggtccgtctggcccccctggccctgcaggctcccctggggaacgaggtgcagcaggatcagggggacccattggtccgccagggcgcccaggcccgcagggtccccctggagcagcaggagagaaaggtgtcccaggtgagaagggccccattggcccaactggccgagatggagtgcagggtcctgtggggcttcctggtcctgctgggcctccaggtgtggctggagaggatggagacaagggtgaggtgggggaccccggacagaagggcaccaaagggaacaagggtgaacatggccctcctggaccccctggacccattggtcctgtggggcagcctggagcagcgggagcagatggggagcccggagctcggggaccccagggacactttggagccaaaggtgatgaaggaacaagaggattcaatgggcccccaggacccattggcctacagggtttgccaggcccctctggggagaagggagaaacaggagatgtgggtcctatgggaccacctggccccccaggacctcgaggtccagctggacccaatggcgctgatggcccacaaggtcccccaggaggtgttgggaacctgggtccccctggagagaagggggaaccaggagagtcaggatctccagggatccagggcgagccaggtgtcaagggtccacgcggggaacgtggagagaaaggagagtcggggcagccaggagagccagggccaccagggcctaaaggccccacaggcgatgatggccccaaagggaaccctggtcctgttggttttcctggtgaccctggcccccctggagaaggtggccctcggggccaggatggtgctaagggtgaccgaggcgaggatggtgagccaggacagcctggatcccctggtcccaccggggagaatggacccccagggccacttggaaagcgaggtcctgctggctcgcctggttccgaggggcgacaaggagggaagggagccaagggagatcctggcgctataggtgccccggggaagacaggcccggtgggtcctgcaggcccagcagggaaacctggccctgatggtctgagggggctcccaggctcagtgggtcagcaaggccgacctggagctacaggccaggctgggcccccaggtcctgtgggacccccagggctgcctggtctccggggcgatgctggagccaagggagagaagggccacccaggtctcattggactgattgggcccccgggtgagcagggagagaagggagatcggggacttcctgggcctcagggctcccctgggcagaagggtgagatgggtatcccaggagcatccggccccattggtcctggaggtccccccggcctccccggacctgctggccccaaaggagccaaaggagccacaggcccaggcggacccaagggagagaagggtgtgcagggccctccaggacacccgggtcccccaggcgaggtgatccagccactgcccattcagatgcccaagaagactcggcgctcggtggatggaagccgtctgatgcaggaagatgaggccataccgaccgggggagcccccggcagtcctggggggctggaggagatctttggctcactcgactccctgcgggaggagatcgagcagatgaggcggccaacagggacccaggacagccctgctcgcacctgccaggacctgaagctgtgccacccagagcttcccgatggagagtactgggtcgaccccaaccagggctgtgctcgggatgccttccgagttttctgcaacttcacagcagggggtgagacctgtgtgacgcctagggatgacgtcacgcagttctcttacgtggactcagagggctccccagtgggtgtggtccagctcaccttcctgcggctgctcagcgtctcagcccaccaggacgtctcctacccctgctctggagcagcccgtgacggtcccctgagactccgtggggccaatgaggatgagctgagcccggagactagcccctatgtcaaagaattcagagatggctgccagacacagcaaggccggacggtgctggaggtgcgaacgcctgtgctggagcagctgccagtgctggatgcctccttctcagacctgggagccccaccgaggcggggaggggtgctgctggggcctgtctgcttcatgggataggaccgtctctgtctgatcctgtccattcggaaccaggcccacctggaatcccacaacatcagctctgtgccacctcccaagagggctcctcactatctagggagccctgggccagggcgtggagagccctcagtcggggcaggccaggggaggggtgaagtggttgcctggacaccccacgggaggagtggcatctggggctcttggccctcccacctggagcctgttacccgttagagagctgagacccttatttaaaactcacctcccaatcaccccaaacaaatggaagagaagagaaaggacatggcgtattttgtatttaaaagtaattgtattaattatttaaagtgtggaaagcaaaataacaaaaaagagaaacgccaacaaaaatcagcagatgttgaagacaggggtctcgggggtgggctccggcacccacatcctggagtcaggactttcctcagtgactgtgtgtaggggggtttcagggctgaaccccacctccctcccaccttcctcccacctcacctgtcgcacccactgtgaaagttggaatatgtggtctccctggcctcagggctctgactctgccagggtggggctctctaacccacaggtgttggctgcctggcccatgtgcccactgtctcttccacttggtctgggtttggcaggcactgcctgctacttgagggccaggatgctcccccagggaagaaacggaatagtgtggggtgtgtgcagggctgcatcccgcagatggctggaatattaaaattcttctatattggctggtaaattgccatggccctgagccactgagtatgttcattgccacccctgtccctcccctgggcacccctcactttccctgatcctgcaattaaagggttaatgtgtggcatatggaagggactcccaggaccctgtgcccagcttccatgctgactgatggttaaataatgtgattgtctcctcccagg

SEQ ID NO: 121547 - DNA, 6104 bp, Homo sapiens
  Payload ID: 3830
  Gene Symbol: COL11A2
  Gene Name: collagen, type XI, alpha 2
  ENST ID: ENST00000552134
  CDS Start-End: 229-5118
cacacagaagcggcagccaccgaggagggagcagtgccgggagccccgacggcgccttgctgcatggagctgggccgctgacagctgtcgctgcccgcagcctctgacctccctgggaccccggcgtctgaggctcatagtctgctccctgtcttctgtcagcctcagggcatccagcgtctcaggccgacctgggtccctgggacccggcgtttcggcttctcagccatggagcggtgcagccgctgccatcgcctcctcctcctcctacctctggtgctggggctgagcgcggccccaggctgggcaggtgcaccccctgtggatgtgctccgggccctgaggttcccctccctccctgatggtgtccggagagcgaaaggcatctgtccagctgatgtggcctaccgagtggcacgacctgcccagctcagtgcacccactcgccagcttttcccaggaggatttcccaaagatttctctctgctgactgttgtccggacccgccctggtctccaagctcccctcctgactctctacagtgcccagggtgtccgacagctgggcctggagctgggcccacctgtccgcttcctgtatgaagaccagactgggcggcctcaacctccctctcagccagtcttccgaggcctcagcctagcagatggcaagtggcaccgtgtggctgtggctgtgaagggccagtctgtcaccctcattgttgactgcaagaagcgagtcacccggcctctcccccgaagtgctcgtccagtattggacacccatggagtgatcatctttggtgcccgtattctggatgaagaagtctttgagggtgatgtccaggagctggccattgtcccaggggtccaggcagcctatgaatcatgtgaacagaaggagctggaatgcgaggggggccagagggaaagaccccaaaaccaacagcctcacagagcccagagatctccacagcagcaaccatcaagacttcacaggccacaaaatcaggaaccccagagccaggctgcccatggaccccgagggctgaagggagagaaaggagagcctgcagtgttggaacctggtatgctcgtggaggggccccctggcccagaaggccctgcgggattgattggtccccctggcatccaggggaacccaggcccagttggagaccctggagagaggggcccccctggccgagcagggctccctggatcagatggggctcctggtcctcctggcacatctctcatgctcccattccggtttggcagtggtgggggtgacaagggccctgtggtggcggcccaggaggctcaggcccaggcgatcctgcagcaggcgaggctggcgctccgtggaccccctggccccatgggatacacagggcgccctggacccttgggccaacctgggagccctggcctgaaaggagagtctggagacttaggacctcagggccccagaggacctcagggcctcacaggccctcctggcaaggctgggcgaaggggccgggcaggtgctgatggagcccgagggatgcctggagatcctggagtgaagggtgaccgaggttttgatggactcccagggctccctggagagaagggccataggggtgatactggtgcccagggccttcctggtccccctggtgaggatggagagaggggagatgacggggagattgggcctcgagggctgcctggagagtcgggacctcgaggtctccttggccccaaaggcccacctggtattcctggaccccctggcgtccgaggcatggatggtccccagggccccaaagggagcttgggaccccagggagagccaggacctcctggacaacagggcacccctgggacccagggtcttcccgggccccagggtgccatcggccctcatggagagaagggtcctcaagggaagccagggctccccggcatgcctggctcagacggacccccgggtcacccagggaaggaaggtccccctggaaccaaaggaaaccagggtccctctggacctcagggacctctaggatacccaggacctcgaggggtcaagggtgtggacggaattcggggtctgaagggtcataagggtgagaagggtgaggatggctttcctgggttcaaaggtgacataggcgtgaaaggtgacaggggcgaagttggagtccctggttccaggggagaggatggtcctgaggggccaaagggacgcactggaccgactggagaccctgggcccccagggctcatgggcgagaagggcaagctgggtgttcctggtctgcctggctatcctggacgtcagggacccaaggggtccctaggatttcctggctttcctggtgccagtggagagaagggagcccggggcctgtcggggaagtcagggcctcggggagaacggggccccacgggtccacggggtcagcggggaccccgaggtgccactgggaagtctggagctaagggaacatctggtggtgatggcccccatgggccccctggagagaggggcctccctggacctcagggtcccaacgggtttcctggaccgaaaggacccccgggcccccctgggaaggacgggctgccgggacacccaggccaaagaggagaagtgggtttccaagggaagaccggcccccctggtcctccaggagtggtgggacctcagggagcagcaggagaaaccggccctatgggggagagaggtcacccaggccccccggggccccctggagagcagggactacctgggacagctggaaaagaaggaacaaagggtgaccctggtccccctggggccccagggaaggatggtcctgctggtctgaggggattcccaggagagagaggcctcccaggcactgctggtggacctggtttgaaggggaatgaaggtccgtctggcccccctggccctgcaggctcccctggggaacgaggtgcagcaggatcagggggacccattggtccgccagggcgcccaggcccgcagggtccccctggagcagcaggagagaaaggtgtcccaggtgagaagggccccattggcccaactggccgagatggagtgcagggtcctgtggggcttcctggtcctgctgggcctccaggtgtggctggagaggatggagacaagggtgaggtgggggaccccggacagaagggcaccaaagggaacaagggtgaacatggccctcctggaccccctggacccattggtcctgtggggcagcctggagcagcgggagcagatggggagcctggagctcggggaccccagggacactttggagccaaaggtgatgaaggaacaagaggattcaatgggcccccaggacccattggcctacagggtttgccaggcccctctggggagaagggagaaacaggagatgtgggtcctatgggaccacctggccccccaggacctcgaggtccagctggacccaatggcgctgatggcccacaaggtcccccaggaggtgttgggaacctgggtccccctggagagaagggggaaccaggagagtcaggatctccagggatccagggcgagccaggtgtcaagggtccacgcggggaacgtggagagaaaggagagtcggggcagccaggagagccagggccaccagggcctaaaggccccacaggcgatgatggccccaaagggaaccctggtcctgttggttttcctggtgaccctggcccccctggagaaggtggccctcggggccaggatggtgctaagggtgaccgaggcgaggatggtgagccaggacagcctggatcccctggtcccaccggggagaatggacccccagggccacttggaaagcgaggtcctgctggctcgcctggttccgaggggcgacaaggagggaagggagccaagggagatcctggcgctataggtgccccggggaagacaggcccggtgggtcctgcaggcccagcagggaaacctggccctgatggtctgagggggctcccaggctcagtgggtcagcaaggccgacctggagctacaggccaggctgggcccccaggtcctgtgggacccccagggctgcctggtctccggggcgatgctggagccaagggagagaagggccacccaggtctcattggactgattgggcccccgggtgagcagggagagaagggagatcggggacttcctgggcctcagggctcccctgggcagaagggtgagatgggtatcccaggagcatccggccccattggtcctggaggtccccccggcctccccggacctgctggccccaaaggagccaaaggagccacaggcccaggcggacccaagggagagaagggtgtgcagggccctccaggacacccgggtcccccaggcgaggtgatccagccactgcccattcagatgcccaagaagactcggcgctcggtggatggaagccgtctgatgcaggaagatgaggccataccgaccgggggagcccccggcagtcctggggggctggaggagatctttggctcactcgactccctgcgggaggagatcgagcagatgaggcggccaacagggacccaggacagccctgctcgcacctgccaggacctgaagctgtgccacccagagcttcccgatggagagtactgggtcgaccccaaccagggctgtgctcgggatgccttccgagttttctgcaacttcacagcagggggtgagacctgtgtgacgcctagggatgacgtcacgcagttctcttacgtggactcagagggctccccagtgggtgtggtccagctcaccttcctgcggctgctcagcgtctcagcccaccaggacgtctcctacccctgctctggagcagcccgtgacggtcccctgagactccgtggggccaatgaggatgagctgagcccggagactagcccctatgtcaaagaattcagagatggctgccagacacagcaaggccggacggtgctggaggtgcgaacgcctgtgctggagcagctgccagtgctggatgcctccttctcagacctgggagccccaccgaggcggggaggggtgctgctggggcctgtctgcttcatgggataggaccgtctctgtctgatcctgtccattcggaaccaggcccacctggaatcccacaacatcagctctgtgccacctcccaagagggctcctcactatctagggagccctgggccagggcgtggagagccctcagtcggggcaggccaggggaggggtgaagtggttgcctggacaccccacgggaggagtggcatctggggctcttggccctcccacctggagcctgttacccgttagagagctgagacccttatttaaaactcacctcccaatcaccccaaacaaatggaagagaagagaaaggacatggcgtattttgtatttaaaagtaattgtattaattatttaaagtgtggaaagcaaaataacaaaaaagagaaacgccaacaaaaatcagcagatgttgaagacaggggtctcgggggtgggctccggcacccacatcctggagtcaggactttcctcagtgactgtgtgtaggggggtttcagggctgaaccccacctccctcccaccttcctcccacctcacctgtcgcacccactgtgaaagttggaatatgtggtctccctggcctcagggctctgactctgccagggtggggctctctaacccacaggtgttggctgcctggcccatgtgcccactgtctcttccacttggtctgggtttggcaggcactgcctgctacttgagggccaggatgctcccccagggaagaaacggaatagtgtggggtgtgtgcagggctgcatcccgcagatggctggaatattaaaattcttctatattggctggtaaattgccatggccctgagccactgagtatgttcattgccacccctgtccctcccctgggcacccctcactttccctgatcctgcaattaaagggttaatgtgtggcatatggaagggactcccaggaccctgtgcccagcttccatgctgactgatggttaaataatgtgattgtctcctcccagg

SEQ ID NO: 121548 - DNA, 6104 bp, Homo sapiens; identical to SEQ ID NO: 121516
  Payload ID: 3830
  Gene Symbol: COL11A2
  Gene Name: collagen, type XI, alpha 2
  ENST ID: ENST00000550998
  CDS Start-End: 229-5118

SEQ ID NO: 121549 - DNA, 6104 bp, Homo sapiens
  Payload ID: 3830
  Gene Symbol: COL11A2
  Gene Name: collagen, type XI, alpha 2
  ENST ID: ENST00000549491
  CDS Start-End: 229-5118
cacacagaagcggcagccaccgaggagggagcagtgccgggagccccgacggcgccttgctgcatggagctgggccgctgacagctgtcgctgcccgcagcctctgacctccctgggaccccggcgtctgaggctcatagtctgctccctgtcttctgtcagcctcagggcatccagcgtctcaggccgacctgggtccctgggacccggcgtttcggcttctcagccatggagcggtgcagccgctgccatcgcctcctcctcctcctacctctggtgctggggctgagcgcggccccaggctgggcaggtgcaccccctgtggatgtgctccgggccctgaggttcccctccctccctgatggtgtccggagagcgaaaggcatctgtccagctgatgtggcctaccgagtggcacgacctgcccagctcagtgcacccactcgccagcttttcccaggaggatttcccaaagatttctctctgctgactgttgtccggacccgccctggtctccaagctcccctcctgactctctacagtgcccagggtgtccgacagctgggcctggagctgggccgacctgtccgcttcctgtatgaagaccagactgggcggcctcaacctccctctcagccagtcttccgaggcctcagcctagcagatggcaagtggcaccgtgtggctgtggctgtgaagggccagtctgtcaccctcattgttgactgcaagaagcgagtcacccggcctctcccccgaagtgctcgtccagtattggacacccatggagtgatcatctttggtgcccgtattctggatgaagaagtctttgagggtgatgtccaggagctggccattgtcccaggggtccaggcagcctatgaatcatgtgaacagaaggagctggaatgcgaggggggccagagggaaagaccccaaaaccaacagcctcacagagcccagagatctccacagcagcaaccatcaagacttcacaggccacaaaatcaggaaccccagagccaggctgcccatggaccccgagggctgaagggagagaaaggagagcctgcagtgttggaacctggtatgctcgtggaggggccccctggcccagaaggccctgcgggattgattggtccccctggcatccaggggaacccaggcccagttggagaccctggagagaggggcccccctggccgagcagggctccctggatcagatggggctcctggtcctcctggcacatctctcatgctcccattccggtttggcagtggtgggggtgacaagggccctgtggtggcggcccaggaggctcaggcccaggcgatcctgcagcaggcgaggctggcgctccgtggaccccctggccccatgggatacacagggcgccctggacccttgggccaacctgggagccctggcctgaaaggagagtctggagacttaggacctcagggccccagaggacctcagggcctcacaggccctcctggcaaggctgggcgaaggggccgggcaggtgctgatggagcccgagggatgcctggagatcctggagtgaagggtgaccgaggttttgatggactcccagggctccctggagagaagggccataggggtgatactggtgcccagggccttcctggtccccctggtgaggatggagagaggggagatgacggggagattgggcctcgagggctgcctggagagtcgggacctcgaggtctccttggccccaaaggcccacctggtattcctggaccccctggcgtccgaggcatggatggtccccagggccccaaagggagcttgggaccccagggagagccaggacctcctggacaacagggcacccctgggacccagggtcttcccgggccccagggtgccatcggccctcatggagagaagggtcctcaagggaagccagggctccccggcatgcctggctcagacggacccccgggtcacccagggaaggaaggtccccctggaaccaaaggaaaccagggtccctctggacctcagggacctctaggatacccaggacctcgaggggtcaagggtgtggacggaattcggggtctgaagggtcataagggtgagaagggtgaggatggctttcctgggttcaaaggtgacataggcgtgaaaggtgacaggggcgaagttggagtccctggttccaggggagaggatggtcctgaggggccaaagggacgcactggaccgactggagaccctgggcccccagggctcatgggcgagaagggcaagctgggtgttcctggtctgcctggctatcctggacgtcagggacccaaggggtccctaggatttcctggctttcctggtgccagtggagagaagggagcccggggcctgtcggggaagtcagggcctcggggagaacggggccccacgggtccacggggtcagcggggaccccgaggtgccactgggaagtctggagctaagggaacatctggtggtgatggcccccatgggccccctggagagaggggcctccctggacctcagggtcccaacgggtttcctggaccgaaaggacccccgggcccccctgggaaggacgggctgccgggacacccaggccaaagaggagaagtgggtttccaagggaagaccggcccccctggtcctccaggagtggtgggacctcagggagcagcaggagaaaccggccctatgggggagagaggtcacccaggccccccggggccccctggagagcagggactacctgggacagctggaaaagaaggaacaaagggtgaccctggtccccctggggccccagggaaggatggtcctgctggtctgaggggattcccaggagagagaggcctcccaggcactgctggtggacctggtttgaaggggaatgaaggtccgtctggcccccctggccctgcaggctcccctggggaacgaggtgcagcaggatcagggggacccattggtccgccagggcgcccaggcccgcagggtccccctggagcagcaggagagaaaggtgtcccaggtgagaagggccccattggcccaactggccgagatggagtgcagggtcctgtggggcttcctggtcctgctgggcctccaggtgtggctggagaggatggagacaagggtgaggtgggggaccccggacagaagggcaccaaagggaacaagggtgaacatggccctcctggaccccctggacccattggtcctgtggggcagcctggagcagcgggagcagatggggagcctggagctcggggaccccagggacactttggagccaaaggtgatgaaggaacaagaggattcaatgggcccccaggacccattggcctacagggtttgccaggcccctctggggagaagggagaaacaggagatgtgggtcctatgggaccacctggccccccaggacctcgaggtccagctggacccaatggcgctgatggcccacaaggtcccccaggaggtgttgggaacctgggtccccctggagagaagggggaaccaggagagtcaggatctccagggatccagggcgagccaggtgtcaagggtccacgcggggaacgtggagagaaaggagagtcggggcagccaggagagccagggccaccagggcctaaaggccccacaggcgatgatggccccaaagggaaccctggtcctgttggttttcctggtgaccctggcccccctggagaaggtggccctcggggccaggatggtgctaagggtgaccgaggcgaggatggtgagccaggacagcctggatcccctggtcccaccggggagaatggacccccagggccacttggaaagcgaggtcctgctggctcgcctggttccgaggggcgacaaggagggaagggagccaagggagatcctggcgctataggtgccccggggaagacaggcccggtgggtcctgcaggcccagcagggaaacctggccctgatggtctgagggggctcccaggctcagtgggtcagcaaggccgacctggagctacaggccaggctgggcccccaggtcctgtgggacccccagggctgcctggtctccggggcgatgctggagccaagggagagaagggccacccaggtctcattggactgattgggcccccgggtgagcagggagagaagggagatcggggacttcctgggcctcagggctcccctgggcagaagggtgagatgggtatcccaggagcatccggccccattggtcctggaggtccccccggcctccccggacctgctggccccaaaggagccaaaggagccacaggcccaggcggacccaagggagagaagggtgtgcagggccctccaggacacccgggtcccccaggcgaggtgatccagccactgcccattcagatgcccaagaagactcggcgctcggtggatggaagccgtctgatgcaggaagatgaggccataccgaccgggggagcccccggcagtcctggggggctggaggagatctttggctcactcgactccctgcgggaggagatcgagcagatgaggcggccaacagggacccaggacagccctgctcgcacctgccaggacctgaagctgtgccacccagagcttcccgatggagagtactgggtcgaccccaaccagggctgtgctcgggatgccttccgagttttctgcaacttcacagcagggggtgagacctgtgtgacgcctagggatgacgtcacgcagttctcttacgtggactcagagggctccccagtgggtgtggtccagctcaccttcctgcggctgctcagcgtctcagcccaccaggacgtctcctacccctgctctggagcagcccgtgacggtcccctgagactccgtggggccaatgaggatgagctgagcccggagactagcccctatgtcaaagaattcagagatggctgccagacacagcaaggccggacggtgctggaggtgcgaacgcctgtgctggagcagctgccagtgctggatgcctccttctcagacctgggagccccaccgaggcggggaggggtgctgctggggcctgtctgcttcatgggataggaccgtctctgtctgatcctgtccattcggaaccaggcccacctggaatcccacaacatcagctctgtgccacctcccaagagggctcctcactatctagggagccctgggccagggcgtggagagccctcagtcggggcaggccaggggaggggtgaagtggttgcctggacaccccacgggaggagtggcatctggggctcttggccctcccacctggagcctgttacccgttagagagctgagacccttatttaaaactcacctcccaatcaccccaaacaaatggaagagaagagaaaggacatggcgtattttgtatttaaaagtaattgtattaattatttaaagtgtggaaagcaaaataacaaaaaagagaaacgccaacaaaaatcagcagatgttgaagacaggggtctcgggggtgggctccggcacccacatcctggagtcaggactttcctcagtgactgtgtgtaggggggtttcagggctgaaccccacctccctcccaccttcctcccacctcacctgtcgcacccactgtgaaagttggaatatgtggtctccctggcctcagggctctgactctgccagggtggggctctctaacccacaggtgttggctgcctggcccatgtgcccactgtctcttccacttggtctgggtttggcaggcactgcctgctacttgagggccaggatgctcccccagggaagaaacggaatagtgtggggtgtgtgcagggctgcatcccgcagatggctggaatattaaaattcttctatattggctggtaaattgccatggccctgagccactgagtatgttcattgccacccctgtccctcccctgggcacccctcactttccctgatcctgcaattaaagggttaatgtgtggcatatggaagggactcccaggaccctgtgcccagcttccatgctgactgatggttaaataatgtgattgtctcctcccagg

SEQ ID NO: 121550 - DNA, 5886 bp, Homo sapiens
  Payload ID: 3831
  Gene Symbol: COL12A1
  Gene Name: collagen, type XII, alpha 1
  Uniprot ID: Q99715
  ENST ID: ENST00000345356
  CDS Start-End: 111-5810
caccgagcaccagcttctccgacgccgggaagccgctgtcgccgccgctacctctccctgttgccgccgcctcagatctcttcatgccgctgtaagctcggaggccaaggatgcggagtaggcttcccccagcgcttgccgccctgggcgcggccctgctcctgtcttccattgaggcagaagggatggagtgtctcaccagagctgaggcagacattgtgttgctggtggatggatcatggagcatcggccgggcaaattttagaaccgtgaggagtttcatttctcgtattgtggaagtctttgacattggccccaaaagagtacaaattgctcttgctcagtatagtggggatcccagaacagagtggcagttaaatgcacacagagacaagaagagcttgttgcaagctgtggcaaacttgccgtacaaaggaggcaatactctcacaggcatggctttgaatttcattcgccaacagaacttcaggacccaagctggcatgagacctcgagctcgaaaaattggtgtgctcattactgatggaaaatcacaagacgatgttgaagcaccttcaaagaaactcaaggatgagggagtggagctgtttgctattggtattaaaaatgctgatgaagtcgaattaaagatgattgcaactgatcctgatgatacccatgcatacaatgtggcagattttgagtcactctccaggatagtggatgatctcaccattaatttgtgtaacagtgtcaaaggtccaggtgatttggaagcaccttctaacttagttatttctgagcgaacccatcgttcttttagagtgagctggacaccaccttctgacagtgtggatcgatataaggtggaatactatccagtttctggagggaaacgtcaagaattttatgtgagtcgaatggaaactagcacagtgctgaaagatctgaaacctgaaactgaatatgttgtcaatgtgtattctgtggtagaagatgaatatagtgagcctctgaaggggacagaaaaaaccttgccagtgcctgtagtcagcctgaatatttatgatgttggccctaccaccatgcatgtgcagtggcagcctgtgggaggagctactggctacatcttgtcatacaaacctgttaaggacacagagccaacaagacccaaagaggtgcgtttggggccaacagtgaatgacatgcagctgactgaccttgttcccaacacggagtatgcagtcacagtccaggctgtcctgcacgacctcactagtgaacctgtcactgttcgggaagtcaccttgcctttacccagacctcaggatctgaaactcagagatgtgactcacagcactatgaatgtcttttgggaacctgtgcctggaaaagtgcgtaaatatattgttcgatacaaaacaccagaagaggatgtcaaagaggtagaggtggacagatcagagaccagcacttccctcaaagacctcttctcacagaccttgtacacagtcagcgtttctgcagtacatgacgagggggagtctcctccagtgactgctcaagaaactacccgacccgtgccagccccaacaaacttaaagattactgaagtaacatcagagggtttcagagggacttgggatcatggagcttcagatgtgtctctctacagaataacttgggcaccttttggaagctcagataagatggagaccatcttaaatggagatgaaaacactttggtgttcgaaaacctgaaccccaacaccatctatgaagtttccattactgccatctatcctgatgagtcagaaagtgatgacctgattggcagtgagcgcacactgcctatcttaacaacacaagctcccaaaagtggcccacgaaaccttcaagtgtacaatgcaacatctaacagcctgactgttaagtgggatcctgctagtggtcgtgtgcagaaatataggatcacttatcagccttccacaggggaaggcaatgagcaaacgaccacaataggaggacggcagaacagtgtggtcctgcagaaactgaagccagacactccttacactatcaccgtatcctctctgtatcctgatggtgaaggaggtcggatgacgggaagaggcaagaccaaacctctaaacactgtaaggaacctgagagtgtatgacccttctaccagcaccttgaatgtccgctgggaccatgcagagggaaatcctcgtcagtacaagctcttctatgcaccagcagcaggtggtccagaggaactggtaccaatccccgggaataccaattatgccattcttaggaatctgcagccagatacctcatacactgtgactgtagttcccgtttatactgaaggtgatgggggacgcacatcagatactggaaggacattgatgagaggactggcaagaaatgtccaagtatacaatcctacacctaacagcctcgatgttcgctgggaccctgctccaggacctgtgctgcaatatcgcgttgtgtattctcctgtggatggcacaagaccctcagaatctatagtagtgccaggaaacacgcgcatggtgcatctggagcggctgattccggacacactctattccgtgaaccttgtggctctgtactcggatggagagggaaatcccagccctgcccagggccgaacgctaccacgcagtggaccaaggaacctgagagtctttggtgaaacaaccaatagcctctcggtagcctgggatcatgctgatgggccagttcagcagtacaggatcatctattctcccactgttggtgatccaattgatgaatataccacagtcccaggcagaagaaacaatgtaatactgcagcccctgcaacctgacactccatataaaattactgttattgctgtttatgaagatggagatggtggccatctaacaggaaatggaagaactgtgggactccttcctcctcagaacatacacatctctgacgaatggtatacaagattcagggtgtcctgggatccttcaccttctccagttcttggatataaaatagtatataagccagtgggttccaatgagcccatggaagcctttgttggagaaatgacatcatataccttacacaatctcaatcccagcaccacctacgatgtgaatgtttatgctcaatatgattctggactcagtgtccccttgacagatcaaggcactacattatatttaaatgtaacagatctgaaaacttaccagattgggtgggatacattctgtgtcaaatggtcacctcaccgggcagccacctcctacaggctaaaactaagccctgcagatggaacaaggggacaagaaattacagtgcgtggatcagaaaccagtcactgcttcactggcctttcaccagacactgattatggtgtcactgtttttgtgcagacaccaaatctcgagggaccaggagtctctgttaaagaacataccactgtgaaaccaacagaagcccctacagagccacccacacctcctccccctcccaccattccaccagcccgggatgtatgcaaaggggccaaggcagatattgtgttcttgactgatgcctcctggagcattggggacgataattttaacaaagttgtaaaattcatcttcaatactgtgggaggctttgatgaaatcagtcctgctgggattcaggtttcatttgtgcaatacagcgatgaggtcaagtctgagttcaagctgaacacgtacaatgacaaggccctagcccttggggccctccagaatattaggtacagaggaggaaacacaagaacaggcaaggccctcacgtttatcaaggagaaagtcttgacttgggagagcggcatgaggaagaatgtccctaaggtgttggttgtggtcacggacggtcggtcccaggatgaggtcaagaaggcggctttggtcatccagcagtcagggttcagtgtctttgtagttggtgtggctgatgtcgactacaatgagcttgccaacattgccagcaaaccaagtgaacggcacgtgttcattgtggacgactttgaatcttttgagaagatcgaagacaatcttattacatttgtttgtgaaactgccacttcaagttgtcctctcatttatttggatggctacacctcaccaggttttaaaatgcttgaagcatacaacctgacagaaaagaattttgcttctgtacaaggagtatctttggagtcagggtctttccccagctactcagcatacaggattcagaagaatgcgtttgtgaatcagcctacagcagacctacacccaaatggactccctccttcatacacgattatattattattcagacttctcccagaaactcccagtgacccttttgcaatttggcaaatcacagacagagactacaaaccacaagttggagtgattgcagatccttctagcaagacgttatcattctttaacaaggatacaagaggcgaggtgcaaactgttacatttgacacagaagaagtaaagacattattttatggaagttttcacaaggttcatattgtagtgacctcaaaaagtgttaagatttacattgactgctatgaaattatagaaaaagacatcaaggaagctggaaatataacaactgatggttatgaaattcttggaaaactccttaaaggggaaaggaaatcagccgcattccaaatccagagttttgacattgtctgcagtccagtgtggaccagtagagacagatgctgtgatattccctctaggagagatgagggaaaatgccctgcttttccaaattcttgcacatgtacacaggacagcgttggacctccaggacctccaggccctgcaggaggacctggtgctaaaggtcccagaggtgaaagaggtatcagtggggcaattgggccccctggtcctcgtggagacataggtcctccaggcccccagggtcctccaggccctcagggacccaatggactctctattccgggagagcaaggtcgccaagggatgaaaggtgatgctggagagccaggacttccaggccgaacaggaaccccaggattacctggcccaccaggaccaatgggacctccaggagacagaggcttcactggaaaagacggtgcaatgggacccaggggcccaccagggccgccgggaagcccaggctccccaggagtcacaggaccaagtgggaagccaggaaaacctggagatcatggcagaccaggtccatctgggttgaaaggagaaaaaggtgataggggagacattgcttcccagaacatgatgcgagcagttgcaagacaagtctgtgaacaattgataagtggtcagatgaacagattcaatcagatgctgaatcagattccaaatgattaccagtccagtcgcaaccagccaggcccgccgggtccaccgggacctcctggtagcgcaggagccagaggagaacctgggcctggggggcggccaggcttcccgggcacaccagggatgcagggaccccctggggaacgaggtttgccaggagagaaaggtgaaaggggtactggatcttcaggacctcgggggctgcctggccccccaggtccacaaggagaatccagaacaggtccaccagggtccacaggttcaagaggtccccctggcccccctggccgtcctggaaactcaggtatccgaggacccccaggtcctcctggatactgtgattcttctcagtgtgccagcatcccatacaacgggcaaggctatccaggttccggctaacacattttctaagtcgccagtgctgcttacagtttgaatacatgaaaatcctgtttctgagatgtttgcgcacgtg

SEQ ID NO: 121551 - DNA, 11723 bp, Homo sapiens
  Payload ID: 3831
  Gene Symbol: COL12A1
  Gene Name: collagen, type XII, alpha 1
  Uniprot ID: Q99715
  ENST ID: ENST00000322507
  CDS Start-End: 311-9502
acttggctaaggcgaaccgccccagacgcgtccgcgcgccggcagctgcaggctcaggccatctccagtcttcctgccgcgcccgcctctcctcctgggattctcctcctcctcctggacttccccgcagctgcccacgcctcggcggccgccaggtgctcctggagtgcagcgcctatcgccggggcgtgtgggggccacaccgagcaccagcttctccgacgccgggaagccgctgtcgccgccgctacctctccctgttgccgccgcctcagatctcttcatgccgctgtaagctcggaggccaaggatgcggagtaggcttcccccagcgcttgccgccctgggcgcggccctgctcctgtcttccattgaggcagaagttgacccaccttcagacttgaattttaaaattatagatgaaaatactgttcatatgtcatgggcaaaaccagttgatccaattgtgggttacagaataacggtggaccctacaacggatgggcctactaaagaatttaccctttcagctagtaccactgaaactttattgtcagaacttgtacctgaaacagagtatgtggtgacaataacttcatatgatgaagtagaagaaagtgtaccagttataggacaactaacaattcaaacaggtagttcgacaaagccagtggagaagaaacctggaaaaaccgagatacaaaaatgctctgtcagtgcctggactgatttggttttcctcgtggatggctcttggagtgtgggaagaaataatttcaagtacattttagacttcattgctgctcttgtgtctgcttttgacattggggaagagaagacaagagttggagttgttcaatacagctctgataccaggactgaatttaacttaaatcagtactaccaaagggatgaacttcttgctgcaataaaaaaaattccatataaaggtggcaacacaatgacaggggatgccattgattatttagttaaaaatactttcacggaatctgctggggcaagagttggctttcctaaagtggcaattattattacggatggaaaatcccaggatgaagtggaaattccagcaagagagcttcgtaatgttggagttgaagttttctccttgggcattaaagctgcagatgcaaaagaactcaaacaaattgcctccacaccttcactgaaccatgttttcaatgtggccaactttgatgcaattgtggatattcagaatgagatcatctcccaggtgtgctcaggtgttgatgaacaacttggtgaattggttagtggagaagaagttgttgagcctccttcaaatttgattgccatggaagtctcttcaaaatatgttaagctaaattggaatccatctcctagtccagtgactggctacaaagtcatcctcacaccaatgactgcaggaagccgacagcacgctctgagtgtggggcctcagacaaccacgctcagtgttcgcgacctctcagcagacacagaataccagatcagtgtttccgccatgaagggaatgacatccagtgaacccatttcaataatggagaagactcagccaatgaaagttcaagtggaatgctcacgtggtgtggatataaaagccgatattgtgtttttggttgatggctcctatagcattgggattgcaaactttgttaaagttagagcctttttggaagttcttgtaaaaagttttgaaatttcaccaaatagggtccagattagtcttgtgcaatacagccgggatcctcatactgagttcactttgaaaaaattcaccaaagttgaagatataattgaagcaataaacaccttcccttacagaggaggatctacaaatactggcaaagcaatgacttatgtcagagagaaaatatttgtgcctagcaagggatcaagaagcaatgtgccaaaggtcatgattcttatcacggatgggaaatcatcagatgctttcagagatcctgcgataaaactgaggaattcagatgttgaaatctttgcagttggtgtgaaggatgccgttcgctcagaattggaagctattgcctctcctcctgcagagacccatgtgttcacagtggaagattttgatgcttttcagaggatatcttttgaactcacacagtctatctgccttagaattgagcaagaattggcagctataaagaagaaagcttacgtccctccaaaggatcttagtttttcagaagtgacttcttatggtttcaaaaccaactggtctccagctggagaaaatgttttttcatatcacatcacctacaaggaagcggctggggatgatgaggtcactgtggtggagccagcatcgagcaccagtgttgttctcagcagcctgaagccagagaccttgtatttggtcaatgtgactgcggagtatgaggatggcttcagcattcccttagctggagaggagaccaccgaagaagtaaaaggagcacctcgaaacctaaaggtgacagatgagactacagatagtttcaaaattacttggactcaagctccagggagagttttaagatatcgaattatatatagaccagttgctggtggagagagcagagaagttaccaccccacccaatcagaggaggagaacactggagaacttgattccagacacgaaatatgaagtatctgtaattcctgaatatttctcaggacctggtactccattaactggaaatgcagccactgaagaagttagagggaatccaagagacttaagagtttctgaccctacgacgtctactatgaaattatcttggagtggggcaccaggaaaagtgaaacagtatctcgtcacatataccccagtggcagggggtgaaactcaagaggtcactgtgaggggagatacaaccaatacggtgctgcagggattgaaggaagggacacaatacgccttatctgtgacagccttgtatgcgtctggggctggagacgccctctttggtgaaggaacaacacttgaagaacgtggttctcctcaagatttagttactaaagacatcactgacacatcaattggggcttattggacatctgctccaggaatggttcgcggttacagggtctcatggaaatcactttatgatgatgttgacactggagagaaaaatctgcctgaagatgcaattcatacgatgatagaaaatctgcagccagagaccaaatacagaatttcagtatttgccacttacagcagtggagaaggagaacctttgactggagatgccacaactgaattatctcaagattccaaaaccctgaaagtagatgaagaaacagaaaacacaatgagagttacatggaaaccagcaccagggaaagtcgtcaactaccgtgttgtctatcgccctcatgggagagggaagcaaatggttgctaaggtgccccccacagtcacttcgacagtgttaaagcgacttcagccacagaccacatatgacatcacagttcttcctatttacaagatgggagaaggaaagcttaggcaaggatcaggaacaacagcttctcggtttaagtctcctagaaacctcaaaacatctgacccaaccatgtcaagcttccgagtgacttgggagcctgcccctggggaagtgaagggttataaagtcacattccaccctacgggggatgacagaagactgggggagttagtggttggaccctatgacaacacagttgttttggaggaacttagggctggtaccacctataaagtaaatgtttttggaatgtttgatggaggagaaagctcaccacttgttggacaagaaatgacaaccctttccgacacaactgttatgccaattttatcttctgggatggagtgtctcaccagagctgaggcagacattgtgttgctggtggatggatcatggagcatcggccgggcaaattttagaaccgtgaggagtttcatttctcgtattgtggaagtctttgacattggccccaaaagagtacaaattgctcttgctcagtatagtggggatcccagaacagagtggcagttaaatgcacacagagacaagaagagcttgttgcaagctgtggcaaacttgccgtacaaaggaggcaatactctcacaggcatggctttgaatttcattcgccaacagaacttcaggacccaagctggcatgagacctcgagctcgaaaaattggtgtgctcattactgatggaaaatcacaagacgatgttgaagcaccttcaaagaaactcaaggatgagggagtggagctgtttgctattggtattaaaaatgctgatgaagtcgaattaaagatgattgcaactgatcctgatgatacccatgcatacaatgtggcagattttgagtcactctccaggatagtggatgatctcaccattaatttgtgtaacagtgtcaaaggtccaggtgatttggaagcaccttctaacttagttatttctgagcgaacccatcgttcttttagagtgagctggacaccaccttctgacagtgtggatcgatataaggtggaatactatccagtttctggagggaaacgtcaagaattttatgtgagtcgaatggaaactagcacagtgctgaaagatctgaaacctgaaactgaatatgttgtcaatgtgtattctgtggtagaagatgaatatagtgagcctctgaaggggacagaaaaaaccttgccagtgcctgtagtcagcctgaatatttatgatgttggccctaccaccatgcatgtgcagtggcagcctgtgggaggagctactggctacatcttgtcatacaaacctgttaaggacacagagccaacaagacccaaagaggtgcgtttggggccaacagtgaatgacatgcagctgactgaccttgttcccaacacggagtatgcagtcacagtccaggctgtcctgcacgacctcactagtgaacctgtcactgttcgggaagtcaccttgcctttacccagacctcaggatctgaaactcagagatgtgactcacagcactatgaatgtcttttgggaacctgtgcctggaaaagtgcgtaaatatattgttcgatacaaaacaccagaagaggatgtcaaagaggtagaggtggacagatcagagaccagcacttccctcaaagacctcttctcacagaccttgtacacagtcagcgtttctgcagtacatgacgagggggagtctcctccagtgactgctcaagaaactacccgacccgtgccagccccaacaaacttaaagattactgaagtaacatcagagggtttcagagggacttgggatcatggagcttcagatgtgtctctctacagaataacttgggcaccttttggaagctcagataagatggagaccatcttaaatggagatgaaaacactttggtgttcgaaaacctgaaccccaacaccatctatgaagtttccattactgccatctatcctgatgagtcagaaagtgatgacctgattggcagtgagcgcacactgcctatcttaacaacacaagctcccaaaagtggcccacgaaaccttcaagtgtacaatgcaacatctaacagcctgactgttaagtgggatcctgctagtggtcgtgtgcagaaatataggatcacttatcagccttccacaggggaaggcaatgagcaaacgaccacaataggaggacggcagaacagtgtggtcctgcagaaactgaagccagacactccttacactatcaccgtatcctctctgtatcctgatggtgaaggaggtcggatgacgggaagaggcaagaccaaacctctaaacactgtaaggaacctgagagtgtatgacccttctaccagcaccttgaatgtccgctgggaccatgcagagggaaatcctcgtcagtacaagctcttctatgcaccagcagcaggtggtccagaggaactggtaccaatccccgggaataccaattatgccattcttaggaatctgcagccagatacctcatacactgtgactgtagttcccgtttatactgaaggtgatgggggacgcacatcagatactggaaggacattgatgagaggactggcaagaaatgtccaagtatacaatcctacacctaacagcctcgatgttcgctgggaccctgctccaggacctgtgctgcaatatcgcgttgtgtattctcctgtggatggcacaagaccctcagaatctatagtagtgccaggaaacacgcgcatggtgcatctggagcggctgattccggacacactctattccgtgaaccttgtggctctgtactcggatggagagggaaatcccagccctgcccagggccgaacgctaccacgcagtggaccaaggaacctgagagtctttggtgaaacaaccaatagcctctcggtagcctgggatcatgctgatgggccagttcagcagtacaggatcatctattctcccactgttggtgatccaattgatgaatataccacagtcccaggcagaagaaacaatgtaatactgcagcccctgcaacctgacactccatataaaattactgttattgctgtttatgaagatggagatggtggccatctaacaggaaatggaagaactgtgggactccttcctcctcagaacatacacatctctgacgaatggtatacaagattcagggtgtcctgggatccttcaccttctccagttcttggatataaaatagtatataagccagtgggttccaatgagcccatggaagcctttgttggagaaatgacatcatataccttacacaatctcaatcccagcaccacctacgatgtgaatgtttatgctcaatatgattctggactcagtgtccccttgacagatcaaggcactacattatatttaaatgtaacagatctgaaaacttaccagattgggtgggatacattctgtgtcaaatggtcacctcaccgggcagccacctcctacaggctaaaactaagccctgcagatggaacaaggggacaagaaattacagtgcgtggatcagaaaccagtcactgcttcactggcctttcaccagacactgattatggtgtcactgtttttgtgcagacaccaaatctcgagggaccaggagtctctgttaaagaacataccactgtgaaaccaacagaagcccctacagagccacccacacctcctccccctcccaccattccaccagcccgggatgtatgcaaaggggccaaggcagatattgtgttcttgactgatgcctcctggagcattggggacgataattttaacaaagttgtaaaattcatcttcaatactgtgggaggctttgatgaaatcagtcctgctgggattcaggtttcatttgtgcaatacagcgatgaggtcaagtctgagttcaagctgaacacgtacaatgacaaggccctagcccttggggccctccagaatattaggtacagaggaggaaacacaagaacaggcaaggccctcacgtttatcaaggagaaagtcttgacttgggagagcggcatgaggaagaatgtccctaaggtgttggttgtggtcacggacggtcggtcccaggatgaggtcaagaaggcggctttggtcatccagcagtcagggttcagtgtctttgtagttggtgtggctgatgtcgactacaatgagcttgccaacattgccagcaaaccaagtgaacggcacgtgttcattgtggacgactttgaatcttttgagaagatcgaagacaatcttattacatttgtttgtgaaactgccacttcaagttgtcctctcatttatttggatggctacacctcaccaggttttaaaatgcttgaagcatacaacctgacagaaaagaattttgcttctgtacaaggagtatctttggagtcagggtctttccccagctactcagcatacaggattcagaagaatgcgtttgtgaatcagcctacagcagacctacacccaaatggactccctccttcatacacgattatattattattcagacttctcccagaaactcccagtgacccttttgcaatttggcaaatcacagacagagactacaaaccacaagttggagtgattgcagatccttctagcaagacgttatcattctttaacaaggatacaagaggcgaggtgcaaactgttacatttgacacagaagaagtaaagacattattttatggaagttttcacaaggttcatattgtagtgacctcaaaaagtgttaagatttacattgactgctatgaaattatagaaaaagacatcaaggaagctggaaatataacaactgatggttatgaaattcttggaaaactccttaaaggggaaaggaaatcagccgcattccaaatccagagttttgacattgtctgcagtccagtgtggaccagtagagacagatgctgtgatattccctctaggagagatgagggaaaatgccctgcttttccaaattcttgcacatgtacacaggacagcgttggacctccaggacctccaggccctgcaggaggacctggtgctaaaggtcccagaggtgaaagaggtatcagtggggcaattgggccccctggtcctcgtggagacataggtcctccaggcccccagggtcctccaggccctcagggacccaatggactctctattccgggagagcaaggtcgccaagggatgaaaggtgatgctggagagccaggacttccaggccgaacaggaaccccaggattacctggcccaccaggaccaatgggacctccaggagacagaggcttcactggaaaagacggtgcaatgggacccaggggcccaccagggccgccgggaagcccaggctccccaggagtcacaggaccaagtgggaagccaggaaaacctggagatcatggcagaccaggtccatctgggttgaaaggagaaaaaggtgataggggagacattgcttcccagaacatgatgcgagcagttgcaagacaagtctgtgaacaattgataagtggtcagatgaacagattcaatcagatgctgaatcagattccaaatgattaccagtccagtcgcaaccagccaggcccgccgggtccaccgggacctcctggtagcgcaggagccagaggagaacctgggcctggggggcggccaggcttcccgggcacaccagggatgcagggaccccctggggaacgaggtttgccaggagagaaaggtgaaaggggtactggatcttcaggacctcgggggctgcctggccccccaggtccacaaggagaatccagaacaggtccaccagggtccacaggttcaagaggtccccctggcccccctggccgtcctggaaactcaggtatccgaggacccccaggtcctcctggatactgtgattcttctcagtgtgccagcatcccatacaacgggcaaggctatccaggttccggctaacacattttctaagtcgccagtgctgcttacagtttgaatacatgaaaatcctgtttctgagatgtttgcgcacgtgcttattaggaaatgagtctgtatggaaatctcaccacagataatggttaacgaaccgggtcgacatcacaaaggagggtggagactctttttactaacttgaatgagacaaaagcagtggtgtcagtttataatcctgatgcatttcagtaataatgtagaaaaacattattttaaaaaagttccaacacacagccatgaggagcctcagttttgaaagaggtgcataataaaactactaaccagaggagtctatgccattttaagaaaaacaattaacctggttaaagagaaatgtcttatgtaaataataaactaattgtggcttgtaaatgatttgtatgtgatcctgtcgactaaaatcacttaacaattctacaataagcttctgcatcaaagcctgccgcttgctctatgccggaataacaccaaatggaatctcctcatctcttgcttgttagcgatgtgtctgattcagggcatctgtctttttgttacttttttgtccgtgtcctctcatttgggttttgtaactgcaattttcaaaccaaagtttaaaatcaccttttcttcctgttttgctgtagtcactggtgttcctcacccaccagctgtaactcagtttgtgtgaggtacagccacagaagatgtcatgtactgtatattacctggtgatagttgcttttcaccccccgagttcagtttctaggagccaatgaaacttcccctcacctcctcatctttccaagttgttctttgaattgaggagtttgaaggcataaacagttacttggggatttgcgaaaatcctacttagttactgcgtttacagttctttggcccagtctctgacccttcccaagtatttgtgcaatgattgtgtttactgctggatttttgaaggtttttttttttaagaaagtgccatttcattatttgattatcaccaaattatctggaaataattgggacattgtaacttatctatttatagttatgagattaagactggagtgccatcaccgcgggtgatgatttagcttttgctgtgtgtgtgtgtgtgtgccttccaaatcatgccataattgtaatgttgaatcggacagagccttacgtgcccgagggcggggcctacctgcctgagcgcgagcccttcatcgtgccggtggagcccgagcggacagcggaatacgaggactacggcgcagacgagcctgcagaggagcctcctgagccccaccggcgctggcggcgcgccctgccccacggacccgggcagtgaaccagagatcacgcgccgcgccgcgaggcttgggggaggtgttgaaattctcatttacaggtcagatagagcagtgtacgtcttttctgaggtgtttcttccagcgttgctcatccaggagtaccctttctgattgtagagaaccttgtttctgcaggaagcctagctccaagcacgcagtctgtagacatttttgcctttgcccttgaaatgcttgcaaaatactttgttaacaaaagctgcaaagagagaacatgccgtgtgcctttagttagcacagcgggcagcctcagtgaaactcttaggttaagcagttaagtcctggaacccagagctgctgtgtatttcgagcgggcagtttatcttttgctatacttattttcaattcaattacaccacgattcaaataattcccctcctaaaaccaaaaaggagggaaacgtcaactccattgcaattacttatcttcctcttctatctctgttatacgccggggcatagaatgctcgtatacatctctttaacaaccacaaaccttaagccatgtagatgaagttagtgcatcaacgggatacagttccatattgccttaaacctccttgttttagacacactaacatttataccaaattgcagattattctgcagagagggaattgcatgtttgtgttgtatatttagtatgaacttttttcagaatataatatttcttagttatcaaaagtagttggaaaacatttgcaagactatgaacatagaattgctgcttttatattttaactgcagattgtgaatttcactgccttatattatttatttctgaaacaaaagaggcatttttcaataaaactactgaaaatttga

SEQ ID NO: 121552 - DNA, 1914 bp, Homo sapiens
  Payload ID: 3831
  Gene Symbol: COL12A1
  Gene Name: collagen, type XII, alpha 1
  ENST ID: ENST00000419671
  CDS Start-End: 1-1914
gaagagcttgttgcaagctgtggcaaacttgccgtacaaaggaggcaatactctcacaggcatggctttgaatttcattcgccaacagaacttcaggacccaagctggcatgagacctcgagctcgaaaaattggtgtgctcattactgatggaaaatcacaagacgatgttgaagcaccttcaaagaaactcaaggatgagggagtggagctgtttgctattggtattaaaaatgctgatgaagtcgaattaaagatgattgcaactgatcctgatgatacccatgcatacaatgtggcagattttgagtcactctccaggatagtggatgatctcaccattaatttgtgtaacagtgtcaaaggtccaggtgatttggaagcaccttctaacttagttatttctgagcgaacccatcgttcttttagagtgagctggacaccaccttctgacagtgtggatcgatataaggtggaatactatccagtttctggagggaaacgtcaagaattttatgtgagtcgaatggaaactagcacagtgctgaaagatctgaaacctgaaactgaatatgttgtcaatgtgtattctgtggtagaagatgaatatagtgagcctctgaaggggacagaaaaaaccttgccagtgcctgtagtcagcctgaatatttatgatgttggccctaccaccatgcatgtgcagtggcagcctgtgggaggagctactggctacatcttgtcatacaaacctgttaaggacacagagccaacaagacccaaagaggtgcgtttggggccaacagtgaatgacatgcagctgactgaccttgttcccaacacggagtatgcagtcacagtccaggctgtcctgcacgacctcactagtgaacctgtcactgttcgggaagtcaccttgcctttacccagacctcaggatctgaaactcagagatgtgactcacagcactatgaatgtcttttgggaacctgtgcctggaaaagtgcgtaaatatattgttcgatacaaaacaccagaagaggatgtcaaagaggtagaggtggacagatcagagaccagcacttccctcaaagacctcttctcacagaccttgtacacagtcagcgtttctgcagtacatgacgagggggagtctcctccagtgactgctcaagaaactacccgacccgtgccagccccaacaaacttaaagattactgaagtaacatcagagggtttcagagggacttgggatcatggagcttcagatgtgtctctctacagaataacttgggcaccttttggaagctcagataagatggagaccatcttaaatggagatgaaaacactttggtgttcgaaaacctgaaccccaacaccatctatgaagtttccattactgccatctatcctgatgagtcagaaagtgatgacctgattggcagtgagcgcacacctcccaaaagtggcccacgaaaccttcaagtgtacaatgcaacatctaacagcctgactgttaagtgggatcctgctagtggtcgtgtgcagaaatataggatcacttatcagccttccacaggggaaggcaatgagcaaacgaccacaataggaggacggcagaacagtgtggtcctgcagaaactgaagccagacactccttacactatcaccgtatcctctctgtatcctgatggtgaaggaggtcggatgacgggaagaggcaagaccaaacctctaaacactgtaaggaacctgagagtgtatgacccttctaccagcaccttgaatgtccgctgggaccatgcagagggaaatcctcgtcagtacaagctcttctatgcaccagcagcaggtggtccagaggaactggtaccaatccccgggaataccaattatgccattcttaggaatctgca

SEQ ID NO: 121553 - DNA, 3135 bp, Homo sapiens
  Payload ID: 3831
  Gene Symbol: COL12A1
  Gene Name: collagen, type XII, alpha 1
  ENST ID: ENST00000425443
  CDS Start-End: 1-2271
gtttcatttgtgcaatacagcgatgaggtcaagtctgagttcaagctgaacacgtacaatgacaaggccctagcccttggggccctccagaatattaggtacagaggaggaaacacaagaacaggcaaggccctcacgtttatcaaggagaaagtcttgacttgggagagcggcatgaggaagaatgtccctaaggtgttggttgtggtcacggacggtcggtcccaggatgaggtcaagaaggcggctttggtcatccagcagtcagggttcagtgtctttgtagttggtgtggctgatgtcgactacaatgagcttgccaacattgccagcaaaccaagtgaacggcacgtgttcattgtggacgactttgaatcttttgagaagatcgaagacaatcttattacatttgtttgtgaaactgccacttcaagttgtcctctcatttatttggatggctacacctcaccaggttttaaaatgcttgaagcatacaacctgacagaaaagaattttgcttctgtacaaggagtatctttggagtcagggtctttccccagctactcagcatacaggattcagaagaatgcgtttgtgaatcagcctacagcagacctacacccaaatggactccctccttcatacacgattatattattattcagacttctcccagaaactcccagtgacccttttgcaatttggcaaatcacagacagagactacaaaccacaagttggagtgattgcagatccttctagcaagacgttatcattctttaacaaggatacaagaggcgaggtgcaaactgttacatttgacacagaagaagtaaagacattattttatggaagttttcacaaggttcatattgtagtgacctcaaaaagtgttaagatttacattgactgctatgaaattatagaaaaagacatcaaggaagctggaaatataacaactgatggttatgaaattcttggaaaactccttaaaggggaaaggaaatcagccgcattccaaatccagagttttgacattgtctgcagtccagtgtggaccagtagagacagatgctgtgatattccctctaggagagatgagggaaaatgccctgcttttccaaattcttgcacatgtacacaggacagcgttggacctccaggacctccaggccctgcaggaggacctggtgctaaaggtcccagaggtgaaagaggtatcagtggggcaattgggccccctggtcctcgtggagacataggtcctccaggcccccagggtcctccaggccctcagggacccaatggactctctattccgggagagcaaggtcgccaagggatgaaaggtgatgctggagagccaggacttccaggccgaacaggaaccccaggattacctggcccaccaggaccaatgggacctccaggagacagaggcttcactggaaaagacggtgcaatgggacccaggggcccaccagggccgccgggaagcccaggctccccaggagtcacaggaccaagtgggaagccaggaaaacctggagatcatggcagaccaggtccatctgggttgaaaggagaaaaaggtgataggggagacattgcttcccagaacatgatgcgagcagttgcaagacaagtctgtgaacaattgataagtggtcagatgaacagattcaatcagatgctgaatcagattccaaatgattaccagtccagtcgcaaccagccaggcccgccgggtccaccgggacctcctggtagcgcaggagccagaggagaacctgggcctggggggcggccaggcttcccgggcacaccagggatgcagggaccccctggggaacgaggtttgccaggagagaaaggtgaaaggggtactggatcttcaggacctcgggggctgcctggccccccaggtccacaaggagaatccagaacaggtccaccagggtccacaggttcaagaggtccccctggcccccctggccgtcctggaaactcaggtatccgaggacccccaggtcctcctggatactgtgattcttctcagtgtgccagcatcccatacaacgggcaaggctatccagagccttacgtgcccgagggcggggcctacctgcctgagcgcgagcccttcatcgtgccggtggagcccgagcggacagcggaatacgaggactacggcgcagacgagcctgcagaggagcctcctgagccccaccggcgctggcggcgcgccctgccccacggacccgggcagtgaaccagagatcacgcgccgcgccgcgaggcttgggggaggtgttgaaattctcatttacaggtcagatagagcagtgtacgtcttttctgaggtgtttcttccagcgttgctcatccaggagtaccctttctgattgtagagaaccttgtttctgcaggaagcctagctccaagcacgcagtctgtagacatttttgcctttgcccttgaaatgcttgcaaaatactttgttaacaaaagctgcaaagagagaacatgccgtgtgcctttagttagcacagcgggcagcctcagtgaaactcttaggttaagcagttaagtcctggaacccagagctgctgtgtatttcgagcgggcagtttatcttttgctatacttattttcaattcaattacaccacgattcaaataattcccctcctaaaaccaaaaaggagggaaacgtcaactccattgcaattacttatcttcctcttctatctctgttatacgccggggcatagaatgctcgtatacatctctttaacaaccacaaaccttaagccatgtagatgaagttagtgcatcaacgggatacagttccatattgccttaaacctccttgttttagacacactaacatttataccaaattgcagattattctgcagagagggaattgcatgtttgtgttgtatatttagtatgaacttttttcagaatataatatttcttagttatcaaaagtagttggaaaacatttgcaagactatgaacatagaattgctgcttttatattttaactgcagattgtgaatttcactgccttatattatttatttctgaaacaaaagaggcatttttcaataaaactactgaaaatttga

SEQ ID NO: 121554 - DNA, 8964 bp, Homo sapiens
  Payload ID: 3831
  Gene Symbol: COL12A1
  Gene Name: collagen, type XII, alpha 1
  Uniprot ID: Q99715
  ENST ID: ENST00000416123
  CDS Start-End: 1-8964
atgcggagtaggcttcccccagcgcttgccgccctgggcgcggccctgctcctgtcttccattgaggcagaagttgacccaccttcagacttgaattttaaaattatagatgaaaatactgttcatatgtcatgggcaaaaccagttgatccaattgtgggttacagaataacggtggaccctacaacggatgggcctactaaagaatttaccctttcagctagtaccactgaaactttattgtcagaacttgtacctgaaacagagtatgtggtgacaataacttcatatgatgaagtagaagaaagtgtaccagttataggacaactaacaattcaaacaggtagttcgacaaagccagtggagaagaaacctggaaaaaccgagatacaaaaatgctctgtcagtgcctggactgatttggttttcctcgtggatggctcttggagtgtgggaagaaataatttcaagtacattttagacttcattgctgctcttgtgtctgcttttgacattggggaagagaagacaagagttggagttgttcaatacagctctgataccaggactgaatttaacttaaatcagtactaccaaagggatgaacttcttgctgcaataaaaaaaattccatataaaggtggcaacacaatgacaggggatgccattgattatttagttaaaaatactttcacggaatctgctggggcaagagttggctttcctaaagtggcaattattattacggatggaaaatcccaggatgaagtggaaattccagcaagagagcttcgtaatgttggagttgaagttttctccttgggcattaaagctgcagatgcaaaagaactcaaacaaattgcctccacaccttcactgaaccatgttttcaatgtggccaactttgatgcaattgtggatattcagaatgagatcatctcccaggtgtgctcaggtgttgatgaacaacttggtgaattggttagtggagaagaagttgttgagcctccttcaaatttgattgccatggaagtctcttcaaaatatgttaagctaaattggaatccatctcctagtccagtgactggctacaaagtcatcctcacaccaatgactgcaggaagccgacagcacgctctgagtgtggggcctcagacaaccacgctcagtgttcgcgacctctcagcagacacagaataccagatcagtgtttccgccatgaagggaatgacatccagtgaacccatttcaataatggagaagactcagccaatgaaagttcaagtggaatgctcacgtggtgtggatataaaagccgatattgtgtttttggttgatggctcctatagcattgggattgcaaactttgttaaagttagagcctttttggaagttcttgtaaaaagttttgaaatttcaccaaatagggtccagattagtcttgtgcaatacagccgggatcctcatactgagttcactttgaaaaaattcaccaaagttgaagatataattgaagcaataaacaccttcccttacagaggaggatctacaaatactggcaaagcaatgacttatgtcagagagaaaatatttgtgcctagcaagggatcaagaagcaatgtgccaaaggtcatgattcttatcacggatgggaaatcatcagatgctttcagagatcctgcgataaaactgaggaattcagatgttgaaatctttgcagttggtgtgaaggatgccgttcgctcagaattggaagctattgcctctcctcctgcagagacccatgtgttcacagtggaagattttgatgcttttcagaggatatcttttgaactcacacagtctatctgccttagaattgagcaagaattggcagctataaagaagaaagcttacgtccctccaaaggatcttagtttttcagaagtgacttcttatggtttcaaaaccaactggtctccagctggagaaaatgttttttcatatcacatcacctacaaggaagcggctggggatgatgaggtcactgtggtggagccagcatcgagcaccagtgttgttctcagcagcctgaagccagagaccttgtatttggtcaatgtgactgcggagtatgaggatggcttcagcattcccttagctggagaggagaccaccgaagaagtaaaaggagcacctcgaaacctaaaggtgacagatgagactacagatagtttcaaaattacttggactcaagctccagggagagttttaagatatcgaattatatatagaccagttgctggtggagagagcagagaagttaccaccccacccaatcagaggaggagaacactggagaacttgattccagacacgaaatatgaagtatctgtaattcctgaatatttctcaggacctggtactccattaactggaaatgcagccactgaagaagttagagggaatccaagagacttaagagtttctgaccctacgacgtctactatgaaattatcttggagtggggcaccaggaaaagtgaaacagtatctcgtcacatataccccagtggcagggggtgaaactcaagaggtcactgtgaggggagatacaaccaatacggtgctgcagggattgaaggaagggacacaatacgccttatctgtgacagccttgtatgcgtctggggctggagacgccctctttggtgaaggaacaacacttgaagaacgtggttctcctcaagatttagttactaaagacatcactgacacatcaattggggcttattggacatctgctccaggaatggttcgcggttacagggtctcatggaaatcactttatgatgatgttgacactggagagaaaaatctgcctgaagatgcaattcatacgatgatagaaaatctgcagccagagaccaaatacagaatttcagtatttgccacttacagcagtggagaaggagaacctttgactggagatgccacaactgaattatctcaagattccaaaaccctgaaagtagatgaagaaacagaaaacacaatgagagttacatggaaaccagcaccagggaaagtcgtcaactaccgtgttgtctatcgccctcatgggagagggaagcaaatggttgctaaggtgccccccacagtcacttcgacagtgttaaagcgacttcagccacagaccacatatgacatcacagttcttcctatttacaagatgggagaaggaaagcttaggcaaggatcaggaacaacagcttctcggtttaagtctcctagaaacctcaaaacatctgacccaaccatgtcaagcttccgagtgacttgggagcctgcccctggggaagtgaagggttataaagtcacattccaccctacgggggatgacagaagactgggggagttagtggttggaccctatgacaacacagttgttttggaggaacttagggctggtaccacctataaagtaaatgtttttggaatgtttgatggaggagaaagctcaccacttgttggacaagaaatgacaaccctttccgacacaactgttatgccaattttatcttctgggatggagtgtctcaccagagctgaggcagacattgtgttgctggtggatggatcatggagcatcggccgggcaaattttagaaccgtgaggagtttcatttctcgtattgtggaagtctttgacattggccccaaaagagtacaaattgctcttgctcagtatagtggggatcccagaacagagtggcagttaaatgcacacagagacaagaagagcttgttgcaagctgtggcaaacttgccgtacaaaggaggcaatactctcacaggcatggctttgaatttcattcgccaacagaacttcaggacccaagctggcatgagacctcgagctcgaaaaattggtgtgctcattactgatggaaaatcacaagacgatgttgaagcaccttcaaagaaactcaaggatgagggagtggagctgtttgctattggtattaaaaatgctgatgaagtcgaattaaagatgattgcaactgatcctgatgatacccatgcatacaatgtggcagattttgagtcactctccaggatagtggatgatctcaccattaatttgtgtaacagtgtcaaaggtccaggtgatttggaagcaccttctaacttagttatttctgagcgaacccatcgttcttttagagtgagctggacaccaccttctgacagtgtggatcgatataaggtggaatactatccagtttctggagggaaacgtcaagaattttatgtgagtcgaatggaaactagcacagtgctgaaagatctgaaacctgaaactgaatatgttgtcaatgtgtattctgtggtagaagatgaatatagtgagcctctgaaggggacagaaaaaaccttgccagtgcctgtagtcagcctgaatatttatgatgttggccctaccaccatgcatgtgcagtggcagcctgtgggaggagctactggctacatcttgtcatacaaacctgttaaggacacagagccaacaagacccaaagaggtgcgtttggggccaacagtgaatgacatgcagctgactgaccttgttcccaacacggagtatgcagtcacagtccaggctgtcctgcacgacctcactagtgaacctgtcactgttcgggaagtcaccttgcctttacccagacctcaggatctgaaactcagagatgtgactcacagcactatgaatgtcttttgggaacctgtgcctggaaaagtgcgtaaatatattgttcgatacaaaacaccagaagaggatgtcaaagaggtagaggtggacagatcagagaccagcacttccctcaaagacctcttctcacagaccttgtacacagtcagcgtttctgcagtacatgacgagggggagtctcctccagtgactgctcaagaaactacccgacccgtgccagccccaacaaacttaaagattactgaagtaacatcagagggtttcagagggacttgggatcatggagcttcagatgtgtctctctacagaataacttgggcaccttttggaagctcagataagatggagaccatcttaaatggagatgaaaacactttggtgttcgaaaacctgaaccccaacaccatctatgaagtttccattactgccatctatcctgatgagtcagaaagtgatgacctgattggcagtgagcgcacactgcctatcttaacaacacaagctcccaaaagtggcccacgaaaccttcaagtgtacaatgcaacatctaacagcctgactgttaagtgggatcctgctagtggtcgtgtgcagaaatataggatcacttatcagccttccacaggggaaggcaatgagcaaacgaccacaataggaggacggcagaacagtgtggtcctgcagaaactgaagccagacactccttacactatcaccgtatcctctctgtatcctgatggtgaaggaggtcggatgacgggaagaggcaagaccaaacctctaaacactgtaaggaacctgagagtgtatgacccttctaccagcaccttgaatgtccgctgggaccatgcagagggaaatcctcgtcagtacaagctcttctatgcaccagcagcaggtggtccagaggaactggtaccaatccccgggaataccaattatgccattcttaggaatctgcagccagatacctcatacactgtgactgtagttcccgtttatactgaaggtgatgggggacgcacatcagatactggaaggacattgatgagaggactggcaagaaatgtccaagtatacaatcctacacctaacagcctcgatgttcgctgggaccctgctccaggacctgtgctgcaatatcgcgttgtgtattctcctgtggatggcacaagaccctcagaatctatagtagtgccaggaaacacgcgcatggtgcatctggagcggctgattccggacacactctattccgtgaaccttgtggctctgtactcggatggagagggaaatcccagccctgcccagggccgaacgctaccacgcagtggaccaaggaacctgagagtctttggtgaaacaaccaatagcctctcggtagcctgggatcatgctgatgggccagttcagcagtacaggatcatctattctcccactgttggtgatccaattgatgaatataccacagtcccaggcagaagaaacaatgtaatactgcagcccctgcaacctgacactccatataaaattactgttattgctgtttatgaagatggagatggtggccatctaacaggaaatggaagaactgtgggactccttcctcctcagaacatacacatctctgacgaatggtatacaagattcagggtgtcctgggatccttcaccttctccagttcttggatataaaatagtatataagccagtgggttccaatgagcccatggaagcctttgttggagaaatgacatcatataccttacacaatctcaatcccagcaccacctacgatgtgaatgtttatgctcaatatgattctggactcagtgtccccttgacagatcaaggcactacattatatttaaatgtaacagatctgaaaacttaccagattgggtgggatacattctgtgtcaaatggtcacctcaccgggcagccacctcctacaggctaaaactaagccctgcagatggaacaaggggacaagaaattacagtgcgtggatcagaaaccagtcactgcttcactggcctttcaccagacactgattatggtgtcactgtttttgtgcagacaccaaatctcgagggaccaggagtctctgttaaagaacataccactgtgaaaccaacagaagcccctacagagccacccacacctcctccccctcccaccattccaccagcccgggatgtatgcaaaggggccaaggcagatattgtgttcttgactgatgcctcctggagcattggggacgataattttaacaaagttgtaaaattcatcttcaatactgtgggaggctttgatgaaatcagtcctgctgggattcaggtttcatttgtgcaatacagcgatgaggtcaagtctgagttcaagctgaacacgtacaatgacaaggccctagcccttggggccctccagaatattaggtacagaggaggaaacacaagaacaggcaaggccctcacgtttatcaaggagaaagtcttgacttgggagagcggcatgaggaagaatgtccctaaggtgttggttgtggtcacggacggtcggtcccaggatgaggtcaagaaggcggctttggtcatccagcagtcagggttcagtgtctttgtagttggtgtggctgatgtcgactacaatgagcttgccaacattgccagcaaaccaagtgaacggcacgtgttcattgtggacgactttgaatcttttgagaagatcgaagacaatcttattacatttgtttgtgaaactgccacttcaagttgtcctctcatttatttggatggctacacctcaccaggttttaaaatgcttgaagcatacaacctgacagaaaagaattttgcttctgtacaaggagtatctttggagtcagggtctttccccagctactcagcatacaggattcagaagaatgcgtttgtgaatcagcctacagcagacctacacccaaatggactccctccttcatacacgattatattattattcagacttctcccagaaactcccagtgacccttttgcaatttggcaaatcacagacagagactacaaaccacaagttggagtgattgcagatccttctagcaagacgttatcattctttaacaaggatacaagaggcgaggtgcaaactgttacatttgacacagaagaagtaaagacattattttatggaagttttcacaagagagatgagggaaaatgccctgcttttccaaattcttgcacatgtacacaggacagcgttggacctccaggacctccaggccctgcaggaggacctggtgctaaaggtcccagaggtgaaagaggtatcagtggggcaattgggccccctggtcctcgtggagacataggtcctccaggcccccagggtcctccaggccctcagggacccaatggactctctattccgggagagcaaggtcgccaagggatgaaaggtgatgctggagagccaggacttccaggccgaacaggaaccccaggattacctggcccaccaggaccaatgggacctccaggagacagaggcttcactggaaaagacggtgcaatgggacccaggggcccaccagggccgccgggaagcccaggctccccaggagtcacaggaccaagtgggaagccaggaaaacctggagatcatggcagaccaggtccatctgggttgaaaggagaaaaaggtgataggggagacattgcttcccagaacatgatgcgagcagttgcaagacaagtctgtgaacaattgataagtggtcagatgaacagattcaatcagatgctgaatcagattccaaatgattaccagtccagtcgcaaccagccaggcccgccgggtccaccgggacctcctggtagcgcaggagccagaggagaacctgggcctggggggcggccaggcttcccgggcacaccagggatgcagggaccccctggggaacgaggtttgccaggagagaaaggtgaaaggggtactggatcttcaggacctcgggggctgcctggccccccaggtccacaaggagaatccagaacaggtccaccagggtccacaggttcaagaggtccccctggcccccctggccgtcctggaaactcaggtatccgaggacccccaggtcctcctggatactgtgattcttctcagtgtgccagcatcccatacaacgggcaaggctatccaggttccggctaa

SEQ ID NO: 121555 - DNA, 9637 bp, Homo sapiens
  Payload ID: 3831
  Gene Symbol: COL12A1
  Gene Name: collagen, type XII, alpha 1
  ENST ID: ENST00000483888
  CDS Start-End: 82-9270
aagccgctgtcgccgccgctacctctccctgttgccgccgcctcagatctcttcatgccgctgtaagctcggaggccaaggatgcggagtaggcttcccccagcgcttgccgccctgggcgcggccctgctcctgtcttccattgaggcagaagttgacccaccttcagacttgaattttaaaattatagatgaaaatactgttcatatgtcatgggcaaaaccagttgatccaattgtgggttacagaataacggtggaccctacaacggatgggcctactaaagaatttaccctttcagctagtaccactgaaactttattgtcagaacttgtacctgaaacagagtatgtggtgacaataacttcatatgatgaagtagaagaaagtgtaccagttataggacaactaacaattcaaacaggtagttcgacaaagccagtggagaagaaacctggaaaaaccgagatacaaaaatgctctgtcagtgcctggactgatttggttttcctcgtggatggctcttggagtgtgggaagaaataatttcaagtacattttagacttcattgctgctcttgtgtctgcttttgacattggggaagagaagacaagagttggagttgttcaatacagctctgataccaggactgaatttaacttaaatcagtactaccaaagggatgaacttcttgctgcaataaaaaaaattccatataaaggtggcaacacaatgacaggggatgccattgattatttagttaaaaatactttcacggaatctgctggggcaagagttggctttcctaaagtggcaattattattacggatggaaaatcccaggatgaagtggaaattccagcaagagagcttcgtaatgttggagttgaagttttctccttgggcattaaagctgcagatgcaaaagaactcaaacaaattgcctccacaccttcactgaaccatgttttcaatgtggccaactttgatgcaattgtggatattcagaatgagatcatctcccaggtgtgctcaggtgttgatgaacaacttggtgaattggttagtggagaagaagttgttgagcctccttcaaatttgattgccatggaagtctcttcaaaatatgttaagctaaattggaatccatctcctagtccagtgactggctacaaagtcatcctcacaccaatgactgcaggaagccgacagcacgctctgagtgtggggcctcagacaaccacgctcagtgttcgcgacctctcagcagacacagaataccagatcagtgtttccgccatgaagggaatgacatccagtgaacccatttcaataatggagaagactcagccaatgaaagttcaagtggaatgctcacgtggtgtggatataaaagccgatattgtgtttttggttgatggctcctatagcattgggattgcaaactttgttaaagttagagcctttttggaagttcttgtaaaaagttttgaaatttcaccaaatagggtccagattagtcttgtgcaatacagccgggatcctcatactgagttcactttgaaaaaattcaccaaagttgaagatataattgaagcaataaacaccttcccttacagaggaggatctacaaatactggcaaagcaatgacttatgtcagagagaaaatatttgtgcctagcaagggatcaagaagcaatgtgccaaaggtcatgattcttatcacggatgggaaatcatcagatgctttcagagatcctgcgataaaactgaggaattcagatgttgaaatctttgcagttggtgtgaaggatgccgttcgctcagaattggaagctattgcctctcctcctgcagagacccatgtgttcacagtggaagattttgatgcttttcagaggatatcttttgaactcacacagtctatctgccttagaattgagcaagaattggcagctataaagaagaaagcttacgtccctccaaaggatcttagtttttcagaagtgacttcttatggtttcaaaaccaactggtctccagctggagaaaatgttttttcatatcacatcacctacaaggaagcggctggggatgatgaggtcactgtggtggagccagcatcgagcaccagtgttgttctcagcagcctgaagccagagaccttgtatttggtcaatgtgactgcggagtatgaggatggcttcagcattcccttagctggagaggagaccaccgaagaagtaaaaggagcacctcgaaacctaaaggtgacagatgagactacagatagtttcaaaattacttggactcaagctccagggagagttttaagatatcgaattatatatagaccagttgctggtggagagagcagagaagttaccaccccacccaatcagaggaggagaacactggagaacttgattccagacacgaaatatgaagtatctgtaattcctgaatatttctcaggacctggtactccattaactggaaatgcagccactgaagaagttagagggaatccaagagacttaagagtttctgaccctacgacgtctactatgaaattatcttggagtggggcaccaggaaaagtgaaacagtatctcgtcacatataccccagtggcagggggtgaaactcaagaggtcactgtgaggggagatacaaccaatacggtgctgcagggattgaaggaagggacacaatacgccttatctgtgacagccttgtatgcgtctggggctggagacgccctctttggtgaaggaacaacacttgaagaacgtggttctcctcaagatttagttactaaagacatcactgacacatcaattggggcttattggacatctgctccaggaatggttcgcggttacagggtctcatggaaatcactttatgatgatgttgacactggagagaaaaatctgcctgaagatgcaattcatacgatgatagaaaatctgcagccagagaccaaatacagaatttcagtatttgccacttacagcagtggagaaggagaacctttgactggagatgccacaactgaattatctcaagattccaaaaccctgaaagtagatgaagaaacagaaaacacaatgagagttacatggaaaccagcaccagggaaagtcgtcaactaccgtgttgtctatcgccctcatgggagagggaagcaaatggttgctaaggtgccccccacagtcacttcgacagtgttaaagcgacttcagccacagaccacatatgacatcacagttcttcctatttacaagatgggagaaggaaagcttaggcaaggatcaggaacaacagcttctcggtttaagtctcctagaaacctcaaaacatctgacccaaccatgtcaagcttccgagtgacttgggagcctgcccctggggaagtgaagggttataaagtcacattccaccctacgggggatgacagaagactgggggagttagtggttggaccctatgacaacacagttgttttggaggaacttagggctggtaccacctataaagtaaatgtttttggaatgtttgatggaggagaaagctcaccacttgttggacaagaaatgacaaccctttccgacacaactgttatgccaattttatcttctgggatggagtgtctcaccagagctgaggcagacattgtgttgctggtggatggatcatggagcatcggccgggcaaattttagaaccgtgaggagtttcatttctcgtattgtggaagtctttgacattggccccaaaagagtacaaattgctcttgctcagtatagtggggatcccagaacagagtggcagttaaatgcacacagagacaagaagagcttgttgcaagctgtggcaaacttgccgtacaaaggaggcaatactctcacaggcatggctttgaatttcattcgccaacagaacttcaggacccaagctggcatgagacctcgagctcgaaaaattggtgtgctcattactgatggaaaatcacaagacgatgttgaagcaccttcaaagaaactcaaggatgagggagtggagctgtttgctattggtattaaaaatgctgatgaagtcgaattaaagatgattgcaactgatcctgatgatacccatgcatacaatgtggcagattttgagtcactctccaggatagtggatgatctcaccattaatttgtgtaacagtgtcaaaggtccaggtgatttggaagcaccttctaacttagttatttctgagcgaacccatcgttcttttagagtgagctggacaccaccttctgacagtgtggatcgatataaggtggaatactatccagtttctggagggaaacgtcaagaattttatgtgagtcgaatggaaactagcacagtgctgaaagatctgaaacctgaaactgaatatgttgtcaatgtgtattctgtggtagaagatgaatatagtgagcctctgaaggggacagaaaaaaccttgccagtgcctgtagtcagcctgaatatttatgatgttggccctaccaccatgcatgtgcagtggcagcctgtgggaggagctactggctacatcttgtcatacaaacctgttaaggacacagagccaacaagacccaaagaggtgcgtttggggccaacagtgaatgacatgcagctgactgaccttgttcccaacacggagtatgcagtcacagtccaggctgtcctgcacgacctcactagtgaacctgtcactgttcgggaagtcaccttgcctttacccagacctcaggatctgaaactcagagatgtgactcacagcactatgaatgtcttttgggaacctgtgcctggaaaagtgcgtaaatatattgttcgatacaaaacaccagaagaggatgtcaaagaggtagaggtggacagatcagagaccagcacttccctcaaagacctcttctcacagaccttgtacacagtcagcgtttctgcagtacatgacgagggggagtctcctccagtgactgctcaagaaactacccgacccgtgccagccccaacaaacttaaagattactgaagtaacatcagagggtttcagagggacttgggatcatggagcttcagatgtgtctctctacagaataacttgggcaccttttggaagctcagataagatggagaccatcttaaatggagatgaaaacactttggtgttcgaaaacctgaaccccaacaccatctatgaagtttccattactgccatctatcctgatgagtcagaaagtgatgacctgattggcagtgagcgcacactgcctatcttaacaacacaagctcccaaaagtggcccacgaaaccttcaagtgtacaatgcaacatctaacagcctgactgttaagtgggatcctgctagtggtcgtgtgcagaaatataggatcacttatcagccttccacaggggaaggcaatgagcaaacgaccacaataggaggacggcagaacagtgtggtcctgcagaaactgaagccagacactccttacactatcaccgtatcctctctgtatcctgatggtgaaggaggtcggatgacgggaagaggcaagaccaaacctctaaacactgtaaggaacctgagagtgtatgacccttctaccagcaccttgaatgtccgctgggaccatgcagagggaaatcctcgtcagtacaagctcttctatgcaccagcagcaggtggtccagaggaactggtaccaatccccgggaataccaattatgccattcttaggaatctgcagccagatacctcatacactgtgactgtagttcccgtttatactgaaggtgatgggggacgcacatcagatactggaaggacattgatgagaggactggcaagaaatgtccaagtatacaatcctacacctaacagcctcgatgttcgctgggaccctgctccaggacctgtgctgcaatatcgcgttgtgtattctcctgtggatggcacaagaccctcagaatctatagtagtgccaggaaacacgcgcatggtgcatctggagcggctgattccggacacactctattccgtgaaccttgtggctctgtactcggatggagagggaaatcccagccctgcccagggccgaacgctaccacgcagtggaccaaggaacctgagagtctttggtgaaacaaccaatagcctctcggtagcctgggatcatgctgatgggccagttcagcagtacaggatcatctattctcccactgttggtgatccaattgatgaatataccacagtcccaggcagaagaaacaatgtaatactgcagcccctgcaacctgacactccatataaaattactgttattgctgtttatgaagatggagatggtggccatctaacaggaaatggaagaactgtgggactccttcctcctcagaacatacacatctctgacgaatggtatacaagattcagggtgtcctgggatccttcaccttctccagttcttggatataaaatagtatataagccagtgggttccaatgagcccatggaagcctttgttggagaaatgacatcatataccttacacaatctcaatcccagcaccacctacgatgtgaatgtttatgctcaatatgattctggactcagtgtccccttgacagatcaaggcactacattatatttaaatgtaacagatctgaaaacttaccagattgggtgggatacattctgtgtcaaatggtcacctcaccgggcagccacctcctacaggctaaaactaagccctgcagatggaacaaggggacaagaaattacagtgcgtggatcagaaaccagtcactgcttcactggcctttcaccagacactgattatggtgtcactgtttttgtgcagacaccaaatctcgagggaccaggagtctctgttaaagaacataccactgtgaaaccaacagaagcccctacagagccacccacacctcctccccctcccaccattccaccagcccgggatgtatgcaaaggggccaaggcagatattgtgttcttgactgatgcctcctggagcattggggacgataattttaacaaagttgtaaaattcatcttcaatactgtgggaggctttgatgaaatcagtcctgctgggattcaggtttcatttgtgcaatacagcgatgaggtcaagtctgagttcaagctgaacacgtacaatgacaaggccctagcccttggggccctccagaatattaggtacagaggaggaaacacaagaacaggcaaggccctcacgtttatcaaggagaaagtcttgacttgggagagcggcatgaggaagaatgtccctaaggtgttggttgtggtcacggacggtcggtcccaggatgaggtcaagaaggcggctttggtcatccagcagtcagggttcagtgtctttgtagttggtgtggctgatgtcgactacaatgagcttgccaacattgccagcaaaccaagtgaacggcacgtgttcattgtggacgactttgaatcttttgagaagatcgaagacaatcttattacatttgtttgtgaaactgccacttcaagttgtcctctcatttatttggatggctacacctcaccaggttttaaaatgcttgaagcatacaacctgacagaaaagaattttgcttctgtacaaggagtatctttggagtcagggtctttccccagctactcagcatacaggattcagaagaatgcgtttgtgaatcagcctacagcagacctacacccaaatggactccctccttcatacacgattatattattattcagacttctcccagaaactcccagtgacccttttgcaatttggcaaatcacagacagagactacaaaccacaagttggagtgattgcagatccttctagcaagacgttatcattctttaacaaggatacaagaggcgaggtgcaaactgttacatttgacacagaagaagtaaagacattattttatggaagttttcacaaggttcatattgtagtgacctcaaaaagtgttaagatttacattgactgctatgaaattatagaaaaagacatcaaggaagctggaaatataacaactgatggttatgaaattcttggaaaactccttaaaggggaaaggaaatcagccgcattccaaatccagagttttgacattgtctgcagtccagtgtggaccagtagagacagatgctgtgatattccctctaggagagatgagggaaaatgccctgcttttccaaattcttgcacatgtacacaggacagcgttggacctccaggacctccaggccctgcaggaggacctggtgctaaaggtcccagaggtgaaagaggtatcagtggggcaattgggccccctggtcctcgtggagacataggtcctccaggcccccagggtcctccaggccctcagggacccaatggactctctattccgggagagcaaggtcgccaagggatgaaaggtgatgctggagagccaggacttccaggccgaacaggaaccccaggattacctggcccaccaggaccaatgggacctccaggagacagaggcttcactggaaaagacggtgcaatgggacccaggggcccaccaggcccaggctccccaggagtcacaggaccaagtgggaagccaggaaaacctggagatcatggcagaccaggtccatctgggttgaaaggagaaaaaggtgataggggagacattgcttcccagaacatgatgcgagcagttgcaagacaagtctgtgaacaattgataagtggtcagatgaacagattcaatcagatgctgaatcagattccaaatgattaccagtccagtcgcaaccagccaggcccgccgggtccaccgggacctcctggtagcgcaggagccagaggagaacctgggcctggggggcggccaggcttcccgggcacaccagggatgcagggaccccctggggaacgaggtttgccaggagagaaaggtgaaaggggtactggatcttcaggacctcgggggctgcctggccccccaggtccacaaggagaatccagaacaggtccaccagggtccacaggttcaagaggtccccctggcccccctggccgtcctggaaactcaggtatccgaggacccccaggtcctcctggatactgtgattcttctcagtgtgccagcatcccatacaacgggcaaggctatccaggtacgttgttgccattgtaggaaccccaactcacctgaagtaaagaactttacggaaatgaagttccttaggattgaaggaaggctgatttgaagatgtcttgaagataacaactctttcagttctgattatataataatagtgtttgctatcatagcacacaacattatttcactgttaggattgaattattttcttttttccccatgtttctgcatttaccaaatcacatcataaacctccccttacttctcttgggacttcaaagcatgctagtaattgactttttttttttcttttccccaagattgggaacagggatttgttaaatacaactgtaaaatgccaagaatatgtatttaaaaattgttttgggaatctaattta

SEQ ID NO: 121556 - DNA, 794 bp, Homo sapiens
  Payload ID: 3831
  Gene Symbol: COL12A1
  Gene Name: collagen, type XII, alpha 1
  ENST ID: ENST00000493109
  CDS Start-End: 1-624
gtcatccagcagtcagggttcagtgtctttgtagttggtgtggctgatgtcgactacaatgagcttgccaacattgccagcaaaccaagtgaacggcacgtgttcattgtggacgactttgaatcttttgagaagatcgaagacaatcttattacatttgtttgtgaaactgccacttcaagttgtcctctcatttatttggatggctacacctcaccaggttttaaaatgcttgaagcatacaacctgacagaaaagaattttgcttctgtacaaggagtatctttggagtcagggtctttccccagctactcagcatacaggattcagaagaatgcgtttgtgaatcagcctacagcagacctacacccaaatggactccctccttcatacacgattatattattattcagacttctcccagaaactcccagtgacccttttgcaatttggcaaatcacagacagagactacaaaccacaagttggagtgattgcagatccttctagcaagacgttatcattctttaacaaggatacaagaggcgaggtgcaaactgttacatttgacacagaagaagtaaagacattattttatggaagttttcacaaggtaaaaacataagattatttgagtcttatttctagaaaaaaatataaaacaaatttattatttattaaaatgtcatgttaaattggcagaattataactatgtcttttaaaaataaaatcttgttttagagaatttggttaattcaaataatatttaaaataaaacaatatactaatcaaga

SEQ ID NO: 121557 - DNA, 11579 bp, Homo sapiens
  Payload ID: 3831
  Gene Symbol: COL12A1
  Gene Name: collagen, type XII, alpha 1
  ENST ID: ENST00000615798
  CDS Start-End: 3734-9358
gcggccgccaggtgctcctggagtgcagcgcctatcgccggggcgtgtgggggccacaccgagcaccagcttctccgacgccgggaagccgctgtcgccgccgctacctctccctgttgccgccgcctcagatctcttcatgccgctgtaagctcggaggccaaggatgcggagtaggcttcccccagcgcttgccgccctgggcgcggccctgctcctgtcttccattgaggcagaagttgacccaccttcagacttgaattttaaaattatagatgaaaatactgttcatatgtcatgggcaaaaccagttgatccaattgtgggttacagaataacggtggaccctacaacggatgggcctactaaagaatttaccctttcagctagtaccactgaaactttattgtcagaacttgtacctgaaacagagtatgtggtgacaataacttcatatgatgaagtagaagaaagtgtaccagttataggacaactaacaattcaaacaggtagttcgacaaagccagtggagaagaaacctggaaaaaccgagatacaaaaatgctctgtcagtgcctggactgatttggttttcctcgtggatggctcttggagtgtgggaagaaataatttcaagtacattttagacttcattgctgctcttgtgtctgcttttgacattggggaagagaagacaagagttggagttgttcaatacagctctgataccaggactgaatttaacttaaatcagtactaccaaagggatgaacttcttgctgcaataaaaaaaattccatataaaggtggcaacacaatgacaggggatgccattgattatttagttaaaaatactttcacggaatctgctggggcaagagttggctttcctaaagtggcaattattattacggatggaaaatcccaggatgaagtggaaattccagcaagagagcttcgtaatgttggagttgaagttttctccttgggcattaaagctgcagatgcaaaagaactcaaacaaattgcctccacaccttcactgaaccatgttttcaatgtggccaactttgatgcaattgtggatattcagaatgagatcatctcccaggtgtgctcaggtgttgatgaacaacttggtgaattggttagtggagaagaagttgttgagcctccttcaaatttgattgccatggaagtctcttcaaaatatgttaagctaaattggaatccatctcctagtccagtgactggctacaaagtcatcctcacaccaatgactgcaggaagccgacagcacgctctgagtgtggggcctcagacaaccacgctcagtgttcgcgacctctcagcagacacagaataccagatcagtgtttccgccatgaagggaatgacatccagtgaacccatttcaataatggagaagactcagccaatgaaagttcaagtggaatgctcacgtggtgtggatataaaagccgatattgtgtttttggttgatggctcctatagcattgggattgcaaactttgttaaagttagagcctttttggaagttcttgtaaaaagttttgaaatttcaccaaatagggtccagattagtcttgtgcaatacagccgggatcctcatactgagttcactttgaaaaaattcaccaaagttgaagatataattgaagcaataaacaccttcccttacagaggaggatctacaaatactggcaaagcaatgacttatgtcagagagaaaatatttgtgcctagcaagggatcaagaagcaatgtgccaaaggtcatgattcttatcacggatgggaaatcatcagatgctttcagagatcctgcgataaaactgaggaattcagatgttgaaatctttgcagttggtgtgaaggatgccgttcgctcagaattggaagctattgcctctcctcctgcagagacccatgtgttcacagtggaagattttgatgcttttcagaggatatcttttgaactcacacagtctatctgccttagaattgagcaagaattggcagctataaagaagaaagcttacgtccctccaaaggatcttagtttttcagaagtgacttcttatggtttcaaaaccaactggtctccagctggagaaaatgttttttcatatcacatcacctacaaggaagcggctggggatgatgaggtcactgtggtggagccagcatcgagcaccagtgttgttctcagcagcctgaagccagagaccttgtatttggtcaatgtgactgcggagtatgaggatggcttcagcattcccttagctggagaggagaccaccgaagaagtaaaaggagcacctcgaaacctaaaggtgacagatgagactacagatagtttcaaaattacttggactcaagctccagggagagttttaagatatcgaattatatatagaccagttgctggtggagagagcagagaagttaccaccccacccaatcagaggaggagaacactggagaacttgattccagacacgaaatatgaagtatctgtaattcctgaatatttctcaggacctggtactccattaactggaaatgcagccactgaagaagttagagggaatccaagagacttaagagtttctgaccctacgacgtctactatgaaattatcttggagtggggcaccaggaaaagtgaaacagtatctcgtcacatataccccagtggcagggggtgaaactcaagaggtcactgtgaggggagatacaaccaatacggtgctgcagggattgaaggaagggacacaatacgccttatctgtgacagccttgtatgcgtctggggctggagacgccctctttggtgaaggaacaacacttgaagaacgtggttctcctcaagatttagttactaaagacatcactgacacatcaattggggcttattggacatctgctccaggaatggttcgcggttacagggtctcatggaaatcactttatgatgatgttgacactggagagaaaaatctgcctgaagatgcaattcatacgatgatagaaaatctgcagccagagaccaaatacagaatttcagtatttgccacttacagcagtggagaaggagaacctttgactggagatgccacaactgaattatctcaagattccaaaaccctgaaagtagatgaagaaacagaaaacacaatgagagttacatggaaaccagcaccagggaaagtcgtcaactaccgtgttgtctatcgccctcatgggagagggaagcaaatggttgctaaggtgccccccacagtcacttcgacagtgttaaagcgacttcagccacagaccacatatgacatcacagttcttcctatttacaagatgggagaaggaaagcttaggcaaggatcaggaacaacagcttctcggtttaagtctcctagaaacctcaaaacatctgacccaaccatgtcaagcttccgagtgacttgggagcctgcccctggggaagtgaagggttataaagtcacattccaccctacgggggatgacagaagactgggggagttagtggttggaccctatgacaacacagttgttttggaggaacttagggctggtaccacctataaagtaaatgtttttggaatgtttgatggaggagaaagctcaccacttgttggacaagaaatgacaaccctttccgacacaactgttatgccaattttatcttctgggatggagtgtctcaccagagctgaggcagacattgtgttgctggtggatggatcatggagcatcggccgggcaaattttagaaccgtgaggagtttcatttctcgtattgtggaagtctttgacattggccccaaaagagtacaaattgctcttgctcagtatagtggggatcccagaacagagtggcagttaaatgcacacagagacaagaagagcttgttgcaagctgtggcaaacttgccgtacaaaggaggcaatactctcacaggcatggctttgaatttcattcgccaacagaacttcaggacccaagctggcatgagacctcgagctcgaaaaattggtgtgctcattactgatggaaaatcacaagacgatgttgaagcaccttcaaagaaactcaaggatgagggagtggagctgtttgctattggtattaaaaatgctgatgaagtcgaattaaagatgattgcaactgatcctgatgatacccatgcatacaatgtggcagattttgagtcactctccaggatagtggatgatctcaccattaatttgtgtaacagtgtcaaaggtccaggtgatttggaagcaccttctaacttagttatttctgagcgaacccatcgttcttttagagtgagctggacaccaccttctgacagtgtggatcgatataaggtggaatactatccagtttctggagggaaacgtcaagaattttatgtgagtcgaatggaaactagcacagtgctgaaagatctgaaacctgaaactgaatatgttgtcaatgtgtattctgtggtagaagatgaatatagtgagcctctgaaggggacagaaaaaaccttgccagtgcctgtagtcagcctgaatatttatgatgttggccctaccaccatgcatgtgcagtggcagcctgtgggaggagctactggctacatcttgtcatacaaacctgttaaggacacagagccaacaagacccaaagaggtgcgtttggggccaacagtgaatgacatgcagctgactgaccttgttcccaacacggagtatgcagtcacagtccaggctgtcctgcacgacctcactagtgaacctgtcactgttcgggaagtcaccttgcctttacccagacctcaggatctgaaactcagagatgtgactcacagcactatgaatgtcttttgggaacctgtgcctggaaaagtgcgtaaatatattgttcgatacaaaacaccagaagaggatgtcaaagaggtagaggtggacagatcagagaccagcacttccctcaaagacctcttctcacagaccttgtacacagtcagcgtttctgcagtacatgacgagggggagtctcctccagtgactgctcaagaaactacccgacccgtgccagccccaacaaacttaaagattactgaagtaacatcagagggtttcagagggacttgggatcatggagcttcagatgtgtctctctacagaataacttgggcaccttttggaagctcagataagatggagaccatcttaaatggagatgaaaacactttggtgttcgaaaacctgaaccccaacaccatctatgaagtttccattactgccatctatcctgatgagtcagaaagtgatgacctgattggcagtgagcgcacactgcctatcttaacaacacaagctcccaaaagtggcccacgaaaccttcaagtgtacaatgcaacatctaacagcctgactgttaagtgggatcctgctagtggtcgtgtgcagaaatataggatcacttatcagccttccacaggggaaggcaatgagcaaacgaccacaataggaggacggcagaacagtgtggtcctgcagaaactgaagccagacactccttacactatcaccgtatcctctctgtatcctgatggtgaaggaggtcggatgacgggaagaggcaagaccaaacctctaaacactgtaaggaacctgagagtgtatgacccttctaccagcaccttgaatgtccgctgggaccatgcagagggaaatcctcgtcagtacaagctcttctatgcaccagcagcaggtggtccagaggaactggtaccaatccccgggaataccaattatgccattcttaggaatctgcagccagatacctcatacactgtgactgtagttcccgtttatactgaaggtgatgggggacgcacatcagatactggaaggacattgatgagaggactggcaagaaatgtccaagtatacaatcctacacctaacagcctcgatgttcgctgggaccctgctccaggacctgtgctgcaatatcgcgttgtgtattctcctgtggatggcacaagaccctcagaatctatagtagtgccaggaaacacgcgcatggtgcatctggagcggctgattccggacacactctattccgtgaaccttgtggctctgtactcggatggagagggaaatcccagccctgcccagggccgaacgctaccacgcagtggaccaaggaacctgagagtctttggtgaaacaaccaatagcctctcggtagcctgggatcatgctgatgggccagttcagcagtacaggatcatctattctcccactgttggtgatccaattgatgaatataccacagtcccaggcagaagaaacaatgtaatactgcagcccctgcaacctgacactccatataaaattactgttattgctgtttatgaagatggagatggtggccatctaacaggaaatggaagaactgtgggactccttcctcctcagaacatacacatctctgacgaatggtatacaagattcagggtgtcctgggatccttcaccttctccagttcttggatataaaatagtatataagccagtgggttccaatgagcccatggaagcctttgttggagaaatgacatcatataccttacacaatctcaatcccagcaccacctacgatgtgaatgtttatgctcaatatgattctggactcagtgtccccttgacagatcaaggcactacattatatttaaatgtaacagatctgaaaacttaccagattgggtgggatacattctgtgtcaaatggtcacctcaccgggcagccacctcctacaggctaaaactaagccctgcagatggaacaaggggacaagaaattacagtgcgtggatcagaaaccagtcactgcttcactggcctttcaccagacactgattatggtgtcactgtttttgtgcagacaccaaatctcgagggaccaggagtctctgttaaagaacataccactgtgaaaccaacagaagcccctacagagccacccacacctcctccccctcccaccattccaccagcccgggatgtatgcaaaggggccaaggcagatattgtgttcttgactgatgcctcctggagcattggggacgataattttaacaaagttgtaaaattcatcttcaatactgtgggaggctttgatgaaatcagtcctgctgggattcaggtttcatttgtgcaatacagcgatgaggtcaagtctgagttcaagctgaacacgtacaatgacaaggccctagcccttggggccctccagaatattaggtacagaggaggaaacacaagaacaggcaaggccctcacgtttatcaaggagaaagtcttgacttgggagagcggcatgaggaagaatgtccctaaggtgttggttgtggtcacggacggtcggtcccaggatgaggtcaagaaggcggctttggtcatccagcattcacggttcagtgtctttgtagttggtgtggctgatgtcgactacaatgagcttgccaacattgccagcaaaccaagtgaacggcacgtgttcattgtggacgactttgaatcttttgagaagatcgaagacaatcttattacatttgtttgtgaaactgccacttcaagttgtcctctcatttatttggatggctacacctcaccaggttttaaaatgcttgaagcatacaacctgacagaaaagaattttgcttctgtacaaggagtatctttggagtcagggtctttccccagctactcagcatacaggattcagaagaatgcgtttgtgaatcagcctacagcagacctacacccaaatggactccctccttcatacacgattatattattattcagacttctcccagaaactcccagtgacccttttgcaatttggcaaatcacagacagagactacaaaccacaagttggagtgattgcagatccttctagcaagacgttatcattctttaacaaggatacaagaggcgaggtgcaaactgttacatttgacacagaagaagtaaagacattattttatggaagttttcacaaggttcatattgtagtgacctcaaaaagtgttaagatttacattgactgctatgaaattatagaaaaagacatcaaggaagctggaaatataacaactgatggttatgaaattcttggaaaactccttaaaggggaaaggaaatcagccgcattccaaatccagagttttgacattgtctgcagtccagtgtggaccagtagagacagatgctgtgatattccctctaggagagatgagggaaaatgccctgcttttccaaattcttgcacatgtacacaggacagcgttggacctccaggacctccaggccctgcaggaggacctggtgctaaaggtcccagaggtgaaagaggtatcagtggggcaattgggccccctggtcctcgtggagacataggtcctccaggcccccagggtcctccaggccctcagggacccaatggactctctattccgggagagcaaggtcgccaagggatgaaaggtgatgctggagagccaggacttccaggccgaacaggaaccccaggattacctggcccaccaggaccaatgggacctccaggagacagaggcttcactggaaaagacggtgcaatgggacccaggggcccaccagggccgccgggaagcccaggctccccaggagtcacaggaccaagtgggaagccaggaaaacctggagatcatggcagaccaggtccatctgggttgaaaggagaaaaaggtgataggggagacattgcttcccagaacatgatgcgagcagttgcaagacaagtctgtgaacaattgataagtggtcagatgaacagattcaatcagatgctgaatcagattccaaatgattaccagtccagtcgcaaccagccaggcccgccgggtccaccgggacctcctggtagcgcaggagccagaggagaacctgggcctggggggcggccaggcttcccgggcacaccagggatgcagggaccccctggggaacgaggtttgccaggagagaaaggtgaaaggggtactggatcttcaggacctcgggggctgcctggccccccaggtccacaaggagaatccagaacaggtccaccagggtccacaggttcaagaggtccccctggcccccctggccgtcctggaaactcaggtatccgaggacccccaggtcctcctggatactgtgattcttctcagtgtgccagcatcccatacaacgggcaaggctatccaggttccggctaacacattttctaagtcgccagtgctgcttacagtttgaatacatgaaaatcctgtttctgagatgtttgcgcacgtgcttattaggaaatgagtctgtatggaaatctcaccacagataatggttaacgaaccgggtcgacatcacaaaggagggtggagactctttttactaacttgaatgagacaaaagcagtggtgtcagtttataatcctgatgcatttcagtaataatgtagaaaaacattattttaaaaaagttccaacacacagccatgaggagcctcagttttgaaagaggtgcataataaaactactaaccagaggagtctatgccattttaagaaaaacaattaacctggttaaagagaaatgtcttatgtaaataataaactaattgtggcttgtaaatgatttgtatgtgatcctgtcgactaaaatcacttaacaattctacaataagcttctgcatcaaagcctgccgcttgctctatgccggaataacaccaaatggaatctcctcatctcttgcttgttagcgatgtgtctgattcagggcatctgtctttttgttacttttttgtccgtgtcctctcatttgggttttgtaactgcaattttcaaaccaaagtttaaaatcaccttttcttcctgttttgctgtagtcactggtgttcctcacccaccagctgtaactcagtttgtgtgaggtacagccacagaagatgtcatgtactgtatattacctggtgatagttgcttttcaccccccgagttcagtttctaggagccaatgaaacttcccctcacctcctcatctttccaagttgttctttgaattgaggagtttgaaggcataaacagttacttggggatttgcgaaaatcctacttagttactgcgtttacagttctttggcccagtctctgacccttcccaagtatttgtgcaatgattgtgtttactgctggatttttgaaggtttttttttttaagaaagtgccatttcattatttgattatcaccaaattatctggaaataattgggacattgtaacttatctatttatagttatgagattaagactggagtgccatcaccgcgggtgatgatttagcttttgctgtgtgtgtgtgtgtgtgccttccaaatcatgccataattgtaatgttgaatcggacagagccttacgtgcccgagggcggggcctacctgcctgagcgcgagcccttcatcgtgccggtggagcccgagcggacagcggaatacgaggactacggcgcagacgagcctgcagaggagcctcctgagccccaccggcgctggcggcgcgccctgccccacggacccgggcagtgaaccagagatcacgcgccgcgccgcgaggcttgggggaggtgttgaaattctcatttacaggtcagatagagcagtgtacgtcttttctgaggtgtttcttccagcgttgctcatccaggagtaccctttctgattgtagagaaccttgtttctgcaggaagcctagctccaagcacgcagtctgtagacatttttgcctttgcccttgaaatgcttgcaaaatactttgttaacaaaagctgcaaagagagaacatgccgtgtgcctttagttagcacagcgggcagcctcagtgaaactcttaggttaagcagttaagtcctggaacccagagctgctgtgtatttcgagcgggcagtttatcttttgctatacttattttcaattcaattacaccacgattcaaataattcccctcctaaaaccaaaaaggagggaaacgtcaactccattgcaattacttatcttcctcttctatctctgttatacgccggggcatagaatgctcgtatacatctctttaacaaccacaaaccttaagccatgtagatgaagttagtgcatcaacgggatacagttccatattgccttaaacctccttgttttagacacactaacatttataccaaattgcagattattctgcagagagggaattgcatgtttgtgttgtatatttagtatgaacttttttcagaatataatatttcttagttatcaaaagtagttggaaaacatttgcaagactatgaacatagaattgctgcttttatattttaactgcagattgtgaatttcactgccttatattatttatttctgaaacaaaagaggcatttttcaataaaactactgaaaatttga

SEQ ID NO: 121558 - DNA, 3027 bp, Homo sapiens
  Payload ID: 3832
  Gene Symbol: COL13A1
  Gene Name: collagen, type XIII, alpha 1
  Uniprot ID: Q5TAT6
  ENST ID: ENST00000354547
  CDS Start-End: 493-2580
gtgtcaagttacagaggcgccggaatcggcccctgcgctcctcgccagccgccacgacccacctctgcccatggggccctccgtgtgcgccccttcgcccggggactgaaactgactggcccgggagacacgaggcgcccagaaggactgacagcgcggcaccaactgctctgcagacacttgaagggaaagactgggcggagagaaggagagccggtcagattcccctaactttcctggacttggaacgttcttcgaaataacttttttctcacctaggtgtaccccaattaccgctggttgtgctttttcggcacttcctctcctactgctaatttttccgtcctctttgccgggagcagcggaaagggacgttttccagcgatacaagccctttccccctgccccgcagtttggatagagccttttggcagcggctgtcgcctttatttattctatttatttatttattggttctcaagacgcgagaggatggtagcggagcgcacccacaaagcggcagccaccggtgcccgcggccctggggagttgggcgcgcccgggacggtggctctggtggcggcgcgggcggagcgcggcgcacggctgccgagtccagggtcgtgcgggctgctgacgctggccctctgctcgctggcactcagcctgctcgcccactttcggacggccgagctgcaggcccgggtgctgcgcctggaagcggagcgcggggagcagcaaatggagacggctattttgggacgagtcaatcaactgctggacgagaaatggaagctccactcaaggaggcgccgggaggccccaaagacatctccaggatgtaactgcccaccaggacctcctggtcccactggaagacccggactcccaggggacaaaggtgccattgggatgcctggacgtgtggggtcccccggagacgctgggctgtccatcattggtccccgcggcccccctggtcaaccaggaactagaggtttccctggatttccgggtcccattgggctggacggcaaaccgggccacccaggaccaaagggcgacatgggtctgacgggtcccccaggacagccgggaccccagggacaaaaaggagaaaagggtcagtgtggagagtacccacaccgggagtgcctaagcagcatgccagcagctctgcgctccagccaaataattgccctgaagggcgaacagagccaggccagcatccaaggtccaccagggcccccaggcccccctggaccaagtggacctctggggcacccaggactgccagggcctatggggccacctggcttacctgggcctcctggaccaaagggagacccagggatccagggctaccacggccggaagggagaacggggcatgccagggatgccaggcaagcatggagccaagggggcgcccggaattgccgtggctgggatgaagggtgagccagggatcccaggaaccaagggtgagaagggggctgaaggctcccctgggcttcctggcctcctggggcagaagggagagaaaggcgatgctggcaactccattggaggaggcagaggggaacctggccctccagggctccctgggcccccagggccaaagggagaagcaggtgtcgatggccaggttggccccccagggcagccaggagacaagggggagcgtggagcagctggagaacagggaccagatggccccaagggctccaagggagaaccagggaaaggagagatggtggattacaatggaaacatcaatgaggctctccaggagatccggacgctggccttgatggggcctcctggtcttcctgggcaaattggcccacctggagctccagggattccaggccagaagggggagattggactgccaggccctccaggacacgatggggaaaagggacctcgcggtaaaccaggagacatgggccctcctggtccccaaggccccccaggaaaggatggacctccaggagtgaagggagaaaacgggcacccagggagcccaggagagaagggggaaaaaggggagacaggacaagcaggctcaccgggagagaaaggagaagccggggagaagggcaatccaggagcagaggttcctgggctgccagggccagaggggcctcccggacctccggggctccaaggtgttcctggaccaaagggggaagcaggactagatggagcaaaaggagagaaaggcttccagggagaaaaaggagaccgtggtcccctgggactacccggagcttcaggtttggacggcaggcctgggccaccgggtactccaggaccaattggagttccaggcccagcgggaccaaagggcgagaggggcagcaaaggagaccctgggatgacaggaccaacgggagcagctgggcttcctggtttacatggaccacccggggacaagggaaaccggggggagagggggaagaaaggctctagagggcctaaaggggataagggagaccaaggagcgcctggattagatgccccctgcccattgggcgaagatggcttaccagtccaaggctgctggaacaagtgatgcctctaaccttggattggcctgtgtgtgtgtttgtacatagaatatttatttttatacagttttcactttttgaaaatgccagaagtatgatgcatcttacagattattaaaaaagaaagaaaaacctgcatattttgtacagaaaatatcaacctcttcccttttgtttacaagatgttttgtataagcctatgtctctaatacattttttgtttggtcgtaatgtctgcatgatatttgtgcacatttattaagtatcgaagcttaataaattattgtgtcctggtgccaaagggggccagccagaactgaggtgctggctagctcatgtgtgaattcacataaatgtagaggtccatgatatttgctaagctaggtgtgtctaagagtattttaaacccttatggattttcattattaaaggaaatgaaacatggcaattca

SEQ ID NO: 121559 - DNA, 2991 bp, Homo sapiens
  Payload ID: 3832
  Gene Symbol: COL13A1
  Gene Name: collagen, type XIII, alpha 1
  Uniprot ID: Q5TAT6
  ENST ID: ENST00000357811
  CDS Start-End: 493-2544
gtgtcaagttacagaggcgccggaatcggcccctgcgctcctcgccagccgccacgacccacctctgcccatggggccctccgtgtgcgccccttcgcccggggactgaaactgactggcccgggagacacgaggcgcccagaaggactgacagcgcggcaccaactgctctgcagacacttgaagggaaagactgggcggagagaaggagagccggtcagattcccctaactttcctggacttggaacgttcttcgaaataacttttttctcacctaggtgtaccccaattaccgctggttgtgctttttcggcacttcctctcctactgctaatttttccgtcctctttgccgggagcagcggaaagggacgttttccagcgatacaagccctttccccctgccccgcagtttggatagagccttttggcagcggctgtcgcctttatttattctatttatttatttattggttctcaagacgcgagaggatggtagcggagcgcacccacaaagcggcagccaccggtgcccgcggccctggggagttgggcgcgcccgggacggtggctctggtggcggcgcgggcggagcgcggcgcacggctgccgagtccagggtcgtgcgggctgctgacgctggccctctgctcgctggcactcagcctgctcgcccactttcggacggccgagctgcaggcccgggtgctgcgcctggaagcggagcgcggggagcagcaaatggagacggctattttgggacgagtcaatcaactgctggacgagaaatggaagctccactcaaggaggcgccgggaggccccaaagacatctccaggatgtaactgcccaccaggacctcctggtcccactggaagacccggactcccaggggacaaaggtgccattgggatgcctggacgtgtggggtcccccggagacgctgggctgtccatcattggtccccgcggcccccctggtcaaccaggaactagaggtttccctggatttccgggtcccattgggctggacggcaaaccgggccacccaggaccaaagggcgacatgggtctgacgggtcccccaggacagccgggaccccagggacaaaaaggagaaaagggtcagtgtggagagtacccacaccgggagtgcctaagcagcatgccagcagctctgcgctccagccaaataattgccctgaagggcgaacagagccaggccagcatccaaggtccaccagggcccccaggcccccctggaccaagtggacctctggggcacccaggactgccagggcctatggggccacctggcttacctgggcctcctggaccaaagggagacccagggatccagggctaccacggccggaagggagaacggggcatgccagggatgccaggcaagcatggagccaagggggcgcccggaattgccgtggctgggatgaagggtgagccagggatcccaggaaccaagggtgagaagggggctgaaggctcccctgggcttcctggcctcctggggcagaagggagagaaaggcgatgctggcaactccattggaggaggcagaggggaacctggccctccagggctccctgggcccccagggccaaagggagaagcaggtgtcgatggccaggttggccccccagggcagccaggagacaagggggagcgtggagcagctggagaacagggaccagatggccccaagggctccaagggagaaccagggaaaggagagatggtggattacaatggaaacatcaatgaggctctccaggagatccggacgctggccttgatggggcctcctggtcttcctgggcaaattggcccacctggagctccagggattccaggccagaagggggagattggactgccaggccctccaggacacgatggggaaaagggacctcgcggtaaaccaggagacatgggccctcctggtccccaaggccccccaggaaaggatggacctccaggagtgaagggagaaaacgggcacccagggagcccaggagagaagggggaaaaaggggagacaggacaagcaggctcaccgggagagaaaggagaagccggggagaagggcaatccaggagcagaggttcctgggctgccagggccagaggggcctcccggacctccggggctccaaggtgttcctggaccaaagggggaagcaggactagatggagcaaaaggagagaaaggcttccagggagaaaaaggagaccgtggtcccctgggactacccggtactccaggaccaattggagttccaggcccagcgggaccaaagggcgagaggggcagcaaaggagaccctgggatgacaggaccaacgggagcagctgggcttcctggtttacatggaccacccggggacaagggaaaccggggggagagggggaagaaaggctctagagggcctaaaggggataagggagaccaaggagcgcctggattagatgccccctgcccattgggcgaagatggcttaccagtccaaggctgctggaacaagtgatgcctctaaccttggattggcctgtgtgtgtgtttgtacatagaatatttatttttatacagttttcactttttgaaaatgccagaagtatgatgcatcttacagattattaaaaaagaaagaaaaacctgcatattttgtacagaaaatatcaacctcttcccttttgtttacaagatgttttgtataagcctatgtctctaatacattttttgtttggtcgtaatgtctgcatgatatttgtgcacatttattaagtatcgaagcttaataaattattgtgtcctggtgccaaagggggccagccagaactgaggtgctggctagctcatgtgtgaattcacataaatgtagaggtccatgatatttgctaagctaggtgtgtctaagagtattttaaacccttatggattttcattattaaaggaaatgaaacatggcaattca

SEQ ID NO: 121560 - DNA, 2267 bp, Homo sapiens
  Payload ID: 3832
  Gene Symbol: COL13A1
  Gene Name: collagen, type XIII, alpha 1
  ENST ID: ENST00000398969
  CDS Start-End: 307-2235
ggaaagactgggcggagagaaggagagccggtcagattcccctaactttcctggacttggaacgttcttcgaaataacttttttctcacctaggtgtaccccaattaccgctggttgtgctttttcggcacttcctctcctactgctaatttttccgtcctctttgccgggagcagcggaaagggacgttttccagcgatacaagccctttccccctgccccgcagtttggatagagccttttggcagcggctgtcgcctttatttattctatttatttatttattggttctcaagacgcgagaggatggtagcggagcgcacccacaaagcggcagccaccggtgcccgcggccctggggagttgggcgcgcccgggacggtggctctggtggcggcgcgggcggagcgcggcgcacggctgccgagtccagggtcgtgcgggctgctgacgctggccctctgctcgctggcactcagcctgctcgcccactttcggacggccgagctgcaggcccgggtgctgcgcctggaagcggagcgcggggagcagcaaatggagacggctattttgggacgagtcaatcaactgctggacgagaaatggaagctccactcaaggaggcgccgggaggccccaaagacatctccaggatgtaactgcccaccaggtcaaccaggaactagaggtttccctggatttccgggtcccattgggctggacggcaaaccgggccacccaggaccaaagggcgacatgggtctgacgggtcccccaggacagccgggaccccagggacaaaaaggagaaaagggtcagtgtggagagtacccacaccggctgctgcctctcctcaattcagtgcgactggctccacccccggtcataaaaaggcggacgttccagggcgaacagagccaggccagcatccaaggtccaccagggcccccaggcccccctggaccaagtggacctctggggcacccaggactgccagggcctatggggccacctggcttacctgggcctcctggaccaaagggagacccagggatccagggctaccacggccggaagggagaacggggcatgccagggatgccaggcaagcatggagccaagggggcgcccggaattgccgtggctgggatgaagggtgagccagggatcccaggaaccaagggtgagaagggggctgaaggctcccctgggcttcctggcctcctggggcagaagggagagaaaggcgatgctggcaactccattggaggaggcagaggggaacctggccctccagggctccctgggcccccagggccaaagggagaagcaggtgtcgatggccaggttggccccccagggcagccaggagacaagggggagcgtggagcagctggagaacagggaccagatggccccaagggctccaagggagaaccagggaaaggagagatggtggattacaatggaaacatcaatgaggctctccaggagatccggacgctggccttgatggggcctcctggtcttcctgggcaaattggcccacctggagctccagggattccaggccagaagggggagattggactgccaggccctccaggacacgatggggaaaagggacctcgcggtaaaccaggagacatgggccctcctggtccccaaggccccccaggaaaggatggacctccaggagtgaagggagaaaacgggcacccagggagcccaggagagaagggggaaaaaggggagacaggacaagcaggctcaccggttcctgggctgccagggccagaggggcctcccggacctccggggctccaaggtgttcctggaccaaagggggaagcaggactagatggagcaaaaggagagaaaggcttccagggagaaaaaggagaccgtggtcccctgggactacccggagcttcaggtttggacggcaggcctgggccaccgggtactccaggaccaattggagttccaggcccagcgggaccaaagggcgagaggggcagcaaaggagaccctgggatgacaggaccaacgggagcagctgggcttcctggtttacatggaccacccggggacaagggaaaccggggggagagggggaagaaaggctctagagggcctaaaggggataagggagaccaaggagcgcctggattagatgccccctgcccattgggcgaagatggcttaccagtccaaggctgctggaacaagtgatgcctctaaccttggattggcctgtgtgtgtg

SEQ ID NO: 121561 - DNA, 1057 bp, Homo sapiens
  Payload ID: 3832
  Gene Symbol: COL13A1
  Gene Name: collagen, type XIII, alpha 1
  ENST ID: ENST00000398975
  CDS Start-End: 1-743
agatccggacgctggccttgatggggcctcctggtcttcctgggcaaattggcccacctggagctccagggattccaggccagaagggggagattggactgccaggccctccaggacacgatggggaaaagggacctcgcggtaaaccaggagacatgggccctcctggtccccaaggccccccaggaaaggatggacctccaggagtgaagggagaaaacgggcacccagggagcccaggagagaagggggaaaaaggggagacaggacaagcaggctcaccggttcctgggctgccagggccagaggggcctcccggacctccggggctccaaggtgttcctggaccaaagggggaagcaggactagatggagcaaaaggagagaaaggcttccagggagaaaaaggagaccgtggtcccctgggactacccggagcttcaggtttggacggcaggcctgggccaccgggtactccaggaccaattggagttccaggcccagcgggaccaaagggcgagaggggcagcaaaggagaccctgggatgacaggaccaacgggagcagctgggcttcctggtttacatggaccacccggggacaagggaaaccggggggagagggggaagaaaggctctagagggcctaaaggggataagggagaccaaggagcgcctggattagatgccccctgcccattgggcgaagatggcttaccagtccaaggctgctggaacaagtgatgcctctaaccttggattggcctgtgtgtgtgtttgtacatagaatatttatttttatacagttttcactttttgaaaatgccagaagtatgatgcatcttacagattattaaaaaagaaagaaaaacctgcatattttgtacagaaaatatcaacctcttcccttttgtttacaagatgttttgtataagcctatgtctctaatacattttttgtttggtcgtaatgtctgcatgatatttgtgcacatttattaagtatcgaagcttaataaattattgtgtcctggtgccaaagggggccagccagaactg

SEQ ID NO: 121562 - DNA, 3093 bp, Homo sapiens
  Payload ID: 3832
  Gene Symbol: COL13A1
  Gene Name: collagen, type XIII, alpha 1
  Uniprot ID: Q5TAT6
  ENST ID: ENST00000398978
  CDS Start-End: 493-2646
gtgtcaagttacagaggcgccggaatcggcccctgcgctcctcgccagccgccacgacccacctctgcccatggggccctccgtgtgcgccccttcgcccggggactgaaactgactggcccgggagacacgaggcgcccagaaggactgacagcgcggcaccaactgctctgcagacacttgaagggaaagactgggcggagagaaggagagccggtcagattcccctaactttcctggacttggaacgttcttcgaaataacttttttctcacctaggtgtaccccaattaccgctggttgtgctttttcggcacttcctctcctactgctaatttttccgtcctctttgccgggagcagcggaaagggacgttttccagcgatacaagccctttccccctgccccgcagtttggatagagccttttggcagcggctgtcgcctttatttattctatttatttatttattggttctcaagacgcgagaggatggtagcggagcgcacccacaaagcggcagccaccggtgcccgcggccctggggagttgggcgcgcccgggacggtggctctggtggcggcgcgggcggagcgcggcgcacggctgccgagtccagggtcgtgcgggctgctgacgctggccctctgctcgctggcactcagcctgctcgcccactttcggacggccgagctgcaggcccgggtgctgcgcctggaagcggagcgcggggagcagcaaatggagacggctattttgggacgagtcaatcaactgctggacgagaaatggaagctccactcaaggaggcgccgggaggccccaaagacatctccaggatgtaactgcccaccaggacctcctggtcccactggaagacccggactcccaggggacaaaggtgccattgggatgcctggacgtgtggggtcccccggagacgctgggctgtccatcattggtccccgcggcccccctggtcaaccaggaactagaggtttccctggatttccgggtcccattgggctggacggcaaaccgggccacccaggaccaaagggcgacatgggtctgacgggtcccccaggacagccgggaccccagggacaaaaaggagaaaagggtcagtgtggagagtacccacaccgggagtgcctaagcagcatgccagcagctctgcgctccagccaaataattgccctgaagctgctgcctctcctcaattcagtgcgactggctccacccccggtcataaaaaggcggacgttccagggcgaacagagccaggccagcatccaaggtccaccagggcccccaggcccccctggaccaagtggacctctggggcacccaggactgccagggcctatggggccacctggcttacctgggcctcctggaccaaagggagacccagggatccagggctaccacggccggaagggagaacggggcatgccagggatgccaggcaagcatggagccaagggggcgcccggaattgccgtggctgggatgaagggtgagccagggatcccaggaaccaagggtgagaagggggctgaaggctcccctgggcttcctggcctcctggggcagaagggagagaaaggcgatgctggcaactccattggaggaggcagaggggaacctggccctccagggctccctgggcccccagggccaaagggagaagcaggtgtcgatggccaggttggccccccagggcagccaggagacaagggggagcgtggagcagctggagaacagggaccagatggccccaagggctccaagggagaaccagggaaaggagagatggtggattacaatggaaacatcaatgaggctctccaggagatccggacgctggccttgatggggcctcctggtcttcctgggcaaattggcccacctggagctccagggattccaggccagaagggggagattggactgccaggccctccaggacacgatggggaaaagggacctcgcggtaaaccaggagacatgggccctcctggtccccaaggccccccaggaaaggatggacctccaggagtgaagggagaaaacgggcacccagggagcccaggagagaagggggaaaaaggggagacaggacaagcaggctcaccgggagagaaaggagaagccggggagaagggcaatccaggagcagaggttcctgggctgccagggccagaggggcctcccggacctccggggctccaaggtgttcctggaccaaagggggaagcaggactagatggagcaaaaggagagaaaggcttccagggagaaaaaggagaccgtggtcccctgggactacccggagcttcaggtttggacggcaggcctgggccaccgggtactccaggaccaattggagttccaggcccagcgggaccaaagggcgagaggggcagcaaaggagaccctgggatgacaggaccaacgggagcagctgggcttcctggtttacatggaccacccggggacaagggaaaccggggggagagggggaagaaaggctctagagggcctaaaggggataagggagaccaaggagcgcctggattagatgccccctgcccattgggcgaagatggcttaccagtccaaggctgctggaacaagtgatgcctctaaccttggattggcctgtgtgtgtgtttgtacatagaatatttatttttatacagttttcactttttgaaaatgccagaagtatgatgcatcttacagattattaaaaaagaaagaaaaacctgcatattttgtacagaaaatatcaacctcttcccttttgtttacaagatgttttgtataagcctatgtctctaatacattttttgtttggtcgtaatgtctgcatgatatttgtgcacatttattaagtatcgaagcttaataaattattgtgtcctggtgccaaagggggccagccagaactgaggtgctggctagctcatgtgtgaattcacataaatgtagaggtccatgatatttgctaagctaggtgtgtctaagagtattttaaacccttatggattttcattattaaaggaaatgaaacatggcaattca

SEQ ID NO: 121563 - DNA, 749 bp, Homo sapiens
  Payload ID: 3832
  Gene Symbol: COL13A1
  Gene Name: collagen, type XIII, alpha 1
  ENST ID: ENST00000456019
  CDS Start-End: 1-523
aggaaaggatggacctccaggagtgaagggagaaaacgggcacccagggagcccaggagagaagggggaaaaaggggagacaggacaagcaggctcaccggttcctgggctgccagggccagaggggcctcccggacctccggggctccaaggtgttcctggaccaaagggggaagcaggactagatggagcaaaaggagagaaaggcttccagggagaaaaaggagaccgtggtcccctgggactacccggtactccaggaccaattggagttccaggcccagcgggaccaaagggcgagaggggcagcaaaggagaccctgggatgacaggaccaacgggagcagctgggcttcctggtttacatggaccacccggggacaagggaaaccggggggagagggggaagaaaggctctagagggcctaaaggggataagggagaccaaggagcgcctggattagatgccccctgcccattgggcgaagatggcttaccagtccaaggctgctggaacaagtgatgcctctaaccttggattggcctgtgtgtgtgtttgtacatagaatatttatttttatacagttttcactttttgaaaatgccagaagtatgatgcatcttacagattattaaaaaagaaagaaaaacctgcatattttgtacagaaaatatcaacctcttcccttttgtttacaagatgttttgtataagcctatgtctctaatacattttttgtttggtcgtaa

SEQ ID NO: 121564 - DNA, 2276 bp, Homo sapiens
  Payload ID: 3832
  Gene Symbol: COL13A1
  Gene Name: collagen, type XIII, alpha 1
  Uniprot ID: Q5TAT6
  ENST ID: ENST00000520267
  CDS Start-End: 307-2244
ggaaagactgggcggagagaaggagagccggtcagattcccctaactttcctggacttggaacgttcttcgaaataacttttttctcacctaggtgtaccccaattaccgctggttgtgctttttcggcacttcctctcctactgctaatttttccgtcctctttgccgggagcagcggaaagggacgttttccagcgatacaagccctttccccctgccccgcagtttggatagagccttttggcagcggctgtcgcctttatttattctatttatttatttattggttctcaagacgcgagaggatggtagcggagcgcacccacaaagcggcagccaccggtgcccgcggccctggggagttgggcgcgcccgggacggtggctctggtggcggcgcgggcggagcgcggcgcacggctgccgagtccagggtcgtgcgggctgctgacgctggccctctgctcgctggcactcagcctgctcgcccactttcggacggccgagctgcaggcccgggtgctgcgcctggaagcggagcgcggggagcagcaaatggagacggctattttgggacgagtcaatcaactgctggacgagaaatggaagctccactcaaggaggcgccgggaggccccaaagacatctccaggatgtaactgcccaccaggacctcctggtcaaccaggaactagaggtttccctggatttccgggtcccattgggctggacggcaaaccgggccacccaggaccaaagggcgacatgggtctgacgggtcccccaggacagccgggaccccagggacaaaaaggagaaaagggtcagtgtggagagtacccacaccggctgctgcctctcctcaattcagtgcgactggctccacccccggtcataaaaaggcggacgttccagggcgaacagagccaggccagcatccaaggtccaccagggcccccaggcccccctggaccaagtggacctctggggcacccaggactgccagggcctatggggccacctggcttacctgggcctcctggaccaaagggagacccagggatccagggctaccacggccggaagggagaacggggcatgccagggatgccaggcaagcatggagccaagggggcgcccggaattgccgtggctgggatgaagggtgagccagggatcccaggaaccaagggtgagaagggggctgaaggctcccctgggcttcctggcctcctggggcagaagggagagaaaggcgatgctggcaactccattggaggaggcagaggggaacctggccctccagggctccctgggcccccagggccaaagggagaagcaggtgtcgatggccaggttggccccccagggcagccaggagacaagggggagcgtggagcagctggagaacagggaccagatggccccaagggctccaagggagaaccagggaaaggagagatggtggattacaatggaaacatcaatgaggctctccaggagatccggacgctggccttgatggggcctcctggtcttcctgggcaaattggcccacctggagctccagggattccaggccagaagggggagattggactgccaggccctccaggacacgatggggaaaagggacctcgcggtaaaccaggagacatgggccctcctggtccccaaggccccccaggaaaggatggacctccaggagtgaagggagaaaacgggcacccagggagcccaggagagaagggggaaaaaggggagacaggacaagcaggctcaccggttcctgggctgccagggccagaggggcctcccggacctccggggctccaaggtgttcctggaccaaagggggaagcaggactagatggagcaaaaggagagaaaggcttccagggagaaaaaggagaccgtggtcccctgggactacccggagcttcaggtttggacggcaggcctgggccaccgggtactccaggaccaattggagttccaggcccagcgggaccaaagggcgagaggggcagcaaaggagaccctgggatgacaggaccaacgggagcagctgggcttcctggtttacatggaccacccggggacaagggaaaccggggggagagggggaagaaaggctctagagggcctaaaggggataagggagaccaaggagcgcctggattagatgccccctgcccattgggcgaagatggcttaccagtccaaggctgctggaacaagtgatgcctctaaccttggattggcctgtgtgtgtg

SEQ ID NO: 121565 - DNA, 2061 bp, Homo sapiens
  Payload ID: 3832
  Gene Symbol: COL13A1
  Gene Name: collagen, type XIII, alpha 1
  Uniprot ID: Q5TAT6
  ENST ID: ENST00000522165
  CDS Start-End: 1-2061
atggtagcggagcgcacccacaaagcggcagccaccggtgcccgcggccctggggagttgggcgcgcccgggacggtggctctggtggcggcgcgggcggagcgcggcgcacggctgccgagtccagggtcgtgcgggctgctgacgctggccctctgctcgctggcactcagcctgctcgcccactttcggacggccgagctgcaggcccgggtgctgcgcctggaagcggagcgcggggagcagcaaatggagacggctattttgggacgagtcaatcaactgctggacgagaaatggaagctccactcaaggaggcgccgggaggccccaaagacatctccaggatgtaactgcccaccaggacctcctggtcccactggaagacccggactcccaggggacaaaggtgccattgggatgcctggacgtgtggggtcccccggagacgctgggctgtccatcattggtccccgcggcccccctggtcaaccaggaactagaggtttccctggatttccgggtcccattgggctggacggcaaaccgggccacccaggaccaaagggcgacatgggtctgacgggtcccccaggacagccgggaccccagggacaaaaaggagaaaagggtcagtgtggagagtacccacaccggctgctgcctctcctcaattcagtgcgactggctccacccccggtcataaaaaggcggacgttccagggcgaacagagccaggccagcatccaaggtccaccagggcccccaggcccccctggaccaagtggacctctggggcacccaggactgccagggcctatggggccacctggcttacctgggcctcctggaccaaagggagacccagggatccagggctaccacggccggaagggagaacggggcatgccagggatgccaggcaagcatggagccaagggggcgcccggaattgccgtggctgggatgaagggtgagccagggatcccaggaaccaagggtgagaagggggctgaaggctcccctgggcttcctggcctcctggggcagaagggagagaaaggcgatgctggcaactccattggaggaggcagaggggaacctggccctccagggctccctgggcccccagggccaaagggagaagcaggtgtcgatggccaggttggccccccagggcagccaggagacaagggggagcgtggagcagctggagaacagggaccagatggccccaagggctccaagggagaaccagggaaaggagagatggtggattacaatggaaacatcaatgaggctctccaggagatccggacgctggccttgatggggcctcctggtcttcctgggcaaattggcccacctggagctccagggattccaggccagaagggggagattggactgccaggccctccaggacacgatggggaaaagggacctcgcggtaaaccaggagacatgggccctcctggtccccaaggccccccaggaaaggatggacctccaggagtgaagggagaaaacgggcacccagggagcccaggagagaagggggaaaaaggggagacaggacaagcaggctcaccgggagagaaaggagaagccggggagaagggcaatccaggagcagaggttcctgggctgccagggccagaggggcctcccggacctccggggctccaaggtgttcctggaccaaagggggaagcaggactagatggagcaaaaggagagaaaggcttccagggagaaaaaggagaccgtggtcccctgggactacccggtactccaggaccaattggagttccaggcccagcgggaccaaagggcgagaggggcagcaaaggagaccctgggatgacaggaccaacgggagcagctgggcttcctggtttacatggaccacccggggacaagggaaaccggggggagagggggaagaaaggctctagagggcctaaaggggataagggagaccaaggagcgcctggattagatgccccctgcccattgggcgaagatggcttaccagtccaaggctgctggaacaagtga

SEQ ID NO: 121566 - DNA, 2007 bp, Homo sapiens
  Payload ID: 3832
  Gene Symbol: COL13A1
  Gene Name: collagen, type XIII, alpha 1
  Uniprot ID: Q5TAT6
  ENST ID: ENST00000517713
  CDS Start-End: 1-2007
atggtagcggagcgcacccacaaagcggcagccaccggtgcccgcggccctggggagttgggcgcgcccgggacggtggctctggtggcggcgcgggcggagcgcggcgcacggctgccgagtccagggtcgtgcgggctgctgacgctggccctctgctcgctggcactcagcctgctcgcccactttcggacggccgagctgcaggcccgggtgctgcgcctggaagcggagcgcggggagcagcaaatggagacggctattttgggacgagtcaatcaactgctggacgagaaatggaagctccactcaaggaggcgccgggaggccccaaagacatctccaggatgtaactgcccaccaggacctcctggtcccactggaagacccggactcccaggggacaaaggtgccattgggatgcctggacgtgtggggtcccccggagacgctgggctgtccatcattggtccccgcggcccccctggtcaaccaggaactagaggtttccctggatttccgggtcccattgggctggacggcaaaccgggccacccaggaccaaagggcgacatgggtctgacgggtcccccaggacagccgggaccccagggacaaaaaggagaaaagggtcagtgtggagagtacccacaccgggagtgcctaagcagcatgccagcagctctgcgctccagccaaataattgccctgaagggcgaacagagccaggccagcatccaaggtccaccagggcccccaggcccccctggaccaagtggacctctggggcacccaggactgccagggcctatggggccacctggcttacctgggcctcctggaccaaagggagacccagggatccagggctaccacggccggaagggagaacggggcatgccagggatgccaggcaagcatggagccaagggggcgcccggaattgccgtggctgggatgaagggtgagccagggatcccaggaaccaagggtgagaagggggctgaaggctcccctgggcttcctggcctcctggggcagaagggagagaaaggcgatgctggcaactccattggaggaggcagaggggaacctggccctccagggctccctgggcccccagggccaaagggagaagcaggtgtcgatggccaggttggccccccagggcagccaggagacaagggggagcgtggagcagctggagaacagggaccagatggccccaagggctccaagggagaaccagggaaaggagagatggtggattacaatggaaacatcaatgaggctctccaggagatccggacgctggccttgatggggcctcctggtcttcctgggcaaattggcccacctggagctccagggattccaggccagaagggggagattggactgccaggccctccaggacacgatggggaaaagggacctcgcggtaaaccaggagacatgggccctcctggtccccaaggccccccaggaaaggatggacctccaggagtgaagggagaaaacgggcacccagggagcccaggagagaagggggaaaaaggggagacaggacaagcaggctcaccggttcctgggctgccagggccagaggggcctcccggacctccggggctccaaggtgttcctggaccaaagggggaagcaggactagatggagcaaaaggagagaaaggcttccagggagaaaaaggagaccgtggtcccctgggactacccggtactccaggaccaattggagttccaggcccagcgggaccaaagggcgagaggggcagcaaaggagaccctgggatgacaggaccaacgggagcagctgggcttcctggtttacatggaccacccggggacaagggaaaccggggggagagggggaagaaaggctctagagggcctaaaggggataagggagaccaaggagcgcctggattagatgccccctgcccattgggcgaagatggcttaccagtccaaggctgctggaacaagtga

SEQ ID NO: 121567 - DNA, 2934 bp, Homo sapiens
  Payload ID: 3832
  Gene Symbol: COL13A1
  Gene Name: collagen, type XIII, alpha 1
  ENST ID: ENST00000479733
  CDS Start-End: 494-2242
tgtgtcaagttacagaggcgccggaatcggcccctgcgctcctcgccagccgccacgacccacctctgcccatggggccctccgtgtgcgccccttcgcccggggactgaaactgactggcccgggagacacgaggcgcccagaaggactgacagcgcggcaccaactgctctgcagacacttgaagggaaagactgggcggagagaaggagagccggtcagattcccctaactttcctggacttggaacgttcttcgaaataacttttttctcacctaggtgtaccccaattaccgctggttgtgctttttcggcacttcctctcctactgctaatttttccgtcctctttgccgggagcagcggaaagggacgttttccagcgatacaagccctttccccctgccccgcagtttggatagagccttttggcagcggctgtcgcctttatttattctatttatttatttattggttctcaagacgcgagaggatggtagcggagcgcacccacaaagcggcagccaccggtgcccgcggccctggggagttgggcgcgcccgggacggtggctctggtggcggcgcgggcggagcgcggcgcacggctgccgagtccagggtcgtgcgggctgctgacgctggccctctgctcgctggcactcagcctgctcgcccactttcggacggccgagctgcaggcccgggtgctgcgcctggaagcggagcgcggggagcagcaaatggagacggctattttgggacgagtcaatcaactgctggacgagaaatggaagctccactcaaggaggcgccgggaggccccaaagacatctccaggatgtaactgcccaccaggacctcctggtcccactggaagacccggactcccaggggacaaaggtgccattgggatgcctggacgtgtgggagtaaagggccaaccaggcgagaaggggtcccccggagacgctgggctgtccatcattggtccccgcggcccccctggtcaaccaggaactagaggtttccctggatttccgggtcccattgggctggacggcaaaccgggccacccaggaccaaagggcgacatgggtctgacgggtcccccaggacagccgggaccccagggacaaaaaggagaaaagggtcagtgtggagagtacccacaccgggagtgcctaagcagcatgccagcagctctgcgctccagccaaataattgccctgaagctgctgcctctcctcaattcagtgcgactggctccacccccggtcataaaaaggcggacgttccagggcgaacagagccaggccagcatccaaggtccaccagggcccccaggcccccctggaccaagtggacctctggggcacccaggactgccagggcctatggggccacctggcttacctgggcctcctggaccaaagggagacccagggatccagggctaccacggccggaagggagaacggggcatgccagggatgccaggcaagcatggagccaagggggcgcccggaattgccgtggctgggatgaagggtgagccagggatcccaggaaccaagggtgagaagggggctgaaggctcccctgggcttcctggcctcctggggcagaagggagagaaaggcgatgctggcaactccattggaggaggcagaggggaacctggccctccagggctccctgggcccccagggccaaagggagaagcaggtgtcgatggccaggttggccccccagggcagccaggagacaagggggagcgtggagcagctggagaacagggaccagatggccccaagggctccaagggagaaccagggaaaggagagatggtggattacaatggaaacatcaatgaggctctccaggagatccggacgctggccttgatggggcctcctggtcttcctgggcaaattggcccacctggagctccagggattccaggccagaagggggagattggactgccaggccctccaggacacgatggggaaaagggacctcgcggtaaaccaggagacatgggccctcctggtccccaaggccccccaggaaaggatggacctccaggagtgaagggagaaaacgggcacccagggagcccaggagagaagggggaaaaaggggagacaggacaagcaggctcaccgggtctagatggcccaactggggagaggagaacatggtggccagagcagacccagagtggcaggattgcctaatccagctgggctcctgaggtttacaggagagaaaggagaagccggggagaagggcaatccaggagcagaggttcctgggctgccagggccagaggggcctcccggacctccggggctccaaggtgttcctggaccaaagggggaagcaggactagatggagcaaaaggagagaaaggcttccagggagaaaaaggagaccgtggtcccctgggactacccggtactccaggaccaattggagttccaggcccagcgggaccaaagggcgagaggggcagcaaaggagaccctgggatgacaggaccaacgggagcagctgggcttcctggtttacatggaccacccggggacaagggaaaccggggggagagggggaagaaaggctctagagggcctaaaggggataagggagaccaaggagcgcctggattagatgccccctgcccattgggcgaagatggcttaccagtccaaggctgctggaacaagtgatgcctctaaccttggattggcctgtgtgtgtgtttgtacatagaatatttatttttatacagttttcactttttgaaaatgccagaagtatgatgcatcttacagattattaaaaaagaaagaaaaacctgcatattttgtacagaaaatatcaacctcttcccttttgtttacaagatgttttgtataagcctatgtc

SEQ ID NO: 121568 - DNA, 1833 bp, Homo sapiens
  Payload ID: 3832
  Gene Symbol: COL13A1
  Gene Name: collagen, type XIII, alpha 1
  Uniprot ID: Q5TAT6
  ENST ID: ENST00000520133
  CDS Start-End: 1-1833
atggtagcggagcgcacccacaaagcggcagccaccggtgcccgcggccctggggagttgggcgcgcccgggacggtggctctggtggcggcgcgggcggagcgcggcgcacggctgccgagtccagggtcgtgcgggctgctgacgctggccctctgctcgctggcactcagcctgctcgcccactttcggacggccgagctgcaggcccgggtgctgcgcctggaagcggagcgcggggagcagcaaatggagacggctattttgggacgagtcaatcaactgctggacgagaaatggaagctccactcaaggaggcgccgggaggccccaaagacatctccaggatgtaactgcccaccaggacctcctggtcccactggaagacccggactcccaggtcaaccaggaactagaggtttccctggatttccgggtcccattgggctggacggcaaaccgggccacccaggaccaaagggcgacatgggtctgacgggtcccccaggacagccgggaccccagggacaaaaaggagaaaagggtcagtgtggagagtacccacaccgggagtgcctaagcagcatgccagcagctctgcgctccagccaaataattgccctgaagggcgaacagagccaggccagcatccaaggtccaccagggcccccaggcccccctggaccaagtggacctctggggcacccaggactgccagggcctatggggccacctggcttacctgggcctcctggaccaaagggagacccagggatccagggctaccacggccggaagggagaacggggcatgccagggatgccaggcaagcatggagccaagggggcgcccggaattgccgtggctgggatgaagggtgagccagggatcccaggaaccaagggtgagaagggggctgaaggctcccctgggcttcctggcctcctggggcagaagggagagaaaggcgatgctggcaactccattggaggaggcagaggggaacctggccctccagggctccctgggcccccagggccaaagggagaagcaggtgtcgatggccaggttggccccccagggcagccaggagacaagggggagcgtggagcagctggagaacagggaccagatggccccaagggctccaagggagaaccagggaaaggagagatggtggattacaatggaaacatcaatgaggctctccaggagatccggacgctggccttgatggggcctcctggtcttcctgggcaaattggcccacctggagctccagggattccaggccagaagggggagattggactgccaggccctccaggacacgatggggaaaagggacctcgcggtaaaccaggagacatgggccctcctggtccccaaggccccccaggaaaggatggacctccaggagtgaagggagaaaacgggcacccagggagcccaggagagaagggggaaaaaggggagacaggacaagcaggctcaccggttcctgggctgccagggccagaggggcctcccggacctccggggctccaaggtgttcctggaccaaagggggaagcaggactagatggagcaaaaggagagaaaggcttccagggagaaaaaggagaccgtggtcccctgggactacccggtactccaggaccaattggagttccaggcccagcgggaccaaagggcgagaggggcagcaaaggagaccctgggatgacaggaccaacgggagcagctgggcttcctggtttacatggaccacccggggacaagggaaaccggggcgaagatggcttaccagtccaaggctgctggaacaagtga

SEQ ID NO: 121569 - DNA, 3450 bp, Homo sapiens
  Payload ID: 3833
  Gene Symbol: COL14A1
  Gene Name: collagen, type XIV, alpha 1
  ENST ID: ENST00000247781
  CDS Start-End: 381-2654
gacaggcatggtgaaaacattgttcttgggtgttaccaatctccaagccaaacatgttgaaatgaccagcttgtgtgcccactggcaggtacatcgccatgccacagcctatagggttgttatagaatccctccaggataggcaaaagcaagaatccactgtgggtggagggacaaccaggcattgcttctatggacttcagcctgattctgaatataaaatcagtgtttatacaaagctccaggagattgaaggacctagtgtgagcataatggaaaaaacacaatcacttcctacacgaccaccaacttttcctccaaccattccaccagcaaaagaagtatgtaaggcggccaaggctgacctggtatttatggtggatggatcctggagcattggagatgaaaaataagatcatcagctttctatacagcactgttggagccctgaacaagattggcacagatggaacccaagttgcaatggttcagttcactgatgatcccagaacagaatttaaactaaatgcttacaaaaccaaagagactcttcttgatgcaattaaacacatttcatacaaaggaggaaatacaaaaacaggaaaagcaattaagtatgttcgagataccttgttcactgcagagtcaggtacaagaaggggcatcccaaaggttatcgtggttataactgatggaagatcacaagatgatgtgaacaaaatctccagggagatgcaattagatggctatagcatttttgcaattggtgtggccgatgcagattactcggagttggttagcattggcagtaagcccagcgcacgccatgtcttctttgtggatgactttgacgcctttaagaaaatcgaagatgagttaattacttttgtctgcgaaacagcatcagcaacctgtccagtggtacacaaggatggcattgatcttgcaggatttaagatgatggaaatgtttggtttggttgaaaaagatttttcatcagtggaaggggtttctatggagcctggtaccttcaatgtgtttccatgttaccaactccataaagatgccctggtttcccagccaaccaggtacttgcacccagaaggattgccctccgactacacaatcagttttctattccggattcttcctgacactccacaggagccatttgctctttgggagattttaaataaaaattctgacccattggttggggttattttagacaatggtgggaaaactctaacatatttcaactatgaccagagtggggattttcaaactgttactttcgaaggacctgaaattaggaaaattttttatggaagctttcacaagctacacattgttgtcagtgagactttggtcaaagtggttattgactgcaagcaagtgggtgagaaggcaatgaacgcatcagctaatatcacgtcagatggtgtagaagtgctagggaaaatggttcgatcaagaggaccaggtggaaactctgcaccgttccagttacagatgtttgatattgtttgctccacatcatgggccaatacagacaaatgctgtgaacttccaggcctgagagatgatgagtcttgcccagaccttccccattcctgctcctgttctgaaaccaatgaagtggctctgggaccagcgggcccaccaggtggtccaggactccgaggaccaaagggccagcaaggtgaaccgggtccaaagggaccagatggccctcggggtgaaattggtctgccaggacctcagggtccacctggacctcaaggaccaagtggtctgtccattcaaggaatgcccggaatgccaggagaaaaaggagagaaaggagatactggccttccaggtccacagggtatcccaggaggcgttggttcaccaggacgtgatggctcaccaggccagaggggccttccgggaaaggatggatcctcgggacctccaggaccaccagggccaataggcattcctggcacccctggagtcccagggatcacaggaagcatgggaccgcaaggcgccctgggaccacctggtgtccctggagcaaagggggaacgaggagagcggggtgacctgcagtctcaagccatggtgagatcagtggcgcgtcaagtatgcgaacagctcatccagagtcacatggccaggtacactgccatcctcaaccagattcccagccactcctcatccatccggactgtccaagggcctcctggggagcctgggaggccaggctcacctggagcccctggtgaacaaggacccccaggcacaccaggcttccccggaaatgcaggcgtgccagggaccccaggagaacgaggtctaactggtatcaaaggagaaaaaggaaatccaggcgttggaacccaaggtccaagaggcccccctggaccagcaggaccttcaggggagagtcggcctggcagccctgggccccctggctctcctggaccaagaggcccaccaggtcatctgggggttcctggaccccaaggtccttctggccagcctggatattgtgacccctcatcatgttctgcctatggtgtgagagctccccatccagatcagccagagttcacccctgtccaagatgagctggaagccatggaactgtggggccctggagtctgatagcctcaggagaaatttgaagaccaactgcaagaactcttaaggaatcttgtttgagaaaatgttgttatgtggtttgtatgctacttttggggggcagggctcatttcagcagcctaaatctcctccttggataatgttaatattattattattattaacaaaaaatatatatttttaaaaagttcccttaatctatgacatggtagcaatgatttccctttggtgtcttaatggcatgtcagataatttgtttttccagagaagagagctcaaagaggaattgggaaaaataaattgaactctggaatcttctctctcaagtcctaaaatgaacaaacagatatgattgtgtttgagggaaatatgtccctagcaggaaaagaattcaaagaggttcaaagaatatgtcacttactcctacttgctgtaggaataaccttgctgataagaaaaaaagggacaatattggagaaactacctcttgtttaattgatctgtccaactctgagatcacttggtaactggtttcatgtgtatccaaaaatcagcatttggatttaagctttctgaatttggtagtttaagaaacagatttagtttttcagtggttttaactcatgtgaaataatgattttccaccagctctgatgcaaagagatataattttaatgaacgatttatccagcagtgtgttccaggggttgcctctccttatctacggggattactttgtacatgcagataagttttcgcaaacctatttccattttcttttgtaagcaaataaaacttt

SEQ ID NO: 121570 - DNA, 6466 bp, Homo sapiens
  Payload ID: 3833
  Gene Symbol: COL14A1
  Gene Name: collagen, type XIV, alpha 1
  Uniprot ID: Q05707
  ENST ID: ENST00000297848
  CDS Start-End: 271-5661
atctgatcctgggctcccagctggagaggcggaggcagctccagggggctggaagtggaagcgcagcggcagaaggagagggagagagaaagagagagaggctaattaaaaaaggatactccgagggaagagagcaagggcggtgcgccgccaaggaccaactagcggcggagcttcgatcttgcctaggcgcggagagctcccaacctgggctggaaccttgcccagcacaggtggctgctacaccccatgtaaaaagcggaaaataaaatgaagattttccagcgcaagatgcggtactggttgcttccaccttttttggcaattgtttatttctgcaccattgtccaaggtcaagtggctccacccacaaggttaagatataatgtaatatctcatgacagtatacagatttcatggaaggctccaagagggaaatttggtggttacaaacttcttgtgactccaacttcaggtggaaaaactaaccagctgaatctgcagaacactgcaactaaagcaattattcaaggccttatgccagaccagaattacacagttcaaattattgcatacaataaagataaagaaagcaagccagctcaaggccaattcagaattaaagatttagaaaaaagaaaggatccaaagcccagagtcaaagttgtggacagaggaaatgggagtagaccatcttcaccagaagaagtgaaatttgtctgtcaaactccagcaattgctgacattgtaatcctggtcgatggttcatggagtattggaagattcaacttcagactggttcggcatttcttggaaaacctggttacagcattcgatgtgggctcagagaagacacgaattggtcttgcacagtatagtggtgaccccagaatagaatggcacttgaatgcatttagcacaaaagatgaagtgattgaagctgtccgaaacctcccatataaaggaggaaatacactaacaggtcttgctttgaactacatttttgaaaatagcttcaaaccagaagcaggatcaaggactggagtatccaaaattggcattttaatcacagatggaaaatcccaagatgacattattccaccatctagaaatcttcgtgagtctggtgtagaactgtttgccataggggtgaaaaacgcggatgtgaatgagctgcaggagatcgcctctgaaccagacagcactcatgtgtacaatgttgccgaattcgatctgatgcacacagttgtggagagtctgaccaggactctctgctctagagtggaagaacaggacagagaaattaaagcctcagcccatgccatcactgggccgcctacggagttgattacttctgaagtcactgccagaagctttatggttaactggactcatgccccaggaaatgtggaaaaatacagagttgtgtattatcctaccaggggtggaaaaccagacgaggtggtggtagatggaactgtatcttccacagtgttgaaaaacttgatgtctttaactgaatatcagatagcagtctttgcaatctatgcccacactgctagtgaaggcctacggggaactgaaactacacttgctttaccgatggcttctgaccttctactgtacgacgtgactgagaacagcatgcgagtcaaatgggatgcagtgcctggggcctcaggttacctgatcctttatgctcctctaacagagggcctggctggggatgaaaaagagatgaaaattggagagacccacacagatattgaattgagtgggttgttgcccaatacagaatacacagtcacagtttatgccatgtttggagaagaggccagtgatcctgttacgggacaagaaacaacattggctttaagtccaccaagaaacctgagaatctccaatgttggctctaacagtgctcgattaacctgggacccaacttcaagacagatcaatggttatcgaattgtatataacaatgcagatgggactgaaatcaatgaggttgaagtcgatcctattactaccttccctctgaagggcttgacacctctcacagagtatactattgctattttctccatctatgatgaaggacagtcagagcctctgactggagtttttaccaccgaggaagttccagcccagcaatacttagaaattgatgaggtgacgacagacagttttagggtgacctggcatcccctctcagctgatgaagggctacacaaattgatgtggattccagtctatggggggaagactgaggaggttgtcctgaaagaagagcaggactcacatgttattgaaggcctggagcccggtacggagtatgaagtttcactattggccgtacttgatgatggaagcgagagtgaggtggtgactgctgtcgggaccacacttgacagtttttggacagaaccagctacaaccatagtgcctaccacatctgtgacttcagttttccagacgggaatcagaaacctagttgtaggtgatgaaactacttctagcctgcgggtaaaatgggacatttctgacagcgatgtgcagcagtttagggtgacctacatgacagctcaaggggaccctgaggaagaagtcataggaacggttatggtgcctggaagccagaacaacctccttctgaagcctctgcttcctgatactgaatacaaagtcacagtgactcccatctacacggatggcgaaggcgtcagcgtctccgctcctggaaaaaccttaccatcctcggggccccagaacttgcgggtgtccgaggaatggtataaccggttgcgcattacgtgggaccccccatcttccccggtgaaaggctatagaattgtctacaaacctgtcagtgttcctggtccaacactggaaacgtttgtgggagctgacattaacaccatccttatcacaaacctcctcagcggaatggactacaatgtgaagatatttgcctcccaggcctcaggcttcagcgacgccctgacaggcatggtgaaaacattgttcttgggtgttaccaatctccaagccaaacatgttgaaatgaccagcttgtgtgcccactggcaggtacatcgccatgccacagcctatagggttgttatagaatccctccaggataggcaaaagcaagaatccactgtgggtggagggacaaccaggcattgcttctatggacttcagcctgattctgaatataaaatcagtgtttatacaaagctccaggagattgaaggacctagtgtgagcataatggaaaaaacacaatcacttcctacacgaccaccaacttttcctccaaccattccaccagcaaaagaagtatgtaaggcggccaaggctgacctggtatttatggtggatggatcctggagcattggagatgaaaatttcaataagatcatcagctttctatacagcactgttggagccctgaacaagattggcacagatggaacccaagttgcaatggttcagttcactgatgatcccagaacagaatttaaactaaatgcttacaaaaccaaagagactcttcttgatgcaattaaacacatttcatacaaaggaggaaatacaaaaacaggaaaagcaattaagtatgttcgagataccttgttcactgcagagtcaggtacaagaaggggcatcccaaaggttatcgtggttataactgatggaagatcacaagatgatgtgaacaaaatctccagggagatgcaattagatggctatagcatttttgcaattggtgtggccgatgcagattactcggagttggttagcattggcagtaagcccagcgcacgccatgtcttctttgtggatgactttgacgcctttaagaaaatcgaagatgagttaattacttttgtctgcgaaacagcatcagcaacctgtccagtggtacacaaggatggcattgatcttgcaggatttaagatgatggaaatgtttggtttggttgaaaaagatttttcatcagtggaaggggtttctatggagcctggtaccttcaatgtgtttccatgttaccaactccataaagatgccctggtttcccagccaaccaggtacttgcacccagaaggattgccctccgactacacaatcagttttctattccggattcttcctgacactccacaggagccatttgctctttgggagattttaaataaaaattctgacccattggttggggttattttagacaatggtgggaaaactctaacatatttcaactatgaccagagtggggattttcaaactgttactttcgaaggacctgaaattaggaaaattttttatggaagctttcacaagctacacattgttgtcagtgagactttggtcaaagtggttattgactgcaagcaagtgggtgagaaggcaatgaacgcatcagctaatatcacgtcagatggtgtagaagtgctagggaaaatggttcgatcaagaggaccaggtggaaactctgcaccgttccagttacagatgtttgatattgtttgctccacatcatgggccaatacagacaaatgctgtgaacttccaggcctgagagatgatgagtcttgcccagaccttccccattcctgctcctgttctgaaaccaatgaagtggctctgggaccagcgggcccaccaggtggtccaggactccgaggaccaaagggccagcaaggtgaaccgggtccaaagggaccagatggccctcggggtgaaattggtctgccaggacctcagggtccacctggacctcaaggaccaagtggtctgtccattcaaggaatgcccggaatgccaggagaaaaaggagagaaaggagatactggccttccaggtccacagggtatcccaggaggcgttggttcaccaggacgtgatggctcaccaggccagaggggccttccgggaaaggatggatcctcgggacctccaggaccaccagggccaataggcattcctggcacccctggagtcccagggatcacaggaagcatgggaccgcaaggcgccctgggaccacctggtgtccctggagcaaagggggaacgaggagagcggggtgacctgcagtctcaagccatggtgagatcagtggcgcgtcaagtatgcgaacagctcatccagagtcacatggccaggtacactgccatcctcaaccagattcccagccactcctcatccatccggactgtccaagggcctcctggggagcctgggaggccaggctcacctggagcccctggtgaacaaggacccccaggcacaccaggcttccccggaaatgcaggcgtgccagggaccccaggagaacgaggtctaactggtatcaaaggagaaaaaggaaatccaggcgttggaacccaaggtccaagaggcccccctggaccagcaggaccttcaggggagagtcggcctggcagccctgggccccctggctctcctggaccaagaggcccaccaggtcatctgggggttcctggaccccaaggtccttctggccagcctggatattgtgacccctcatcatgttctgcctatggtgtgagagctccccatccagatcagccagagttcacccctgtccaagatgagctggaagccatggaactgtggggccctggagtctgatagcctcaggagaaatttgaagaccaactgcaagaactcttaaggaatcttgtttgagaaaatgttgttatgtggtttgtatgctacttttggggggcagggctcatttcagcagcctaaatctcctccttggataatgttaatattattattattattaacaaaaaatatatatttttaaaaagttcccttaatctatgacatggtagcaatgatttccctttggtgtcttaatggcatgtcagataatttgtttttccagagaagagagctcaaagaggaattgggaaaaataaattgaactctggaatcttctctctcaagtcctaaaatgaacaaacagatatgattgtgtttgagggaaatatgtccctagcaggaaaagaattcaaagaggttcaaagaatatgtcacttactcctacttgctgtaggaataaccttgctgataagaaaaaaagggacaatattggagaaactacctcttgtttaattgatctgtccaactctgagatcacttggtaactggtttcatgtgtatccaaaaatcagcatttggatttaagctttctgaatttggtagtttaagaaacagatttagtttttcagtggttttaactcatgtgaaataatgattttccaccagctctgatgcaaagagatataattttaatgaacgatttatccagcagtgtgttccaggggttgcctctccttatctacggggattactttgtacatgcagataagttttcgcaaacctatttccattttcttttgtaagcaaataaaactttaaaacaatg

SEQ ID NO: 121571 - DNA, 6163 bp, Homo sapiens
  Payload ID: 3833
  Gene Symbol: COL14A1
  Gene Name: collagen, type XIV, alpha 1
  Uniprot ID: Q05707
  ENST ID: ENST00000309791
  CDS Start-End: 271-5613
atctgatcctgggctcccagctggagaggcggaggcagctccagggggctggaagtggaagcgcagcggcagaaggagagggagagagaaagagagagaggctaattaaaaaaggatactccgagggaagagagcaagggcggtgcgccgccaaggaccaactagcggcggagcttcgatcttgcctaggcgcggagagctcccaacctgggctggaaccttgcccagcacaggtggctgctacaccccatgtaaaaagcggaaaataaaatgaagattttccagcgcaagatgcggtactggttgcttccaccttttttggcaattgtttatttctgcaccattgtccaaggtcaagtggctccacccacaaggttaagatataatgtaatatctcatgacagtatacagatttcatggaaggctccaagagggaaatttggtggttacaaacttcttgtgactccaacttcaggtggaaaaactaaccagctgaatctgcagaacactgcaactaaagcaattattcaaggccttatgccagaccagaattacacagttcaaattattgcatacaataaagataaagaaagcaagccagctcaaggccaattcagaattaaagatttagaaaaaagaaaggatccaaagcccagagtcaaagttgtggacagaggaaatgggagtagaccatcttcaccagaagaagtgaaatttgtctgtcaaactccagcaattgctgacattgtaatcctggtcgatggttcatggagtattggaagattcaacttcagactggttcggcatttcttggaaaacctggttacagcattcgatgtgggctcagagaagacacgaattggtcttgcacagtatagtggtgaccccagaatagaatggcacttgaatgcatttagcacaaaagatgaagtgattgaagctgtccgaaacctcccatataaaggaggaaatacactaacaggtcttgctttgaactacatttttgaaaatagcttcaaaccagaagcaggatcaaggactggagtatccaaaattggcattttaatcacagatggaaaatcccaagatgacattattccaccatctagaaatcttcgtgagtctggtgtagaactgtttgccataggggtgaaaaacgcggatgtgaatgagctgcaggagatcgcctctgaaccagacagcactcatgtgtacaatgttgccgaattcgatctgatgcacacagttgtggagagtctgaccaggactctctgctctagagtggaagaacaggacagagaaattaaagcctcagcccatgccatcactgggccgcctacggagttgattacttctgaagtcactgccagaagctttatggttaactggactcatgccccaggaaatgtggaaaaatacagagttgtgtattatcctaccaggggtggaaaaccagacgaggtggtggtagatggaactgtatcttccacagtgttgaaaaacttgatgtctttaactgaatatcagatagcagtctttgcaatctatgcccacactgctagtgaaggcctacggggaactgaaactacacttgctttaccgatggcttctgaccttctactgtacgacgtgactgagaacagcatgcgagtcaaatgggatgcagtgcctggggcctcaggttacctgatcctttatgctcctctaacagagggcctggctggggatgaaaaagagatgaaaattggagagacccacacagatattgaattgagtgggttgttgcccaatacagaatacacagtcacagtttatgccatgtttggagaagaggccagtgatcctgttacgggacaagaaacaacattggctttaagtccaccaagaaacctgagaatctccaatgttggctctaacagtgctcgattaacctgggacccaacttcaagacagatcaatggttatcgaattgtatataacaatgcagatgggactgaaatcaatgaggttgaagtcgatcctattactaccttccctctgaagggcttgacacctctcacagagtatactattgctattttctccatctatgatgaaggacagtcagagcctctgactggagtttttaccaccgaggaagttccagcccagcaatacttagaaattgatgaggtgacgacagacagttttagggtgacctggcatcccctctcagctgatgaagggctacacaaattgatgtggattccagtctatggggggaagactgaggaggttgtcctgaaagaagagcaggactcacatgttattgaaggcctggagcccggtacggagtatgaagtttcactattggccgtacttgatgatggaagcgagagtgaggtggtgactgctgtcgggaccacacttgacagtttttggacagaaccagctacaaccatagtgcctaccacatctgtgacttcagttttccagacgggaatcagaaacctagttgtaggtgatgaaactacttctagcctgcgggtaaaatgggacatttctgacagcgatgtgcagcagtttagggtgacctacatgacagctcaaggggaccctgaggaagaagtcataggaacggttatggtgcctggaagccagaacaacctccttctgaagcctctgcttcctgatactgaatacaaagtcacagtgactcccatctacacggatggcgaaggcgtcagcgtctccgctcctggaaaaaccttaccatcctcggggccccagaacttgcgggtgtccgaggaatggtataaccggttgcgcattacgtgggaccccccatcttccccggtgaaaggctatagaattgtctacaaacctgtcagtgttcctggtccaacactggaaacgtttgtgggagctgacattaacaccatccttatcacaaacctcctcagcggaatggactacaatgtgaagatatttgcctcccaggcctcaggcttcagcgacgccctgacaggcatggtgaaaacattgttcttgggtgttaccaatctccaagccaaacatgttgaaatgaccagcttgtgtgcccactggcaggtacatcgccatgccacagcctatagggttgttatagaatccctccaggataggcaaaagcaagaatccactgtgggtggagggacaaccaggcattgcttctatggacttcagcctgattctgaatataaaatcagtgtttatacaaagctccaggagattgaaggacctagtgtgagcataatggaaaaaacacaatcacttcctacacgaccaccaacttttcctccaaccattccaccagcaaaagaagtatgtaaggcggccaaggctgacctggtatttatggtggatggatcctggagcattggagatgaaaatttcaataagatcatcagctttctatacagcactgttggagccctgaacaagattggcacagatggaacccaagttgcaatggttcagttcactgatgatcccagaacagaatttaaactaaatgcttacaaaaccaaagagactcttcttgatgcaattaaacacatttcatacaaaggaggaaatacaaaaacaggaaaagcaattaagtatgttcgagataccttgttcactgcagagtcaggtacaagaaggggcatcccaaaggttatcgtggttataactgatggaagatcacaagatgatgtgaacaaaatctccagggagatgcaattagatggctatagcatttttgcaattggtgtggccgatgcagattactcggagttggttagcattggcagtaagcccagcgcacgccatgtcttctttgtggatgactttgacgcctttaagaaaatcgaagatgagttaattacttttgtctgcgaaacagcatcagcaacctgtccagtggtacacaaggatggcattgatcttgcaggatttaagatgatggaaatgtttggtttggttgaaaaagatttttcatcagtggaaggggtttctatggagcctggtaccttcaatgtgtttccatgttaccaactccataaagatgccctggtttcccagccaaccaggtacttgcacccagaaggattgccctccgactacacaatcagttttctattccggattcttcctgacactccacaggagccatttgctctttgggagattttaaataaaaattctgacccattggttggggttattttagacaatggtgggaaaactctaacatatttcaactatgaccagagtggggattttcaaactgttactttcgaaggacctgaaattaggaaaattttttatggaagctttcacaagctacacattgttgtcagtgagactttggtcaaagtggttattgactgcaagcaagtgggtgagaaggcaatgaacgcatcagctaatatcacgtcagatggtgtagaagtgctagggaaaatggttcgatcaagaggaccaggtggaaactctgcaccgttccagttacagatgtttgatattgtttgctccacatcatgggccaatacagacaaatgctgtgaacttccaggcctgagagatgatgagtcttgcccagaccttccccattcctgctcctgttctgaaaccaatgaagtggctctgggaccagcgggcccaccaggtggtccaggactccgaggaccaaagggccagcaaggtgaaccgggtccaaagggaccagatggccctcggggtgaaattggtctgccaggacctcagggtccacctggacctcaaggaccaagtggtctgtccattcaaggaatgcccggaatgccaggagaaaaaggagagaaaggagatactggccttccaggtccacagggtatcccaggaggcgttggttcaccaggacgtgatggctcaccaggccagaggggccttccgggaaaggatggatcctcgggacctccaggaccaccagggccaataggcattcctggcacccctggagtcccagggatcacaggaagcatgggaccgcaaggcgccctgggaccacctggtgtccctggagcaaagggggaacgaggagagcggggtgacctgcagtctcaagccatggtgagatcagtggcgcgtcaagtatgcgaacagctcatccagagtcacatggccaggtacactgccatcctcaaccagattcccagccactcctcatccatccggactgtccaagggcctcctggggagcctgggaggccaggctcacctggagcccctggtgaacaaggacccccaggcacaccaggcttccccggaaatgcaggcgtgccagggaccccaggagaacgaggtctaactggtatcaaaggagaaaaaggaaatccaggcgttggaacccaaggtccaagaggcccccctggaccagcaggaccttcaggggagagtcggcctggcagccctgggccccctggctctcctggaccaagaggcccaccaggtcatctgggggttcctggaccccaaggtccttctggccagcctggatattgtgacccctcatcatgttctgcctatggtgtgagagatctgatcccctacaatgattaccagcactgaagtggaaatcctccactctggttccattggccccagacatttagctgtggatacagaactgtcctgtcaaccaccaccaccaccaagcccctgcccctaacaatggacactctgcttccctgcttcttctgcatccctgccttcccactttcaaacctcttgcccactctgctccaaacatgatggagtgataacatcggaacttaaccaaatcatatatgtctattttaatagacactgactgctccatgtcagcctggatagaggtatatgatcgtgtgccaagaatttatcccagactcccctgtgtgacagcttcataataaagttacttaactgtgcctcttcctccttcctctccccacacaggatggatgggcatctttctccttgaccaccctactctcccttcctcccctgatcacctcccctccctgctcttccctggtgatggacttctaacatgagattttttaaaaaaatttctatttcttttataattttgctgagttttcagggtttcttctgtaaataaaacataatatttaaa

SEQ ID NO: 121572 - DNA, 697 bp, Homo sapiens
  Payload ID: 3833
  Gene Symbol: COL14A1
  Gene Name: collagen, type XIV, alpha 1
  ENST ID: ENST00000440844
  CDS Start-End: 1-450
gggcctcctggggagcctgggaggccaggctcacctggagcccctggtgaacaaggacccccaggcacaccaggcttccccggaaatgcaggcgtgccagggaccccaggagaacgaggtctaactggtatcaaaggagaaaaaggaaatccaggcgttggaacccaaggtccaagaggcccccctggaccagcaggaccttcaggggagagtcggcctggcagccctgggccccctggctctcctggaccaagaggcccaccaggtcatctgggggttcctggaccccaaggtccttctggccagcctggatattgtgacccctcatcatgttctgcctatggtgtgagaggatggatgggcatctttctccttgaccaccctactctcccttcctcccctgatcacctcccctccctgctcttccctggtgatggacttctaacatgagattttttaaaaaaatttctatttcttttataattttgctgagttttcagggtttcttctgtaaataaaacataatatttaaatggttggttatgattctagttttctaacaatttctgtaatgtatctttcccttcgtctatttactaactgtctgaaaccttatggggaaggtacaaggggcgtggtggattaagacatccactgctttttacccagcaggatatctctgtgtctctaaggaccc

SEQ ID NO: 121573 - DNA, 2621 bp, Homo sapiens
  Payload ID: 3833
  Gene Symbol: COL14A1
  Gene Name: collagen, type XIV, alpha 1
  ENST ID: ENST00000434620
  CDS Start-End: 1-2532
ttcgatgtgggctcagagaagacacgaattggtcttgcacagtatagtggtgaccccagaatagaatggcacttgaatgcatttagcacaaaagatgaagtgattgaagctgtccgaaacctcccatataaaggaggaaatacactaacaggtcttgctttgaactacatttttgaaaatagcttcaaaccagaagcaggatcaaggactggagtatccaaaattggcattttaatcacagatggaaaatcccaagatgacattattccaccatctagaaatcttcgtgagtctggtgtagaactgtttgccataggggtgaaaaacgcggatgtgaatgagctgcaggagatcgcctctgaaccagacagcactcatgtgtacaatgttgccgaattcgatctgatgcacacagttgtggagagtctgaccaggactctctgctctagagtggaagaacaggacagagaaattaaagcctcagcccatgccatcactgggccgcctacggagttgattacttctgaagtcactgccagaagctttatggttaactggactcatgccccaggaaatgtggaaaaatacagagttgtgtattatcctaccaggggtggaaaaccagacgaggtggtggtagatggaactgtatcttccacagtgttgaaaaacttgatgtctttaactgaatatcagatagcagtctttgcaatctatgcccacactgctagtgaaggcctacggggaactgaaactacacttgctttaccgatggcttctgaccttctactgtacgacgtgactgagaacagcatgcgagtcaaatgggatgcagtgcctggggcctcaggttacctgatcctttatgctcctctaacagagggcctggctggggatgaaaaagagatgaaaattggagagacccacacagatattgaattgagtgggttgttgcccaatacagaatacacagtcacagtttatgccatgtttggagaagaggccagtgatcctgttacgggacaagaaacaacattggctttaagtccaccaagaaacctgagaatctccaatgttggctctaacagtgctcgattaacctgggacccaacttcaagacagatcaatggttatcgaattgtatataacaatgcagatgggactgaaatcaatgaggttgaagtcgatcctattactaccttccctctgaagggcttgacacctctcacagagtatactattgctattttctccatctatgatgaaggacagtcagagcctctgactggagtttttaccaccgaggaagttccagcccagcaatacttagaaattgatgaggtgacgacagacagttttagggtgacctggcatcccctctcagctgatgaagggctacacaaattgatgtggattccagtctatggggggaagactgaggaggttgtcctgaaagaagagcaggactcacatgttattgaaggcctggagcccggtacggagtatgaagtttcactattggccgtacttgatgatggaagcgagagtgaggtggtgactgctgtcgggaccacacttgacagtttttggacagaaccagctacaaccatagtgcctaccacatctgtgacttcagttttccagacgggaatcagaaacctagttgtaggtgatgaaactacttctagcctgcgggtaaaatgggacatttctgacagcgatgtgcagcagtttagggtgacctacatgacagctcaaggggaccctgaggaagaagtcataggaacggttatggtgcctggaagccagaacaacctccttctgaagcctctgcttcctgatactgaatacaaagtcacagtgactcccatctacacggatggcgaaggcgtcagcgtctccgctcctggaaaaaccttaccatcctcggggccccagaacttgcgggtgtccgaggaatggtataaccggttgcgcattacgtgggaccccccatcttccccggtgaaaggctatagaattgtctacaaacctgtcagtgttcctggtccaacactggaaacgtttgtgggagctgacattaacaccatccttatcacaaacctcctcagcggaatggactacaatgtgaagatatttgcctcccaggcctcaggcttcagcgacgccctgacaggcatggtgaaaacattgttcttgggtgttaccaatctccaagccaaacatgttgaaatgaccagcttgtgtgcccactggcaggtacatcgccatgccacagcctatagggttgttatagaatccctccaggataggcaaaagcaagaatccactgtgggtggagggacaaccaggcattgcttctatggacttcagcctgattctgaatataaaatcagtgtttatacaaagctccaggagattgaaggacctagtgtgagcataatggaaaaaacacaatcacttcctacacgaccaccaacttttcctccaaccattccaccagcaaaagaaggtaaaagaataatagaataattatctgattctaggtttaggatttgtgttggttttgtttgcctgttcatttcaaaccaggatattaataaagtatatttattgtgcta

SEQ ID NO: 121574 - DNA, 3244 bp, Homo sapiens
  Payload ID: 3833
  Gene Symbol: COL14A1
  Gene Name: collagen, type XIV, alpha 1
  ENST ID: ENST00000498051
  CDS Start-End: 297-1901
cttctccctcctgccgccttatgaacagggtgactgtttccccatcggccatgattttaagtttcctgaggcctccccagtcatgctgaactatactgttcctaagagcatctgccccagtcaacttctcatccacagatattaatctcagtcaacctccagatttttagacatattttgaaagtctttcatcaccagatttcaaaggtgttgatagatatctatttttaaacatggaaagatggtggtgcaatggccagtggctgctacaccccatgtaaaaagcggaaaataaaatgaagattttccagcgcaagatgcggtactggttgcttccaccttttttggcaattgtttatttctgcaccattgtccaaggtcaagtggctccacccacaaggttaagatataatgtaatatctcatgacagtatacagatttcatggaaggctccaagagggaaatttggtggttacaaacttcttgtgactccaacttcaggtggaaaaactaaccagctgaatctgcagaacactgcaactaaagcaattattcaaggccttatgccagaccagaattacacagttcaaattattgcatacaataaagataaagaaagcaagccagctcaaggccaattcagaattaaagatttagaaaaaagaaaggatccaaagcccagagtcaaagttgtggacagaggaaatgggagtagaccatcttcaccagaagaagtgaaatttgtctgtcaaactccagcaattgctgacattgtaatcctggtcgatggttcatggagtattggaagattcaacttcagactggttcggcatttcttggaaaacctggttacagcattcgatgtgggctcagagaagacacgaattggtcttgcacagtatagtggtgaccccagaatagaatggcacttgaatgcatttagcacaaaagatgaagtgattgaagctgtccgaaacctcccatataaaggaggaaatacactaacaggtcttgctttgaactacatttttgaaaatagcttcaaaccagaagcaggatcaaggactggagtatccaaaattggcattttaatcacagatggaaaatcccaagatgacattattccaccatctagaaatcttcgtgagtctggtgtagaactgtttgccataggggtgaaaaacgcggatgtgaatgagctgcaggagatcgcctctgaaccagacagcactcatgtgtacaatgttgccgaattcgatctgatgcacacagttgtggagagtctgaccaggactctctgctctagagtggaagaacaggacagagaaattaaagcctcagcccatgccatcactgggccgcctacggagttgattacttctgaagtcactgccagaagctttatggttaactggactcatgccccaggaaatgtggaaaaatacagagttgtgtattatcctaccaggggtggaaaaccagacgaggtggtggtagatggaactgtatcttccacagtgttgaaaaacttgatgtctttaactgaatatcagatagcagtctttgcaatctatgcccacactgctagtgaaggcctacggggaactgaaactacacttgctttaccgatggcttctgaccttctactgtacgacgtgactgagaacagcatgcgagtcaaatgggatgcagtgcctggggcctcaggttacctgatcctttatgctcctctaacagagggcctggctggggatgaaaaagagatgaaaattggagagacccacacagatattgaattgagtgggttgttgcccaatacagaatacacagtcacagtttatgccatgtttggagaagaggccagtgatcctgttacgggacaagaaacaacatcaccttaattattaagagattcactaactcctacaagatctttattgtcaaagaatcagtatgtattgaattaatgaaagaactgggctttgaggttaggaaacatcatgcttcgtggctatggctgtggctttaagtccaccaagaaacctgagaatctccaatgttggctctaacagtgctcgattaacctgggacccaacttcaagacagatcaatggttatcgaattgtatataacaatgcagatgggactgaaatcaatgaggttgaagtcgatcctattactaccttccctctgaagggcttgacacctctcacagagtatactattgctattttctccatctatgatgaaggacagtcagagcctctgactggagtttttaccaccgaggaagttccagcccagcaatacttagaaattgatgaggtgacgacagacagttttagggtgacctggcatcccctctcagctgatgaagggctacacaaattgatgtggattccagtctatggggggaagactgaggaggttgtcctgaaagaagagcaggactcacatgttattgaaggcctggagcccggtacggagtatgaagtttcactattggccgtacttgatgatggaagcgagagtgaggtggtgactgctgtcgggaccacacttgacagtttttggacagaaccagctacaaccatagtgcctaccacatctgtgacttcagttttccagacgggaatcagaaacctagttgtaggtgatgaaactacttctagcctgcgggtaaaatgggacatttctgacagcgatgtgcagcagtttagggtgacctacatgacagctcaaggggaccctgaggaagaagtcataggaacggtctgtataaattcaactgactagaaactctgcagatgttactaacacagctaataagactgtcttcggagatcaatgcaaactttactgctcttttctcagtgactctgccatctccagaaactaatgttctctgttaatctgactccactactggcttcttagtgacctttataaatccaaaacttgctccatgtacaacttgctccaagttaataacctctgaacattgtttcaaatattgcttctcttctgctgccttgcacctgttcgagcaccaaagttgggtcataaaaggccatatgcacttgtgtctgtatatatgtatgtatagacatgtataaaagtttaatatagaaaataatttcttctgcccttggaaatctgataaaaaaacttttaagcaaaggacacagaaaaggtcttctatatggtatagtgaaaatattcttaataaaataccatccgttaa

SEQ ID NO: 121575 - DNA, 1008 bp, Homo sapiens
  Payload ID: 3833
  Gene Symbol: COL14A1
  Gene Name: collagen, type XIV, alpha 1
  ENST ID: ENST00000523142
  CDS Start-End: 1-1008
tgtctgtcaaactccagcaattgctgacattgtaatcctggtcgatggttcatggagtattggaagattcaacttcagactggttcggcatttcttggaaaacctggttacagcattcgatgtgggctcagagaagacacgaattggggtgaaaaacgcggatgtgaatgagctgcaggagatcgcctctgaaccagacagcactcatgtgtacaatgttgccgaattcgatctgatgcacacagttgtggagagtctgaccaggactctctgctctagagtggaagaacaggacagagaaattaaagcctcagcccatgccatcactgggccgcctacggagttgattacttctgaagtcactgccagaagctttatggttaactggactcatgccccaggaaatgtggaaaaatacagagttgtgtattatcctaccaggggtggaaaaccagacgaggtggtggtagatggaactgtatcttccacagtgttgaaaaacttgatgtctttaactgaatatcagatagcagtctttgcaatctatgcccacactgctagtgaaggcctacggggaactgaaactacacttgctttaccgatggcttctgaccttctactgtacgacgtgactgagaacagcatgcgagtcaaatgggatgcagtgcctggggcctcaggttacctgatcctttatgctcctctaacagagggcctggctggggatgaaaaagagatgaaaattggagagacccacacagatattgaattgagtgggttgttgcccaatacagaatacacagtcacagtttatgccatgtttggagaagaggccagtgatcctgttacgggacaagaaacaacattggctttaagtccaccaagaaacctgagaatctccaatgttggctctaacagtgctcgattaacctgggacccaacttcaagacagatcaatggttatcgaattgtatataacaatgcagatgggactgaaatcaatgaggt

SEQ ID NO: 121576 - DNA, 3119 bp, Homo sapiens
  Payload ID: 3833
  Gene Symbol: COL14A1
  Gene Name: collagen, type XIV, alpha 1
  ENST ID: ENST00000537875
  CDS Start-End: 175-1779
aacatcaaatacatttaatttaaaatgaattaaaattatcatatagatatctatttctatcatttttcttcccttcttttcacaggtgttgatagatatctatttttaaacatggaaagatggtggtgcaatggccagtggctgctacaccccatgtaaaaagcggaaaataaaatgaagattttccagcgcaagatgcggtactggttgcttccaccttttttggcaattgtttatttctgcaccattgtccaaggtcaagtggctccacccacaaggttaagatataatgtaatatctcatgacagtatacagatttcatggaaggctccaagagggaaatttggtggttacaaacttcttgtgactccaacttcaggtggaaaaactaaccagctgaatctgcagaacactgcaactaaagcaattattcaaggccttatgccagaccagaattacacagttcaaattattgcatacaataaagataaagaaagcaagccagctcaaggccaattcagaattaaagatttagaaaaaagaaaggatccaaagcccagagtcaaagttgtggacagaggaaatgggagtagaccatcttcaccagaagaagtgaaatttgtctgtcaaactccagcaattgctgacattgtaatcctggtcgatggttcatggagtattggaagattcaacttcagactggttcggcatttcttggaaaacctggttacagcattcgatgtgggctcagagaagacacgaattggtcttgcacagtatagtggtgaccccagaatagaatggcacttgaatgcatttagcacaaaagatgaagtgattgaagctgtccgaaacctcccatataaaggaggaaatacactaacaggtcttgctttgaactacatttttgaaaatagcttcaaaccagaagcaggatcaaggactggagtatccaaaattggcattttaatcacagatggaaaatcccaagatgacattattccaccatctagaaatcttcgtgagtctggtgtagaactgtttgccataggggtgaaaaacgcggatgtgaatgagctgcaggagatcgcctctgaaccagacagcactcatgtgtacaatgttgccgaattcgatctgatgcacacagttgtggagagtctgaccaggactctctgctctagagtggaagaacaggacagagaaattaaagcctcagcccatgccatcactgggccgcctacggagttgattacttctgaagtcactgccagaagctttatggttaactggactcatgccccaggaaatgtggaaaaatacagagttgtgtattatcctaccaggggtggaaaaccagacgaggtggtggtagatggaactgtatcttccacagtgttgaaaaacttgatgtctttaactgaatatcagatagcagtctttgcaatctatgcccacactgctagtgaaggcctacggggaactgaaactacacttgctttaccgatggcttctgaccttctactgtacgacgtgactgagaacagcatgcgagtcaaatgggatgcagtgcctggggcctcaggttacctgatcctttatgctcctctaacagagggcctggctggggatgaaaaagagatgaaaattggagagacccacacagatattgaattgagtgggttgttgcccaatacagaatacacagtcacagtttatgccatgtttggagaagaggccagtgatcctgttacgggacaagaaacaacatcaccttaattattaagagattcactaactcctacaagatctttattgtcaaagaatcagtatgtattgaattaatgaaagaactgggctttgaggttaggaaacatcatgcttcgtggctatggctgtggctttaagtccaccaagaaacctgagaatctccaatgttggctctaacagtgctcgattaacctgggacccaacttcaagacagatcaatggttatcgaattgtatataacaatgcagatgggactgaaatcaatgaggttgaagtcgatcctattactaccttccctctgaagggcttgacacctctcacagagtatactattgctattttctccatctatgatgaaggacagtcagagcctctgactggagtttttaccaccgaggaagttccagcccagcaatacttagaaattgatgaggtgacgacagacagttttagggtgacctggcatcccctctcagctgatgaagggctacacaaattgatgtggattccagtctatggggggaagactgaggaggttgtcctgaaagaagagcaggactcacatgttattgaaggcctggagcccggtacggagtatgaagtttcactattggccgtacttgatgatggaagcgagagtgaggtggtgactgctgtcgggaccacacttgacagtttttggacagaaccagctacaaccatagtgcctaccacatctgtgacttcagttttccagacgggaatcagaaacctagttgtaggtgatgaaactacttctagcctgcgggtaaaatgggacatttctgacagcgatgtgcagcagtttagggtgacctacatgacagctcaaggggaccctgaggaagaagtcataggaacggtctgtataaattcaactgactagaaactctgcagatgttactaacacagctaataagactgtcttcggagatcaatgcaaactttactgctcttttctcagtgactctgccatctccagaaactaatgttctctgttaatctgactccactactggcttcttagtgacctttataaatccaaaacttgctccatgtacaacttgctccaagttaataacctctgaacattgtttcaaatattgcttctcttctgctgccttgcacctgttcgagcaccaaagttgggtcataaaaggccatatgcacttgtgtctgtatatatgtatgtatagacatgtataaaagtttaatatagaaaataatttcttctgcccttggaaatctgataaaaaaacttttaagcaaaggacacagaaaaggtcttctatatggtatagtgaaaatattcttaataaaataccatccgt

SEQ ID NO: 121577 - DNA, 256 bp, Homo sapiens
  Payload ID: 3834
  Gene Symbol: COL19A1
  Gene Name: collagen, type XIX, alpha 1
  ENST ID: ENST00000455415
  CDS Start-End: 1-111
ggacctcctggaatacaaggaatacaccaaactcttggtggatattataacaaggataacaagggaaatgatgaacatgaagctggaggcctgaaaggagacaaggtttaattatcatagctgtaaagatgacagattcacttccccattcaataagatgtttcactcctgtttgattctgaaattgtaatgaccttggattccatgtgaatgtgccattgtcagaaaaaaaatgcacattaaatctacaggcaga

SEQ ID NO: 121578 - DNA, 589 bp, Homo sapiens
  Payload ID: 3834
  Gene Symbol: COL19A1
  Gene Name: collagen, type XIX, alpha 1
  ENST ID: ENST00000478620
  CDS Start-End: 255-437
agtcgcggcgcgaggaagacgcggccccagcctctgccgcctccgctgtcagagtcccgaggccaccgccgagagcgcgccggcgccgcagccacagcggccgagaaccaggaggcggcgccgggcggcccagctagggcgctgcagggtcgcgaggaagtttgttggcccggaaccaagcacgccgtcgggcacgctagctccccgagagcaggcgggcgcatccgtggccgttcacatggtttcaaggcacaatgagactcactggcccttggaaactttggctttggatgtcaatatttctgcttcctgcttccacttccgtgaccgttagggacaagacaggtatccaggccaactctttgcctaatcaccaaatgttatttatagcctttaagtcattaaaacaaatcttgttaagattgaaaaggccatagattaatgtactataacagaataaattacaattcattgctttcttccattgatcttcccatgatgcacattaggaattcctaaaattacctcatttttttcatacgcatagtatattagtctatgtttcctttcatcttcaatatttacaagt

SEQ ID NO: 121579 - DNA, 6233 bp, Homo sapiens
  Payload ID: 3834
  Gene Symbol: COL19A1
  Gene Name: collagen, type XIX, alpha 1
  Uniprot ID: Q14993
  ENST ID: ENST00000620364
  CDS Start-End: 103-3531
actcctcggcggtgccgcagccctgtccggactccactgcgcctctgaggggctcaaatacgaattcaagatccgtggccgttcacatggtttcaaggcacaatgagactcactggcccttggaaactttggctttggatgtcaatatttctgcttcctgcttccacttccgtgaccgttagggacaagacagaagagtcatgccctatcctgagaatagagggacatcagctgacatatgacaacataaacaaacttgaagtttcaggttttgatctaggagacagcttttctctaagacgtgcattttgtgaaagtgataaaacctgtttcaaattgggaagtgcacttcttattagagacactattaagatatttcccaaaggccttcctgaggagtactcagtagctgccatgtttcgagtacgaagaaacgccaaaaaggaacggtggtttctgtggcaggttttaaaccagcagaatattccacagatttctatagtagttgatggtggaaagaaggtggtggaatttatgtttcaagccacagagggagatgtgttgaactacatttttagaaatcgagaactccgtcctttgtttgatcgtcagtggcacaaacttggcattagtatacaatcccaggtcatttcactttatatggattgtaatttaattgcgaggaggcagactgatgaaaaggacactgtggatttccatggacggacagttattgctacgcgagcttcagatggcaagcctgtggatattgaacttcaccaacttaaaatctactgcagtgcaaacctcatagctcaagaaacatgttgtgaaatatcagatactaagtgcccagagcaggatggctttggaaatattgcatcatcatgggtaactgctcatgccagtaaaatgtcttcatatctgccagcaaagcaggaacttaaagaccagtgccagtgcattccaaacaagggagaagcaggattaccaggagctccgggttcacctgggcagaaagggcataaaggagagccgggtgaaaatggtttacatggtgctccaggattccctggtcaaaagggagagcaaggttttgaaggcagcaaaggagaaactggtgaaaagggtgaacaaggagaaaaaggagatccagctctggctggccttaatggagaaaatggtttgaaaggtgacttgggtcctcatggtccacctggcccaaaaggagaaaagggagatacaggacccccaggaccaccagccttacctggttccctggggatacaaggcccccaaggtccacctggaaaagagggtcagaggggaagacgagggaaaacaggacctcccggaaaaccaggacccccaggaccacctggacctcctggaatacaaggaatacaccaaactcttggtggatattataacaaggataacaagggaaatgatgaacatgaagctggaggcctgaaaggagacaagggtgaaactggactaccaggatttccagggtctgttggccctaaaggacaaaaaggagaacctggagagccttttacaaaaggagaaaaaggagatagaggagaacctggggtaataggatcacagggagtaaagggtgaacctggagatcccggaccccctggtttaataggaagcccaggactaaagggtcagcaaggatctgcaggctccatgggacccagaggaccgccaggagatgttggattgccaggagaacatggtatcccaggaaaacaaggcattaaaggagaaaagggagatccgggtgggatcataggccctcccgggcttccaggtccaaaaggtgaggctggtcctccagggaaaagcctgccaggggaaccaggattagatggaaatcctggagcacctggtccacgtgggccaaagggtgaaagaggacttccaggtgttcacggttccccaggggacataggcccacaagggataggaattcctggcagaacaggcgcccaaggaccagctggagagccaggtattcagggtcctcgaggtctccctgggttgccaggaactccagggactccagggaatgatggagttccagggagagatggaaagccaggcctgccaggccccccaggtgacccgattgcacttcctctcttgggagacatcggtgctttgctcaagaatttctgtggcaactgccaagccagtgtcccagggctgaaaagcaacaaaggagaagaaggaggtgctggtgagcctggaaagtatgattccatggcccggaagggtgatatagggccacggggtcctccaggaatcccaggaagagagggaccaaagggaagcaaaggagagcggggctaccctgggatacctggggagaaaggcgatgagggtcttcaaggaattccaggcattccaggtgctccaggcccgactggaccccctggcttaatgggaagaactggacatcctggtcccacaggagcaaaaggtgaaaagggcagcgacggaccccctgggaaacccggaccacctggaccacctggtattccatttaatgaacgaaacggcatgagcagtttatataaaattaagggaggtgtgaatgttcccagttacccagggccacccggtcctcctggcccaaaaggcgatcctggcccagtgggagagcctggtgcaatggggttgccaggattagaaggatttccaggtgtaaagggagatcgaggcccagcaggtcccccaggaatagcagggatgtcgggaaaacctggtgccccagggcctccaggagttccaggggaaccgggtgagagaggacctgttggagatataggtttccctggaccagaaggaccctcaggaaagccaggaataaatggaaaagatggaataccaggtgctcagggcatcatgggtaagcctggagacagaggccccaaaggagaacgtggtgatcaggggattccaggagacagaggctcacaaggtgaacggggaaaaccaggccttacaggcatgaagggggccatcggtcctatgggtccaccaggaaacaagggctccatgggatcccctggccaccaaggccctccaggctctccaggcatccctggcattccggctgatgcagtttcatttgaagaaataaagaagtatattaatcaagaggtcctaaggatttttgaagagaggatggctgtattcctatcccagctcaagctgccagcagcaatgttggctgcccaagcttatgggagacctgggccaccagggaaggatgggttgcctgggccaccaggagaccctggaccccaaggctacagaggacagaagggagaaagaggtgaacctggaattgggctgccagggagtccaggtcttcctgggacttcagctctgggtttgccaggctcaccaggtgccccaggcccacagggccccccaggacccagtggaagatgtaacccagaagattgcctctatcctgtgtctcatgcccatcagcgcacaggtgggaattgaacacacctgaagaagacttggttcctggtaacatttccttgccactggagctctcttaataccgtcaaaccctcatcatctgtgggttgctttttttttttttttttttttttgggagtaagccaggcattaaaagcaaccgtttgaatcctattcctatagcaattgcaaatcagcattttttgatttttcccaaattcattccatatgttttgctttacaattgctatgatttttactcagagttttatatgaaatatgcaagtaaatcttatcgttagttcttcttcaaaaggaaattgcatcttgtgacttagtagactgatgatgatatccattttgtagactcatcaacatgtggttggcctttgatttctgaattttaaagtttcagacttatcttttccttggtgtttaaatttactatcattgctaaacatctcgtcaacttttttgatatagtgcattgctcctgttgaatgttttttgactactttttataacttaagaatttttataccatctacatctatcctacttatgcagaaaaataggcaataagaacttcattttacaatttatgttttcaaaaaaaaaatgcaggaaactgttttatcagggagcccaaacacccagcatagccaactactgaaatgattttgttaattctgtataatgagctcaattcaaagcaatcaccactggcatgaataagtactgcatgaaaagggagtatcaaattccagttttgtatgagttctgcaaaaaaagcctaatattctgtggtcccctcactcagtctctcatttggtaaacagaaagctgttttccctacaaggtgcttggtggtgaagccaccaagctgtctttggtactcttaaagcttcagtggcctagcaagatctttgggcccttgtatccattatccttatgacctcatcaccctcagactttaagacaagaagccaccatcaaaacaaaggatgggatacgtatagaatggactcacttgtcctagaagatgaatgtgtagtgtcagcaaatgcatgttaagaaggtgaagcccaaaagctcttaaggagaattgtatttctccagaagctgcagcaagaggtacagctcaacaaaggaaaaccacaggactggatatgcaactagtgctcagaccaaagagttcacacccactctaaaaccatgtcctctgaaaagaaacaaaaatacagtgatcatcaaatgcctaaacagtctttctgttggttagctgtacattcattgaggaactgttgattggcaggcactgattctctagaacactgggcatgaggatgttgcagaaatctagatggtgggtcccacagatgtgagaacatgctgcaagagcctgccagccacagcaatcaggactcacagctcttcaaggagcagtgcagatttcaatttggctaaaacaggatgattgcttttgtctgtttactgaaaaatgagtttagaaaggctagcccactgacattggaaaaagctgtgaacagagttgtgtctgaggaatgtgcctaatttaaggcagggtttgttccaatgcatccgtgatttgaaccggttttcattatagattaatgaactgctggtcaggtactgtctacaatggctgtgcatacctataacattttaggtatttcatattgaattatgctgtatatttcaattccaagtttatttattttccaaggttattttatttattgtaagcattttgacattgattttttttttttcgttttctttcttgtgcaatacctacaatggtgctgtgttttaaacttacacaattgggacatacgtatgtgttttcttagtaaaatggtaatttatcccgaaaaagtgtacatagatctaaaatttggtgctatgtgtatatcttgagcttttaatttgttgaattttctaaacgcttacaacttatctgccactcatattaatttacttgaatttgtcataaagctaaatattttatatgttttcaaagattattttttcatattaataggttgtttatctttttgcctgtttgctaatttaaaaatatttattttatcattttaatgttttcatggacttttttgctgatggtaatcaactttttttgttttttggtttttgagttgttcttgtcatagacataaaaagacaattcattttcttgttttattaactctgttcatttttattctacaaaatatgtcatgcattctttcttatgaattgtatatttagaaatctttctaaataccattaaggcttgactggttaattcctatttcaaggatttggatttattcaggtaatttgatgggatggggaaatataatattgtgtgatgcatattacaaagtggacttgtcacaatgacacaaactcattttttgtaactgggaaatatgactaaatttgacgtaactagagaaacaaggctgtatccacatggtacaagcctttctcaccctactctattatttaccttcagatactttttcctgcctcagctctgtacacatgatatgcaacaaagggcagcaagaaatgctgggtccacctaatttaacacaaaatgaagttgagattcggcagttgcccaattcctttaataaaaagaaactaaataatttgggccccaaagtagggtgggaagttttcctctaaatgac

SEQ ID NO: 121580 - DNA, 5496 bp, Homo sapiens
  Payload ID: 3835
  Gene Symbol: COL15A1
  Gene Name: collagen, type XV, alpha 1
  Uniprot ID: P39059
  ENST ID: ENST00000375001
  CDS Start-End: 424-4590
acaggacagacttaagggcgggagggagcccatcccgcttgccccaacgaacgcgggcgcggggctttcctcgcaggttacataaggcagccgcgggtggaggcagcagaggcgagcgcacgtccgtcgagggggaaaggggcgtggggaggcggccggggcggccggtatcccccgggcgtgagtgcgcagcgcgcgggggagcgcagggcgcggcggagtcgggtttcagagcgcgggtgactcggggcgcgggccgggagccgggattctgcccgccgccgccgctgccgagcgccgcctttgttccctgcaggaagggcgagcgcggcggccagcgctcagcgacccttcgtcctccgctaagctccaacgctctgctcgactagccgcgcgccttccggggctccgcagacccgcgagatggcaccaaggaggaacaacgggcagtgctggtgtctgctgatgctgctctcggtctccacgcccctccctgctgtcacccagacccgcggtgcgacagagactgcttcccagggtcacctggacctcacgcagctcatcggtgtcccgctgccctcgtccgtatcctttgtcacaggctatggtggcttcccggcctacagtttcgggcctggtgccaatgttggccgcccagccaggactctcatcccatccaccttcttcagggacttcgccatcagcgtcgtggtgaagcccagcagcacccgtggtggcgtgctcttcgccatcactgacgccttccagaaggtcatctacctgggcctgcggctctcaggtgtggaggacggccaccagcggatcatcctctactacacggagccaggctcccatgtgtcccaagaggctgctgccttctcggtgcctgtgatgacccacaggtggaaccgcttcgccatgattgtccagggtgaggaagtgaccctcctcgtgaactgtgaggagcacagccgcatccccttccagcggtcctcccaggctttggcttttgagtccagcgctggaatcttcatgggcaatgcaggagctacagggctcgagagattcactggctccctccagcagctcaccgtgcaccccgaccccaggactcccgaggagctgtgtgaccctgaagagtcctcggcatctggagagaccagtgggctgcaggaggcagacggagtagctgagatcttagaagccgtcacctacactcaagcctcgcccaaagaagcaaaagttgaacccataaacacacctccaactccatcctccccctttgaagacatggaactttctggtgaacctgtacccgaggggaccctggaaaccaccaacatgagcatcatccagcacagcagccccaaacaagggtctggtgagatcctgaatgacacactggagggggttcattctgtggatggtgaccccattactgacagcggctcaggggctggggccttccttgacattgctgaagaaaagaatttagcagcaacagcagcggggctggccgaggtgcccatcagcactgctggagaagcagaggccagcagtgtgcccaccgggggaccaaccctctctatgtccacggagaacccagaggaaggggtcactccaggtccagataatgaagagcgtttagcagcaacagcagcaggggaggccgaggcactcgccagcatgcctggggaagtggaggccagtggtgtggcccccggggagctggacctctccatgtccgcccagagcctcggggaagaggccactgtgggtccaagcagtgaagacagtttaacaacagctgcagctgcaaccgaagtgtccctcagtacttttgaggatgaggaagccagtggggtccccacagatggcctggctcccctcacagccaccatggcccctgagcgggcagtcacttctggtcctggtgatgaagaagacttggcagcagccacaacagaggagcccctcatcacagctgggggtgaagagtccggcagccctccccctgatgggccaccgctgcccctgcccacagtggctcctgaaagatggatcactccagctcaaagagaacatgtgggaatgaaaggacaggctgggcccaaaggagaaaagggtgatgctggggaggagcttcctggccctcctgaaccttctgggcctgttggacccacggcaggagcagaagcagagggctctggcctaggctggggctcggacgtcggctctggctctggtgacctggtgggcagtgagcagctgctgagaggtcctccaggacccccagggccacctggcttacctgggattccaggaaaaccaggaactgatgttttcatgggaccccctggatctcctggagaggatggacctgctggtgaacctgggcccccgggccctgagggacagcctggagttgatggagccaccggccttcccgggatgaaaggggagaagggagcaagagggcctaatggctcagttggtgaaaagggtgaccctggcaacagaggcttacctggacccccggggaaaaagggacaagctggccctcctggggtcatgggacccccagggcctcctggaccccctgggcccccaggccctggatgcacaatgggacttggattcgaggataccgaaggctctggaagcacccagctattgaatgaacccaaactctccagaccaacggctgcaattggtctcaaaggagagaaaggagaccggggacccaagggagaaagggggatggatggagccagtattgtgggaccccctgggccgagagggccacctgggcacatcaaggtcttgtctaattccttgatcaatatcacccatggattcatgaatttctcggacattcctgagctggtggggcctccggggccggacgggttgcctgggctgccaggatttccaggtcctagaggaccaaaaggtgacactggtttacctggctttccaggactaaaaggagaacagggcgagaagggagagccgggtgccatcctgacagaggacattcctctggaaaggctgatggggaaaaagggtgaacctggaatgcatggagccccaggaccaatggggcccaaaggaccaccaggacataaaggagaatttggccttcccgggcgacctggtcgcccaggactgaatggcctcaagggtaccaaaggagatccaggggtcattatgcagggcccacctggcttacctggccctccaggcccccctgggccacctggagctgtgattaacatcaaaggagccattttcccaatacccgtccgaccacactgcaaaatgccagttgatactgctcatcctgggagtccagagctcatcacttttcacggtgttaaaggagagaaaggatcctggggtcttcctggctcaaagggagaaaaaggcgaccagggagcccagggaccaccaggtcctccacttgatctagcttacctgagacactttctgaacaacttgaagggggagaatggagacaaggggttcaaaggtgaaaaaggagaaaaaggagacattaatggcagcttccttatgtctgggcctccaggcctgcccggaaatccaggcccggctggccaaaaaggggagacagtcgttgggccccaaggacccccaggtgctcctggtctgcctgggccacctggctttggaagacctggtgatcctgggccaccggggcccccggggccaccaggacctccagctatcctgggagcagctgtggcccttccaggtccccctggccctccaggacagccagggcttcccggatccagaaacctggtcacagcattcagcaacatggatgacatgctgcagaaagcgcatttggttatagaaggaacattcatctacctgagggacagcactgagtttttcattcgtgttagagatggctggaaaaaattacagctgggagaactgatccccattcctgccgacagccctccaccccctgcgctttccagcaacccacatcagcttctgcctccaccaaaccctatttcaagtgccaattatgagaagcctgctctgcatttggctgctctgaacatgccattttctggggacattcgagctgattttcagtgcttcaagcaggccagagctgcaggactgttgtccacctaccgagcattcttatcttcccatttgcaagatctgtccaccattgtgaggaaagcagagagatacagccttcccatagtgaacctcaagggccaagtactttttaataattgggactcaattttttctggccacggaggtcagttcaatatgcatattccaatatactcctttgatggtcgagacataatgacagatccttcttggccccagaaagtcatttggcatggctccagcccccatggcgtccgccttgtggataactactgtgaagcatggcgaaccgcggacacagcggtcacgggacttgcctccccgctgagcacggggaagattctggaccagaaagcatacagctgtgctaatcggctaattgtcctatgtatcgaaaacagtttcatgacagacgctaggaagtaatggccttctgatgattcttaaagagttttcaattttttcttatgtgaagagttgacactgaaatctaaaatgtttaattgttgtaaatattacagttttttttttttactacatattctttacaacagcaaccaaagaaaacatacctcaatacactcaaaactgaagacatagaggactcagatcaaagacaaaatctgatccatatattggtgctagattctgcaggaaaccccagcagtgtgaacgcatcccaacataggttaagagcaagttgaaaacaaaggccatggcattctgccactgcatccttcagacagttatatcctccttttaaaccattgttgttgagtgtaagatgtccttcatgttttcttataaagtcagtgtttagaaatgttaccctttctaagttatatacagatcaaatgcttttttctttcacgtacatccatcatttgcaactgctgttcgtacacagaaacaggactgctcaaatgatcctatttgtattttctgatgctatcagactctaatgtttttttccctaaaatattattgccatcatgctttaggaattttatatttttacacaatcatattttagtatggtgtctgtttatgtaactctgacttgctggaaaagttgaaactccaaataatctgaaactagaaaagaaatagcacataattactaccttccccttggcggctctcctccccaacccccaccccacaattttatgacttccatttggcaattgttgaattataactgcgactgaaacaaacaggttcatagagatgaattttctgagaaacatatatctacatgttgtataattggattttttttccatgtaagtgaacataaaaacatcttttccgggtgctttcttcatttga

SEQ ID NO: 121581 - DNA, 5422 bp, Homo sapiens
  Payload ID: 3835
  Gene Symbol: COL15A1
  Gene Name: collagen, type XV, alpha 1
  ENST ID: ENST00000610452
  CDS Start-End: 392-4516
aggttacataaggcagccgcgggtggaggcagcagaggcgagcgcacgtccgtcgagggggaaaggggcgtggggaggcggccggggcggccggtatcccccgggcgtgagtgcgcagcgcgcgggggagcgcagggcgcggcggagtcgggtttcagagcgcgggtgactcggggcgcgggccgggagccgggattctgcccgccgccgccgctgccgagcgccgcctttgttccctgcaggaagggcgagcgcggcggccagcgctcagcgacccttcgtcctccgctaagctccaacgctctgctcgactagccgcgcgccttccggggctccgcagacccgcgagatggcaccaaggaggaacaacgggcagtgctggtgtctgctgatgctgctctcggtctccacgcccctccctgctgtcacccagacccgcggtgcgacagagactgcttcccagggtcacctggacctcacgcagctcatcggtgtcccgctgccctcgtccgtatcctttgtcacaggctatggtggcttcccggcctacagtttcgggcctggtgccaatgttggccgcccagccaggactctcatcccatccaccttcttcagggacttcgccatcagcgtcgtggtgaagcccagcagcacccgtggtggcgtgctcttcgccatcactgacgccttccagaaggtcatctacctgggcctgcggctctcaggtgtggaggacggccaccagcggatcatcctctactacacggagccaggctcccatgtgtcccaagaggctgctgccttctcggtgcctgtgatgacccacaggtggaaccgcttcgccatgattgtccagggtgaggaagtgaccctcctcgtgaactgtgaggagcacagccgcatccccttccagcggtcctcccaggctttggcttttgagtccagcgctggaatcttcatgggcaatgcaggagctacagggctcgagagattcactggctccctccagcagctcaccgtgcaccccgaccccaggactcccgaggagctgtgtgaccctgaagagtcctcggcatctggagagaccagtgggctgcaggaggcagacggagtagctgagatcttagaagccgtcacctacactcaagcctcgcccaaagaagcaaaagttgaacccataaacacacctccaactccatcctccccctttgaagacatggaactttctggtgaacctgtacccgaggggaccctggaaaccaccaacatgagcatcatccagcacagcagccccaaacaaggcaaaggggccatcctgaatgacacactggagggggttcattctgtggatggtgaccccattactgacagcggctcaggggctggggccttccttgacattgctgaagaaaagaatttagcagcaacagcagcggggctggccgaggtgcccatcagcactgctggagaagcagaggccagcagtgtgcccaccgggggaccaaccctctctatgtccacggagaacccagaggaaggggtcactccaggtccagataatgaagagcgtttagcagcaacagcagcaggggaggccgaggcactcgccagcatgcctggggaagtggaggccagtggtgtggcccccggggagctggacctctccatgtccgcccagagcctcggggaagaggccactgtgggtccaagcagtgaagacagtttaacaacagctgcagctgcaaccgaagtgtccctcagtacttttgaggatgaggaagccagtggggtccccacagatggcctggctcccctcacagccaccatggcccctgagcgggcagtcacttctggtcctggtgatgaagaagacttggcagcagccacaacagaggagcccctcatcacagctgggggtgaagagtccggcagccctccccctgatgggccaccgctgcccctgcccacagtggctcctgaaagatggatcactccagctcaaagagaacatgtgggaatgaaaggacaggctgggcccaaaggagaaaagggtgatgctggggaggagcttcctggccctcctgaaccttctgggcctgttggacccacggcaggagcagaagcagagggctctggcctaggctggggctcggacgtcggctctggctctggtgacctggtgggcagtgagcagctgctgagaggtcctccaggacccccagggccacctggcttacctgggattccaggaaaaccaggaactgatgttttcatgggaccccctggatctcctggagaggatggacctgctggtgaacctgggcccccgggccctgagggacagcctggagttgatggagccaccggccttcccgggatgaaaggggagaagggagcaagagggcctaatggctcagttggtgaaaagggtgaccctggcaacagaggcttacctggacccccggggaaaaagggacaagctggccctcctggggtcatgggacccccagggcctcctggaccccctgggcccccaggccctggatgcacaatgggacttggattcgaggataccgaaggctctggaagcacccagctattgaatgaacccaaactctccagaccaacggctgcaattggtctcaaaggagagaaaggagaccggggacccaagggagaaagggggatggatggagccagtattgtgggaccccctgggccgagagggccacctgggcacatcaaggtcttgtctaattccttgatcaatatcacccatggattcatgaatttctcggacattcctgagctggtggggcctccggggccggacgggttgcctgggctgccaggatttccaggtcctagaggaccaaaaggtgacactggtttacctggctttccaggactaaaaggagaacagggcgagaagggagagccgggtgccatcctgacagaggacattcctctggaaaggctgatggggaaaaagggtgaacctggaatgcatggagccccaggaccaatggggcccaaaggaccaccaggacataaaggagaatttggccttcccgggcgacctggtcgcccaggactgaatggcctcaagggtaccaaaggagatccaggggtcattatgcagggcccacctggcttacctggccctccaggcccccctgggccacctggagctgtgattaacatcaaaggagccattttcccaatacccgtccgaccacactgcaaaatgccagttgatactgctcatcctgggagtccagagctcatcacttttcacggtgttaaaggagagaaaggatcctggggtcttcctggctcaaagggagaaaaaggcgaccagggagcccagggaccaccaggtcctccacttgatctagcttacctgagacactttctgaacaacttgaagggggagaatggagacaaggggttcaaaggtgaaaaaggagaaaaaggagacattaatggcagcttccttatgtctgggcctccaggcctgcccggaaatccaggcccggctggccaaaaaggggagacagtcgttgggccccaaggacccccaggtgctcctggtctgcctgggccacctggctttggaagacctggtgatcctgggccaccggggcccccggggccaccaggacctccagctatcctgggagcagctgtggcccttccaggtccccctggccctccaggacagccagggcttcccggatccagaaacctggtcacagcattcagcaacatggatgacatgctgcagaaagcgcatttggttatagaaggaacattcatctacctgagggacagcactgagtttttcattcgtgttagagatggctggaaaaaattacagctgggagaactgatccccattcctgccgacagccctccaccccctgcgctttccagcaacccacatcagcttctgcctccaccaaaccctatttcaagtgccaattatgagaagcctgctctgcatttggctgctctgaacatgccattttctggggacattcgagctgattttcagtgcttcaagcaggccagagctgcaggactgttgtccacctaccgagcattcttatcttcccatttgcaagatctgtccaccattgtgaggaaagcagagagatacagccttcccatagtgaacctcaagggccaagtactttttaataattgggactcaattttttctggccacggaggtcagttcaatatgcatattccaatatactcctttgatggtcgagacataatgacagatccttcttggccccagaaagtcatttggcatggctccagcccccatggcgtccgccttgtggataactactgtgaagcatggcgaaccgcggacacagcggtcacgggacttgcctccccgctgagcacggggaagattctggaccagaaagcatacagctgtgctaatcggctaattgtcctatgtatcgaaaacagtttcatgacagacgctaggaagtaatggccttctgatgattcttaaagagttttcaattttttcttatgtgaagagttgacactgaaatctaaaatgtttaattgttgtaaatattacagttttttttttttactacatattctttacaacagcaaccaaagaaaacatacctcaatacactcaaaactgaagacatagaggactcagatcaaagacaaaatctgatccatatattggtgctagattctgcaggaaaccccagcagtgtgaacgcatcccaacataggttaagagcaagttgaaaacaaaggccatggcattctgccactgcatccttcagacagttatatcctccttttaaaccattgttgttgagtgtaagatgtccttcatgttttcttataaagtcagtgtttagaaatgttaccctttctaagttatatacagatcaaatgcttttttctttcacgtacatccatcatttgcaactgctgttcgtacacagaaacaggactgctcaaatgatcctatttgtattttctgatgctatcagactctaatgtttttttccctaaaatattattgccatcatgctttaggaattttatatttttacacaatcatattttagtatggtgtctgtttatgtaactctgacttgctggaaaagttgaaactccaaataatctgaaactagaaaagaaatagcacataattactaccttccccttggcggctctcctccccaacccccaccccacaattttatgacttccatttggcaattgttgaattataactgcgactgaaacaaacaggttcatagagatgaattttctgagaaacatatatctacatgttgtataattggattttttttccatgtaagtgaacataaaaacatcttttccgggtgctttcttcatttga

SEQ ID NO: 121582 - DNA, 924 bp, Homo sapiens
  Payload ID: 3836
  Gene Symbol: COL16A1
  Gene Name: collagen, type XVI, alpha 1
  ENST ID: ENST00000373667
  CDS Start-End: 1-924
aaggtctacacccgctgcttctgcctggaggagcctcaaaacagcgaggtggatgcccagctgacgggaagaatcagccagaaggcagaaaggggagcaaaggtccatcaggagacagcagccgatgagtgtccgccctgtgtccatggtgcccgggacagcaatggagggaaaggtgagcggggcctgcctggtccaccaggctccaagggagagaagggagcacggggcaatgactgtgttcgaatctccccggatgccccacttcagtgtgcagaaggcccgaagggagagaagggggagtcaggagctctgggaccctcaggactcccaggctcaacaggcgagaagggccagaaaggcgagaagggcgacggaggcatcaagggcgtgccgggaaagccaggccgggacggccggccaggagagatctgtgtcattgggcccaaagggcagaagggagaccctggctttgttgggcctgaggggctggcaggagagcctgggccccccggcctccctggaccccctgggataggactgcctgggaccccgggggatccaggtggcccaccaggccccaagggagacaagggcagctcggggatcccaggaaaggaaggccctggtgggaaacctgggaagccaggtgtgaagggagagaagggtgacccctgtgaagtgtgcccaacactgcctgaagggttccagaactttgttggacttcctggaaagccagggcccaaaggggagcctggtgatcctgtaccagccaggggagaccctggcatccaaggcatcaaaggagagaagggggagccctgcttgtcctgcagctcggttgtaggggcccagcatcttgtgtcctccacaggggccagtggagatgtgggttcccctggctttggtctgcctggccttccg

SEQ ID NO: 121583 - DNA, 3643 bp, Homo sapiens
  Payload ID: 3836
  Gene Symbol: COL16A1
  Gene Name: collagen, type XVI, alpha 1
  ENST ID: ENST00000373668
  CDS Start-End: 518-3418
cctgactcttaaagggcccgcaggagcccccttccagggcagctctgggcacgtagggtcccgcctagctcgaggatcgctcacctggcggtgaggcaggaggggcgggcctgggagctcggccagacccggggcggggctgtgcaccccgcagtctagccgcctctggtgccgctggagccccctctaggccctcctcctcctcctccctggcgggccggtccagctgtgttccattagtgtccctggcaggcccccagccccctggaaccgcctctcttcccccacccggagtggccggcagtccccggcaggcgtgcgccgggcagcagacagccgggagagctcgagcgccaggaagctggggacccgtgaccgtcacggagagatagagaacccctagcggacctgaggaacctgggctctgcttcctccgcctgctgcctggactgctcagtgaggtggggggatccccggccaccggtgctgtggctgtagctgacctctttggaccgggatgtgggtatcctgggctcctggcctgtggctgctcggtctttgggctaccttcggccatggggcaaatacaggtgcacaatgcccaccttcacagcaggaaggactcaaattggaacacagtagtagcctgccagccaacgtgactggcttcaacctcatccaccgactcagcctcatgaagacgtctgccatcaagaagatccgcaaccccaaggggcctctcatcctgcgcctgggggcggcccccgtgacccagcccacgcgaagagtattccctcggggtctcccggaggagtttgccctggtgctgacactactgctgaagaaacacacccaccagaagacgtggtatctgtttcaagtgaccgatgcaaatgggtatccacagatatccctggaagtcaacagccaagagcggagcctggagctcagggcccagggccaggatggcgactttgtgtcctgcatcttcccagtgccccagctcttcgacttgcgttggcacaagctgatgctgagtgtggctggacgtgtggcctctgtgcacgtggactgcagctcagcctcctcccagcctctggggccccgacgacccatgaggcctgtgggccatgtatttctaggcttggatgctgagcagggcaagcctgtctcgtttgaccttcagcaggtgcacatctactgtgacccggagctcgtgctggaggagggctgctgtgagattttaccagcagggtgccccccagagacctccaaggcccgccgggacacccagagcaatgagctcattgagatcaatccacagtctgaaggcaaggtctacacccgctgcttctgcctggaggagcctcaaaacagcgaggtggatgcccagctgacgggaagaatcagccagaaggcagaaaggggagcaaaggtccatcaggagacagcagccgatgagtgtccgccctgtgtccatggtgcccgggacagcaatgtcacacttgctccctctggccccaagggagggaaaggtgagcggggcctgcctggtccaccaggctccaagggagagaagggagcacggggcaatgactgtgttcgaatctccccggatgccccacttcagtgtgcagaaggcccgaagggagagaagggggagtcaggagctctgggaccctcaggactcccaggctcaacaggcgagaagggccagaaaggcgagaagggcgacggaggcatcaagggcgtgccgggaaagccaggccgggacggccggccaggagagatctgtgtcattgggcccaaagggcagaagggagaccctggctttgttgggcctgaggggctggcaggagagcctgggccccccggcctccctggaccccctgggataggactgcctgggaccccgggggatccaggtggcccaccaggccccaagggagacaagggcagctcggggatcccaggaaaggaaggccctggtgggaaacctgggaagccaggtgtgaagggagagaagggtgacccctgtgaagtgtgcccaacactgcctgaagggttccagaactttgttggacttcctggaaagccagggcccaaaggggagcctggtgatcctgtaccagccaggggagaccctggcatccaaggcatcaaaggagagaagggggagccctgcttgtcctgcagctcggttgtaggggcccagcatcttgtgtcctccacaggggccagtggagatgtgggttcccctggctttggtctgcctggccttccgggtagagctggggttccagggctgaaaggagagaagggtaacttcggggaggcagggccagctggcagtccagggccaccaggaccagtggggccagcaggcatcaaaggggcgaagggggagccctgtgagccgtgcccagccctgtccaaccttcaggatggggatgtccgtgtggtggccttgcctggcccatccggagagaagggggaacctgggcctccaggctttggcttgccaggaaaacagggcaaggctggagagcgtggactgaaggggcagaagggtgatgctgggaatcctggagaccctggaacgccgggcaccacagggcggccaggactgtcaggagagcctggagttcagggccccgcggggccaaaaggagaaaagggtgatggctgcactgcctgccccagcctgcaggggacagtgacagacatggcaggacggcctgggcagcccggccccaaaggagagcagggccccgaaggcgtgggccgacctggtaaacccggccaacccggtctaccaggagttcaagggcccccaggactgaagggcgtgcagggagagccagggcctccaggaaggggagtccagggaccccagggggagcctggagccccgggtttgcctggcattcagggacttccgggacctcggggaccacctggccccactggagagaagggtgcccagggatctccaggggtgaaaggagccaccggacctgtgggacctcctggggccagtgtctctgggcctccgggccgtgatgggcagcaaggacagacgggactcagaggaacaccaggtgaaaaaggaccacgaggagagaagggtgagccaggggagtgctcctgcccctctcaaggagacctcatcttctctggcatgccgggtccaccaggtattcccggaccaccaggcccccctggagtacctgggctgcaggtaaagggggagaagagaatgaggagcttgggtggcagagctcatgggtcaggatggctgctcccggctggaccccaaggatgctgctcccccaccccaaaaacacagacatgccatttctcactcctctgtttacctgcctcccagggtggcaaggagggcccactgagcctctaggccaggctctgcactcccagcactgtttcaagcaatgcactgttgcgtcagctgtcaggcacccacaatctgggtcagataaaaatcccttaccctggtacagagcccggcccactgttttggagtagcattcaacactcattcatgcaacatgtgtttttgcacatttgctattttctggcactgctttaactgctgtgaatacagtagtggctaaaaataaaa

SEQ ID NO: 121584 - DNA, 5736 bp, Homo sapiens
  Payload ID: 3836
  Gene Symbol: COL16A1
  Gene Name: collagen, type XVI, alpha 1
  Uniprot ID: Q07092
  ENST ID: ENST00000373672
  CDS Start-End: 518-5332
cctgactcttaaagggcccgcaggagcccccttccagggcagctctgggcacgtagggtcccgcctagctcgaggatcgctcacctggcggtgaggcaggaggggcgggcctgggagctcggccagacccggggcggggctgtgcaccccgcagtctagccgcctctggtgccgctggagccccctctaggccctcctcctcctcctccctggcgggccggtccagctgtgttccattagtgtccctggcaggcccccagccccctggaaccgcctctcttcccccacccggagtggccggcagtccccggcaggcgtgcgccgggcagcagacagccgggagagctcgagcgccaggaagctggggacccgtgaccgtcacggagagatagagaacccctagcggacctgaggaacctgggctctgcttcctccgcctgctgcctggactgctcagtgaggtggggggatccccggccaccggtgctgtggctgtagctgacctctttggaccgggatgtgggtatcctgggctcctggcctgtggctgctcggtctttgggctaccttcggccatggggcaaatacaggtgcacaatgcccaccttcacagcaggaaggactcaaattggaacacagtagtagcctgccagccaacgtgactggcttcaacctcatccaccgactcagcctcatgaagacgtctgccatcaagaagatccgcaaccccaaggggcctctcatcctgcgcctgggggcggcccccgtgacccagcccacgcgaagagtattccctcggggtctcccggaggagtttgccctggtgctgacactactgctgaagaaacacacccaccagaagacgtggtatctgtttcaagtgaccgatgcaaatgggtatccacagatatccctggaagtcaacagccaagagcggagcctggagctcagggcccagggccaggatggcgactttgtgtcctgcatcttcccagtgccccagctcttcgacttgcgttggcacaagctgatgctgagtgtggctggacgtgtggcctctgtgcacgtggactgcagctcagcctcctcccagcctctggggccccgacgacccatgaggcctgtgggccatgtatttctaggcttggatgctgagcagggcaagcctgtctcgtttgaccttcagcaggtgcacatctactgtgacccggagctcgtgctggaggagggctgctgtgagattttaccagcagggtgccccccagagacctccaaggcccgccgggacacccagagcaatgagctcattgagatcaatccacagtctgaaggcaaggtctacacccgctgcttctgcctggaggagcctcaaaacagcgaggtggatgcccagctgacgggaagaatcagccagaaggcagaaaggggagcaaaggtccatcaggagacagcagccgatgagtgtccgccctgtgtccatggtgcccgggacagcaatgtcacacttgctccctctggccccaagggagggaaaggtgagcggggcctgcctggtccaccaggctccaagggagagaagggagcacggggcaatgactgtgttcgaatctccccggatgccccacttcagtgtgcagaaggcccgaagggagagaagggggagtcaggagctctgggaccctcaggactcccaggctcaacaggcgagaagggccagaaaggcgagaagggcgacggaggcatcaagggcgtgccgggaaagccaggccgggacggccggccaggagagatctgtgtcattgggcccaaagggcagaagggagaccctggctttgttgggcctgaggggctggcaggagagcctgggccccccggcctccctggaccccctgggataggactgcctgggaccccgggggatccaggtggcccaccaggccccaagggagacaagggcagctcggggatcccaggaaaggaaggccctggtgggaaacctgggaagccaggtgtgaagggagagaagggtgacccctgtgaagtgtgcccaacactgcctgaagggttccagaactttgttggacttcctggaaagccagggcccaaaggggagcctggtgatcctgtaccagccaggggagaccctggcatccaaggcatcaaaggagagaagggggagccctgcttgtcctgcagctcggttgtaggggcccagcatcttgtgtcctccacaggggccagtggagatgtgggttcccctggctttggtctgcctggccttccgggtagagctggggttccagggctgaaaggagagaagggtaacttcggggaggcagggccagctggcagtccagggccaccaggaccagtggggccagcaggcatcaaaggggcgaagggggagccctgtgagccgtgcccagccctgtccaaccttcaggatggggatgtccgtgtggtggccttgcctggcccatccggagagaagggggaacctgggcctccaggctttggcttgccaggaaaacagggcaaggctggagagcgtggactgaaggggcagaagggtgatgctgggaatcctggagaccctggaacgccgggcaccacagggcggccaggactgtcaggagagcctggagttcagggccccgcggggccaaaaggagaaaagggtgatggctgcactgcctgccccagcctgcaggggacagtgacagacatggcaggacggcctgggcagcccggccccaaaggagagcagggccccgaaggcgtgggccgacctggtaaacccggccaacccggtctaccaggagttcaagggcccccaggactgaagggcgtgcagggagagccagggcctccaggaaggggagtccagggaccccagggggagcctggagccccgggtttgcctggcattcagggacttccgggacctcggggaccacctggccccactggagagaagggtgcccagggatctccaggggtgaaaggagccaccggacctgtgggacctcctggggccagtgtctctgggcctccgggccgtgatgggcagcaaggacagacgggactcagaggaacaccaggtgaaaaaggaccacgaggagagaagggtgagccaggggagtgctcctgcccctctcaaggagacctcatcttctctggcatgccgggtgctccgggactttggatgggcagctcctggcagccgggcccgcagggtccaccaggtattcccggaccaccaggcccccctggagtacctgggctgcagggagtgcctggaaacaacggtttgccaggacagcctgggctcactgcagaactgggatccttaccaattgaacagcacctccttaagagtatctgcggggactgtgtccaggggcagagggcccacccagggtacctcgtggagaagggagagaagggagaccagggcatccctggtgtgccaggcctcgacaactgcgcccagtgctttttgtcactggagcgcccaagagccgaggaggcccggggtgacaacagtgagggagatcctggctgtgttgggagcccaggcctacctggtcctccgggattgccaggccagagaggagaagagggtccgcctggcatgaggggctccccgggtcctccaggccctatcggccccccaggttttcctggtgctgttggctcccccggattgcctggccttcaaggagagcgaggtctcacgggcctgactggagacaagggggagccgggtcctccagggcaaccaggttacccaggtgccacgggccccccaggactgcctggcatcaagggggagcgtggctacaccgggtcagcgggagagaaaggagagccgggccccccaggatctgaaggcctcccaggccccccaggcccagcgggtcccagaggagagcgaggaccccaaggtaactccggtgagaagggcgaccagggatttcaaggccagccaggctttccgggcccaccgggtccccctggattcccaggcaaagttggatcacctggcccacctggccctcaagcagagaagggcagcgaagggattcgaggcccatcaggcctgcctggctcccctgggccaccgggacctcctgggattcagggccccgccggtctggatggtttggatgggaaggacggcaagcctggcttgaggggggaccctggtcctgctggcccccctggactcatgggaccaccgggctttaaggggaaaacaggacatcctggcctcccaggacctaagggtgactgtggcaaaccaggtccccctggcagcactggccggcctggcgcagagggtgaacctggtgccatgggaccccagggaagacccggtcccccgggacacgttgggccaccagggcctccaggccagccaggaccagctgggatctctgcagtgggtctgaaaggagaccgaggagccaccggagaaaggggccttgcaggcctcccaggccagcccggcccccctggacaccctggccccccaggcgaacctggtacggatggtgcagctggcaaagagggaccccctggaaagcagggattctatggacctcctggtcccaagggtgatccaggagctgcaggacagaagggccaggcaggagagaaggggagagccggcatgcctggtggacctggcaagagtggttccatggggcctgttgggccaccgggccctgcaggagagagaggccaccctggagctccggggccttcggggagccctggcttgcctggtgtgcctggctccatgggagacatggtgaattatgatgaaatcaagaggttcatcagacaagagatcattaaaatgtttgatgagagaatggcttactacacctccaggatgcagttccccatggagatggcggcagctccgggacgaccagggcctccagggaaggatggtgctccgggcaggccaggtgctccagggtcacctgggctccctggtcagattggcagagaaggacggcagggcttgccaggagtaagaggattgcctggtaccaaaggtgaaaaaggggacattggtattggcattgcaggagaaaatggtcttcccggccccccaggtcctcaaggtcctccaggctatggcaagatgggtgcaacaggaccaatgggccagcaaggcatccctggcatccctgggcccccgggtcccatgggccagccaggcaaggctggccactgtaatccctctgactgctttggggccatgccgatggagcagcagtacccacccatgaaaaccatgaaggggccttttggctgaaattccccacctgcctttggatgaaagactccgttgggaataaatggccaaagcttataggactctgtgacaggttgtgaatgttttttttgttgttgttgttgtttttaattgctgttaatattttttaaataataaagaaacaaaactatctgccctttcccttccagtgggttcctctggtgctgcagccagagctccctgttgccctccttttcccgtttagtcccaggaacaaaaaagggcattttgggtacaggggcatatacctgtaatcctagctattcaaggggctgaggtgggaggatcgcctgagcccaggagtttgagaccagtctaagcaacataatgagactcagtctccgaaaaataaaaattaaaaaataaagggtatttccctcctt

SEQ ID NO: 121585 - DNA, 672 bp, Homo sapiens
  Payload ID: 3836
  Gene Symbol: COL16A1
  Gene Name: collagen, type XVI, alpha 1
  ENST ID: ENST00000440437
  CDS Start-End: 1-672
ggccccccaggatctgaaggcctcccaggccccccaggcccagcgggtcccagaggagagcgaggaccccaaggtaactccggtgagaagggcgaccagggatttcaaggccagccaggctttccgggcccaccgggtccccctggattcccaggcaaagttggatcacctggcccacctggccctcaagcagagaagggccccgccggtctggatggtttggatgggaaggacggcaagcctggcttgaggggggaccctggtcctgctggcccccctggactcatgggaccaccgggctttaaggggaaaacaggacatcctggcctcccaggacctaagggtgactgtggcaaaccaggtccccctggcagcactggccggcctggcgcagagggtgaacctggtgccatgggaccccagggaagacccggtcccccgggacacgttgggccaccagggcctccaggccagccaggaccagctgggatctctgcagtgggtctgaaaggagaccgaggagccaccggagaaaggggccttgcaggcctcccaggccagcccggcccccctggacaccctggccccccaggcgaacctggtacggatggtgcagctggcaaagagggaccccctggaaagcagggattctatggacctcctggtcccaag

SEQ ID NO: 121586 - DNA, 706 bp, Homo sapiens
  Payload ID: 3836
  Gene Symbol: COL16A1
  Gene Name: collagen, type XVI, alpha 1
  ENST ID: ENST00000458715
  CDS Start-End: 1-706
ggagagccagggcctccaggaaggggagtccagggaccccagggggagcctggagccccgggtttgcctggcattcagggacttccgggacctcggggaccacctggccccactggagagaagggtgcccagggatctccaggggtgaaaggagccaccggacctgtgggacctcctggggccagtgtctctgggcctccgggccgtgatgggcagcaaggacagacgggactcagaggaacaccaggtgaaaaaggaccacgaggagagaagggtgagccaggggagtgctcctgcccctctcaaggagacctcatcttctctggcatgccgggtccaccaggtattcccggaccaccaggcccccctggagtacctgggctgcagggagtgcctggaaacaacggtttgccaggacagcctgggctcactgcagaactgggatccttaccaattgaacagcacctccttaagagtatctgcggggactgtgtccaggggcagagggcccacccagggtacctcgtggagaagggagagaagggagaccagggcatccctggtgtgccaggcctcgacaactgcgcccagtgctttttgtcactggagcgcccaagagccgaggaggcccggggtgacaacagtgagggagatcctggctgtgttgggagcccaggcctacctggtcctccgggattgccaggcc

SEQ ID NO: 121587 - DNA, 5734 bp, Homo sapiens
  Payload ID: 3837
  Gene Symbol: COL17A1
  Gene Name: collagen, type XVII, alpha 1
  Uniprot ID: Q9UMD9
  ENST ID: ENST00000353479
  CDS Start-End: 292-4785
aaatccagcaagtgtcagataattggaagggtggagtaacgctgtaaaccatgacacacctttgtcaggacatgtttggaagcaaagagttgaaagaaacaaggtggagagaaagaaaagtgaacatttttgaaagatcactcagctttaacacaccttggctgggtctggataaaaaaaaagtgagcactgcaaatttctagaagaaaacatcaggagaagaaagagagagggggatttattcaaagttgtttccaattccttcaaaacctcaaaccaggtggctatggtatggatgtaaccaagaaaaacaaacgagatggaactgaagtcactgagagaattgtcactgaaacagtaaccacaagacttacatccttaccaccaaaaggcgggaccagcaatggctatgctaaaacagcctctcttggtggagggagccggctggagaaacaaagcctgactcatggcagcagcggctacataaactcaactggaagcacacgaggccatgcctccacctctagttacaggagggctcactcacctgcctccactctgcccaactccccaggctcaacctttgaaaggaaaactcacgttacccgccatgcgtatgaagggagctccagtggcaactcttctccggagtaccctcggaaggaatttgcatcttcttcaaccagaggacggagtcaaacacgagagagtgaaattcgagttcgactgcagagtgcgtccccatccacccgatggacagaattggatgatgttaagcgtttgctcaaggggagtcgatcggcaagtgtgagccccacccggaattcctccaacacactccccatccccaagaaaggcactgtggagaccaaaattgtgacagcgagctcccagtcggtgtcaggcacctacgatgcaacgatcctggatgccaaccttccctcccatgtgtggtcctccaccctgcccgcggggtcctccatggggacctatcacaacaacatgacaacccagagctcatccctcctcaacaccaatgcctactctgcgggatcagtcttcggagttccaaacaacatggcgtcctgctcacccactttgcaccctggactcagcacatcctcctcagtgtttggcatgcagaacaatctggcccccagcttgaccaccctgtcccatggcaccaccaccacttccacagcatatggggtgaagaaaaacatgccccagagtcctgcggctgtgaacactggcgtttccacctccgccgcctgcaccacaagtgtgcagagcgatgaccttttgcacaaggactgcaagttcctgatcctagagaaagacaacacacctgccaagaaggagatggagctgctcatcatgaccaaggacagcgggaaggtctttacagcctcccctgccagcatcgctgcaacttctttttcagaagacaccctaaaaaaagaaaagcaagctgcctacaatgctgactcaggcctaaaagccgaagctaatggagacctgaagactgtgtccacaaagggcaagaccaccactgcagatatccacagctacggcagcagtggtggtggtggcagtggaggaggtggcggtgttggtggcgctggcggcggcccttggggaccagcgccagcctggtgcccctgcggctcctgctgcagctggtggaagtggctgctgggcctgctgctcacctggctgctactcctggggctgctcttcggcctcattgctctggcggaggaggtgaggaagctgaaggcgcgtgtggatgagctggagaggatcaggaggagcatactgccctatggggacagcatggatagaatagaaaaggaccgcctccagggcatggcacccgcggcgggagcagacctggacaaaattgggctgcacagtgacagccaggaggagctctggatgttcgtgaggaagaagctaatgatggaacaggaaaatggaaatctccgaggaagccctggccctaaaggtgacatgggaagtccaggccctaaaggagatcgagggttccctgggactccaggtatccctgggcccttgggccacccaggtccacaaggaccaaagggtcaaaaaggcagcgtgggagatcctggcatggaaggccccatgggccagagagggcgagaaggccccatgggacctcgtggtgaggcagggcctcctggatctggagagaaaggggaaagaggggctgctggtgaaccaggtcctcatggcccacctggtgtcccaggttctgtgggtcccaaaggttccagcggctctcctggcccacagggccctccaggtcctgtaggtctccaagggctccgaggtgaagtaggacttcctggtgtcaaaggtgacaaaggaccaatgggaccaccaggacccaaaggtgaccagggtgagaaaggacctcgaggcctcacaggcgagcctggcatgagaggtttgcctggtgctgttggtgagcccggggctaaaggagcaatgggtcctgctggcccagacggacaccaaggcccaagaggtgaacaaggtcttactgggatgcctggaatccgtggcccaccaggaccttctggagacccaggaaagccaggtctcacaggaccccagggacctcagggacttcccggtacccctggccgaccaggaataaaaggtgaaccaggagctccaggcaagatcgtgacttcggaggggtcatcgatgctcactgtcccaggccccccaggacctcctggagccatgggacccccaggacctccaggtgccccaggccctgccggcccagctggtctcccaggacatcaagaagttcttaatttacaaggtcccccaggcccacccggcccacgcgggccaccagggccttccattccaggcccaccaggaccccgaggcccaccaggggagggtttgccaggcccaccaggcccaccaggatcgttcctgtccaactcagaaaccttcctctccggccccccaggcccacctggccccccaggtcccaagggagaccaaggtcccccaggccccagaggacaccaaggcgagcaaggcctcccaggtttctcaacctcagggtccagttctttcggactcaaccttcagggaccaccaggcccacctggcccccagggacccaaaggtgacaaaggtgatccaggtgttccaggggctcttggcattcctagtggtccttctgaagggggatcatcaagtaccatgtacgtgtcaggcccgccagggccccctgggccccctgggcctccgggctctatcagcagctctggccaggagattcagcagtacatctctgagtacatgcagagtgacagtattagatcttacctatccggagttcagggtcccccaggcccacctggtcccccaggacctgtcaccaccatcacaggcgagactttcgactactcagagctggcaagccacgttgtgagctacttacggacttcggggtacggtgtcagcttgttctcgtcctccatctcttctgaagacattctggctgtgctgcagcgggatgacgtgcgtcagtacctacgtcagtacttgatgggccctcggggtccgccagggccaccaggagccagtggagatgggtccctcctgtctttggactatgcagagctgagtagtcgcattctcagctacatgtcgagttctgggatcagcattgggcttcctggtcccccggggccccctggcttgccgggaacctcctatgaggagctcctctccttgctgcgagggtctgaattcagaggcatcgttggacccccaggtcccccgggtccaccagggatcccaggcaatgtgtggtccagcatcagcgtggaggacctctcgtcttacttacatactgccggcttgtcattcatcccaggccctccaggacctcctggtcccccagggcctcgagggcccccgggtgtctcaggagccctggcaacctatgcagctgaaaacagcgacagcttccggagcgagctgatcagctacctcacaagtcctgatgtgcgcagcttcattgttggccccccaggccctcctgggccgcagggaccccctggggacagccgcctcctgtccacggatgcctcccacagtcggggtagcagctcctcctcacacagctcatctgtcaggcggggcagctcctacagctcttccatgagcacaggaggaggtggtgcaggctccctgggtgcaggcggtgcctttggtgaagctgcaggagacaggggtccctatggcactgacatcggcccaggcggaggctatggggcagcagcagaaggcggcatgtatgctggcaatggcggactattgggagctgactttgctggagatctggattacaatgagctggctgtgagggtgtcagagagcatgcagcgtcagggcctactgcaagggatggcctacactgtccagggcccaccaggccagcctgggccacaggggccacccggcatcagcaaggtcttctctgcctacagcaacgtgactgcggacctcatggacttcttccaaacttatggagccattcaaggaccccctgggcaaaaaggagagatgggcactccaggacccaaaggtgacaggggccctgctgggccaccaggtcatcctgggccacctggccctcgaggacacaagggagaaaaaggagacaaaggtgaccaagtctatgctgggcggagaaggagaagaagtattgctgtcaagccgtgagctagccatggcaggacagctcctggaccaggtctcataatgcatgtggcacttaggtccaaggtctccagagggtgaaagctggagtctgtcaatgtcctactgagacagcacagccaacctagctagcaacatttgttttagtctgaacaatatatacttatagaattcagtcaaagatacacaatctgaaacagcttcatggggtggactctaacagtagttgcaatgttttagaatgagacttacttctctgctatctagatctgaactccttggcttctttacttagttcaagccccagcctaggaaagccagttacataaaagttggctcaggagtcttagagctttacctaaatatgagcccagaaaacggaggatgggggtggggcgccttcctggaggtgacacttgatgggggtgtgttctggttactgttctaaggctgtgccatcagctccttcctcccctgttcattctgcattctctagtcagttggctaagaagtgactcttgcaactaaaaaaattaagaaattcacttcccctctaggaggtgatgatagggtttctaatggttatatgtatatcacattcccatttgcttagaaagtctgattgtagctatgattgtccgtaggcccatactagagttcatggatatgttatactgaaccaggccagagcaaacagaaaaagaaggttgagggcaatggacaaggaaggaataaagggagaagagggaaaacagaaaacctgatgctggggacacagcatcagctcaagacgtcaccctccattctgcactcagaaaatggcacttgggggactgggcgcagttggtctttaaccacttttcaatgtctaaaaacatttgtttgtggtctataagatgaaacatcatttcaatcgtaaaatttcccattaaagaagtttttttttctaata

SEQ ID NO: 121588 - DNA, 5488 bp, Homo sapiens
  Payload ID: 3837
  Gene Symbol: COL17A1
  Gene Name: collagen, type XVII, alpha 1
  Uniprot ID: Q9UMD9
  ENST ID: ENST00000369733
  CDS Start-End: 292-4539
aaatccagcaagtgtcagataattggaagggtggagtaacgctgtaaaccatgacacacctttgtcaggacatgtttggaagcaaagagttgaaagaaacaaggtggagagaaagaaaagtgaacatttttgaaagatcactcagctttaacacaccttggctgggtctggataaaaaaaaagtgagcactgcaaatttctagaagaaaacatcaggagaagaaagagagagggggatttattcaaagttgtttccaattccttcaaaacctcaaaccaggtggctatggtatggatgtaaccaagaaaaacaaacgagatggaactgaagtcactgagagaattgtcactgaaacagtaaccacaagacttacatccttaccaccaaaaggcgggaccagcaatggctatgctaaaacagcctctcttggtggagggagccggctggagaaacaaagcctgactcatggcagcagcggctacataaactcaactggaagcacacgaggccatgcctccacctctagttacaggagggctcactcacctgcctccactctgcccaactccccaggctcaacctttgaaaggaaaactcacgttacccgccatgcgtatgaagggagctccagtggcaactcttctccggagtaccctcggaaggaatttgcatcttcttcaaccagaggacggagtcaaacacgagagagtgaaattcgagttcgactgcagagtgcgtccccatccacccgatggacagaattggatgatgttaagcgtttgctcaaggggagtcgatcggcaagtgtgagccccacccggaattcctccaacacactccccatccccaagaaaggcactgtggagaccaaaattgtgacagcgagctcccagtcggtgtcaggcacctacgatgcaacgatcctggatgccaaccttccctcccatgtgtggtcctccaccctgcccgcggggtcctccatggggacctatcacaacaacatgacaacccagagctcatccctcctcaacaccaatgcctactctgcgggatcagtcttcggagttccaaacaacatggcgtcctgctcacccactttgcaccctggactcagcacatcctcctcagtgtttggcatgcagaacaatctggcccccagcttgaccaccctgtcccatggcaccaccaccacttccacagcatatggggtgaagaaaaacatgccccagagtcctgcggctgtgaacactggcgtttccacctccgccgcctgcaccacaagtgtgcagagcgatgaccttttgcacaaggactgcaagttcctgatcctagagaaagacaacacacctgccaagaaggagatggagctgctcatcatgaccaaggacagcgggaaggtctttacagcctcccctgccagcatcgctgcaacttctttttcagaagacaccctaaaaaaagaaaagcaagctgcctacaatgctgactcaggcctaaaagccgaagctaatggagacctgaagactgtgtccacaaagggcaagaccaccactgcagatatccacagctacggcagcagtggtggtggtggcagtggaggaggtggcggtgttggtggcgctggcggcggcccttggggaccagcgccagcctggtgcccctgcggctcctgctgcagctggtggaagtggctgctgggcctgctgctcacctggctgctactcctggggctgctcttcggcctcattgctctggcggaggaggtgaggaagctgaaggcgcgtgtggatgagctggagaggatcaggaggagcatactgccctatggggacagcatggatagaatagaaaaggaccgcctccagggcatggcacccgcggcgggagcagacctggacaaaattgggctgcacagtgacagccaggaggagctctggatgttcgtgaggaagaagctaatgatggaacaggaaaatggaaatctccgaggaagccctggccctaaaggtgacatgggaagtccaggccctaaaggagatcgagggttccctgggactccaggtatccctgggcccttgggccacccaggtccacaaggaccaaagggtcaaaaaggcagcgtgggagatcctggcatggaaggccccatgggccagagagggcgagaaggccccatgggacctcgtggtgaggcagggcctcctggatctggagagaaaggggaaagaggggctgctggtgaaccaggtcctcatggcccacctggtgtcccaggttctgtgggtcccaaaggttccagcggctctcctggcccacagggccctccaggtcctgtaggtctccaagggctccgaggtgaagtaggacttcctggtgtcaaaggtgacaaaggaccaatgggaccaccaggacccaaaggtgaccagggtgagaaaggacctcgaggcctcacaggcgagcctggcatgagaggtttgcctggtgctgttggtgagcccggggctaaaggagcaatgggtcctgctggcccagacggacaccaaggcccaagaggtgaacaaggtcttactgggatgcctggaatccgtggcccaccaggaccttctggagacccaggaaagccaggtctcacaggaccccagggacctcagggacttcccggtacccctggccgaccaggaataaaaggtgaaccaggagctccaggcaagatcgtgacttcggaggggtcatcgatgctcactgtcccaggccccccaggacctcctggagccatgggacccccaggacctccaggtgccccaggccctgccggcccagctggtctcccaggacatcaagaagttcttaatttacaaggtcccccaggcccacccggcccacgcgggccaccagggccttccattccaggcccaccaggaccccgaggcccaccaggggagggtttgccaggcccaccaggcccaccaggatcgttcctgtccaactcagaaaccttcctctccggccccccaggcccacctggccccccaggtcccaagggagaccaaggtgatccaggtgttccaggggctcttggcattcctagtggtccttctgaagggggatcatcaagtaccatgtacgtgtcaggcccgccagggccccctgggccccctgggcctccgggctctatcagcagctctggccaggagattcagcagtacatctctgagtacatgcagagtgacagtattagatcttacctatccggagttcagggtcccccaggcccacctggtcccccaggacctgtcaccaccatcacaggcgagactttcgactactcagagctggcaagccacgttgtgagctacttacggacttcggggtacggtgtcagcttgttctcgtcctccatctcttctgaagacattctggctgtgctgcagcgggatgacgtgcgtcagtacctacgtcagtacttgatgggccctcggggtccgccagggccaccaggagccagtggagatgggtccctcctgtctttggactatgcagagctgagtagtcgcattctcagctacatgtcgagttctgggatcagcattgggcttcctggtcccccggggccccctggcttgccgggaacctcctatgaggagctcctctccttgctgcgagctgccggcttgtcattcatcccaggccctccaggacctcctggtcccccagggcctcgagggcccccgggtgtctcaggagccctggcaacctatgcagctgaaaacagcgacagcttccggagcgagctgatcagctacctcacaagtcctgatgtgcgcagcttcattgttggccccccaggccctcctgggccgcagggaccccctggggacagccgcctcctgtccacggatgcctcccacagtcggggtagcagctcctcctcacacagctcatctgtcaggcggggcagctcctacagctcttccatgagcacaggaggaggtggtgcaggctccctgggtgcaggcggtgcctttggtgaagctgcaggagacaggggtccctatggcactgacatcggcccaggcggaggctatggggcagcagcagaaggcggcatgtatgctggcaatggcggactattgggagctgactttgctggagatctggattacaatgagctggctgtgagggtgtcagagagcatgcagcgtcagggcctactgcaagggatggcctacactgtccagggcccaccaggccagcctgggccacaggggccacccggcatcagcaaggtcttctctgcctacagcaacgtgactgcggacctcatggacttcttccaaacttatggagccattcaaggaccccctgggcaaaaaggagagatgggcactccaggacccaaaggtgacaggggccctgctgggccaccaggtcatcctgggccacctggccctcgaggacacaagggagaaaaaggagacaaaggtgaccaagtctatgctgggcggagaaggagaagaagtattgctgtcaagccgtgagctagccatggcaggacagctcctggaccaggtctcataatgcatgtggcacttaggtccaaggtctccagagggtgaaagctggagtctgtcaatgtcctactgagacagcacagccaacctagctagcaacatttgttttagtctgaacaatatatacttatagaattcagtcaaagatacacaatctgaaacagcttcatggggtggactctaacagtagttgcaatgttttagaatgagacttacttctctgctatctagatctgaactccttggcttctttacttagttcaagccccagcctaggaaagccagttacataaaagttggctcaggagtcttagagctttacctaaatatgagcccagaaaacggaggatgggggtggggcgccttcctggaggtgacacttgatgggggtgtgttctggttactgttctaaggctgtgccatcagctccttcctcccctgttcattctgcattctctagtcagttggctaagaagtgactcttgcaactaaaaaaattaagaaattcacttcccctctaggaggtgatgatagggtttctaatggttatatgtatatcacattcccatttgcttagaaagtctgattgtagctatgattgtccgtaggcccatactagagttcatggatatgttatactgaaccaggccagagcaaacagaaaaagaaggttgagggcaatggacaaggaaggaataaagggagaagagggaaaacagaaaacctgatgctggggacacagcatcagctcaagacgtcaccctccattctgcactcagaaaatggcacttgggggactgggcgcagttggtctttaaccacttttcaatgtctaaaaacatttgtttgtggtctataagatgaaacatcatttcaatcgtaaaatttcccattaaagaagtttttttttctaata

SEQ ID NO: 121589 - DNA, 1610 bp, Homo sapiens
  Payload ID: 3837
  Gene Symbol: COL17A1
  Gene Name: collagen, type XVII, alpha 1
  ENST ID: ENST00000393211
  CDS Start-End: 68-1321
agagagagggggatttattcaaagttgtttccaattccttcaaaacctcaaaccaggtggctatggtatggatgtaaccaagaaaaacaaacgagatggaactgaagtcactgagagaattgtcactgaaacagtaaccacaagacttacatccttaccaccaaaaggcgggaccagcaatggctatgctaaaacagcctctcttggtggagggagccggctggagaaacaaagcctgactcatggcagcagcggctacataaactcaactggaagcacacgaggccatgcctccacctctagttacaggagggctcactcacctgcctccactctgcccaactccccaggctcaacctttgaaaggaaaactcacgttacccgccatgcgtatgaagggagctccagtggcaactcttctccggagtaccctcggaaggaatttgcatcttcttcaaccagaggacggagtcaaacacgagagagtgaaattcgagttcgactgcagagtgcgtccccatccacccgatggacagaattggatgatgttaagcgtttgctcaaggggagtcgatcggcaagtgtgagccccacccggaattcctccaacacactccccatccccaagaaaggcactgtggagaccaaaattgtgacagcgagctcccagtcggtgtcaggcacctacgatgcaacgatcctggatgccaaccttccctcccatgtgtggtcctccaccctgcccgcggggtcctccatggggacctatcacaacaacatgacaacccagagctcatccctcctcaacaccaatgcctactctgcgggatcagtcttcggagttccaaacaacatggcgtcctgctcacccactttgcaccctggactcagcacatcctcctcagtgtttggcatgcagaacaatctggcccccagcttgaccaccctgtcccatggcaccaccaccacttccacagcatatggggtgaagaaaaacatgccccagagtcctgcggctgtgaacactggcgtttccacctccgccgcctgcaccacaagtgtgcagagcgatgaccttttgcacaaggactgcaagttcctgatcctagagaaagacaacacacctgccaagaaggagatggagctgctcatcatgaccaaggacagcgggaaggtctttacagcctcccctgccagcatcgctgcaacttctttttcagaagacaccctaaaaaaagaaaagcaagctgcctacaatgctgactcaggcctaaaagccgaagctaatggtaagaacaaatatgattgttgtccaccttgacttcagccaggccacatttcatttcattgtcttcggagaccttgctactcaaagtgtggtccacgggccagcagcatcagccacacctgggagtgtgttataaaagcaggatcccagccctagctcagatctgctgagtcagaagctgcagttcaacaagcttcctaggtgatttgcatttgcattactgaagcaaaagcctgcctctgccatgtctacgaaggcatttgttttctcattttactttttctccataatcttcagaactaatagaaaaatgctttgcaaa

SEQ ID NO: 121590 - DNA, 537 bp, Homo sapiens
  Payload ID: 3837
  Gene Symbol: COL17A1
  Gene Name: collagen, type XVII, alpha 1
  ENST ID: ENST00000433822
  CDS Start-End: 1-200
cttatggagccattcaaggaccccctgggcaaaaaggagagatgggcactccaggacccaaaggtgacaggggccctgctgggccaccaggtcatcctgggccacctggccctcgaggacacaagggagaaaaaggagacaaaggtgaccaagtctatgctgggcggagaaggagaagaagtattgctgtcaagccgtgagctagccatggcaggacagctcctggaccaggcccatactagagttcatggatatgttatactgaaccaggccagagcaaacagaaaaagaaggttgagggcaatggacaaggaaggaataaagggagaagagggaaaacagaaaacctgatgctggggacacagcatcagctcaagacgtcaccctccattctgcactcagaaaatggcacttgggggactgggcgcagttggtctttaaccacttttcaatgtctaaaaacatttgtttgtggtctataagatgaaacatcatttcaatcgtaaaatttcccattaaagaagtttttttttctaa

SEQ ID NO: 121591 - DNA, 3386 bp, Homo sapiens
  Payload ID: 3838
  Gene Symbol: COL18A1
  Gene Name: collagen, type XVIII, alpha 1
  ENST ID: ENST00000342220
  CDS Start-End: 1-2064
ggagaagttggagcagatggagtccccgggttccccggcctccctggcagagagggcattgctgggccccaggggccaaagggagacagaggcagccggggagaaaagggagatccagggaaggacggagtcgggcagccgggcctccctggcccccccggacccccgggacctgtggtctacgtgtcggagcaggacggatccgtcctgagcgtgccgggacctgagggccggccgggtttcgcaggctttcccggacctgcaggacccaagggcaacctgggctctaagggcgaacgaggctccccgggacccaagggtgagaagggtgaaccgggcagcatcttcagccccgacggcggtgccctgggccctgcccagaaaggagccaagggagagccgggcttccgaggacccccgggtccatacggacggccggggtacaagggagagattggctttcctggacggccgggtcgccccgggatgaacggattgaaaggagagaaaggggagccgggagatgccagccttggatttggcatgaggggaatgcccggccccccaggacctccagggcccccaggccctccagggactcctgtttacgacagcaatgtgtttgctgagtccagccgccccgggcctccaggattgccagggaatcagggccctccaggacccaagggcgccaaaggagaagtgggcccccccggaccaccagggcagtttccgtttgactttcttcagttggaggctgaaatgaagggggagaagggagaccgaggtgatgcaggacagaaaggcgaaaggggggagcccgggggcggcggtttcttcggctccagcctgcccggcccccccggccccccaggccccccaggcccacgtggctaccctgggattccaggtcccaagggagagagcatccggggccagcccggcccacctggacctcagggaccccccggcatcggctacgaggggcgccagggccctcccggccccccaggccccccagggcccccttcatttcctggccctcacaggcagactatcagcgttcccggccctccgggcccccctgggccccctgggccccctggaaccatgggcgcctcctcagggcaggtgaggctctgggctacacgccaggccatgctgggccaggtgcacgaggttcccgagggctggctcatcttcgtggccgagcaggaggagctctacgtccgcgtgcagaacgggttccggaaggtccagctggaggcccggacaccactcccacgagggacggacaatgaagtggccgccttgcagccccccgtggtgcagctgcacgacagcaacccctacccgcggcgggagcacccccaccccaccgcgcggccctggcgggcagatgacatcctggccagcccccctcgcctgcccgagccccagccctaccccggagccccgcaccacagctcctacgtgcacctgcggccggcgcgacccacaagcccacccgcccacagccaccgcgacttccagccggtgctccacctggttgcgctcaacagccccctgtcaggcggcatgcggggcatccgcggggccgacttccagtgcttccagcaggcgcgggccgtggggctggcgggcaccttccgcgccttcctgtcctcgcgcctgcaggacctgtacagcatcgtgcgccgtgccgaccgcgcagccgtgcccatcgtcaacctcaaggacgagctgctgtttcccagctgggaggctctgttctcaggctctgagggtccgctgaagcccggggcacgcatcttctcctttgacggcaaggacgtcctgaggcaccccacctggccccagaagagcgtgtggcatggctcggaccccaacgggcgcaggctgaccgagagctactgtgagacgtggcggacggaggctccctcggccacgggccaggcctcctcgctgctggggggcaggctcctggggcagagtgccgcgagctgccatcacgcctacatcgtgctctgcattgagaacagcttcatgactgcctccaagtagccaccgcctggatgcggatggccggagaggaccggcggctcggaggaagcccccaccgtgggcagggagcggccggccagcccctggccccaggacctggctgccatactttcctgtatagttcacgtttcatgtaatcctcaagaaataaaaggaagccaaagagtgtatttttttaaaagtttaaaacagaagcctgatgctgacattcacctgccccaactctcccctgacctgtgagcccagctgggtcaggcagggtgcagtatcatgccctgtgcaacctcttggcctgatcagaccacggctcgatttctccaggatttcctgctttgggaagccgtgctcgccccagcaggtgctgacttcatctcccacctagcagcaccgttctgtgcacaaaacccagacctgttagcagacaggccccgtgaggcaatgggagctgaggccacactcagcacaaggccatctgggctcctccagggtgtgtgctcgccctgcggtagatgggagggaggctcaggtccctggggctagggggagccccttctgctcagctctgggccattctccacagcaaccccaggctgaagcaggttcccaagctcagaggcgcactgtgacccccagctccggcctgtcctccaacaccaagcacagcagcctggggctggcctcccaaatgagccatgagatgatacatccaaagcagacagctccaccctggccgagtccaagctgggagattcaagggacccatgagttggggtctggcagcctcccatccagggcccccatctcatgcccctggctgggacgtggctcagccagcacttgtccagctgagcgccaggatggaacacggccacatcaaagaggctgaggctggcacaggacatgcggtagccagcacacagggcagtgagggagggctgtcatctgtgcactgcccatggacaggctggctccagatgcagggcagtcattggctgtctcctaggaaacccatatccttaccctccttgggactgaaggggaaccccggggtgcccacaggccgccctgcgggtgaacaaagcagccacgaggtgcaacaaggtcctctgtcagtcacagccacccctgagatccggcaacatcaacccgagtcattcgttctgtggagggacaagtggactcagggcagcgccaggctgaccacagcacagccaacacgcacctgcctcaggactgcgacgaaaccggtggggctggttctgtaattgtgtgtgatgtgaagccaattcagacaggcaaataaaagtgaccttttacactga

SEQ ID NO: 121592 - DNA, 5924 bp, Homo sapiens
  Payload ID: 3838
  Gene Symbol: COL18A1
  Gene Name: collagen, type XVIII, alpha 1
  Uniprot ID: P39060
  ENST ID: ENST00000355480
  CDS Start-End: 43-4602
agaggccctcccgccgcccgcagctccagccgcactgccccgatggctccctacccctgtggctgccacatcctgctgctgctcttctgctgcctggcggctgcccgggccaacctgctgaacctgaactggctttggttcaataatgaggacaccagccatgcagctaccacgatccctgagccccaggggcccctgcctgtgcagcccacagcagataccaccacacacgtgaccccccggaatggttccacagagccagcgacagcccctggcagccctgagccaccctcagagctgctggaagatggccaggacacccccacttctgccgagagcccggacgcgccagaggagaacattgccggtgtcggagccgagatcctgaacgtggccaaaggcatccggagcttcgtccagctgtggaatgacactgtccccactgagagcttggccagggcggaaaccctggtcctggagactcctgtgggcccccttgccctcgctgggccttccagcaccccccaggagaatgggaccactctctggcccagccgtggcattcctagctctccgggcgcccacacaaccgaggctggcaccttgcctgcacccaccccatcgcctccctccctgggcaggccctgggcaccactcacggggccctcagtgccaccaccatcttcagagcgcatcagcgaggaggtggggctgctgcagctccttggggaccccccgccccagcaggtcacccagacggatgaccccgacgtcgggctggcctacgtctttgggccagatgccaacagtggccaagtggcccggtaccacttccccagcctcttcttccgtgacttctcactgctgttccacatccggccagccacagagggcccaggggtgctgttcgccatcacggactcggcgcaggccatggtcttgctgggcgtgaagctctctggggtgcaggacgggcaccaggacatctccctgctctacacagaaccaggtgcaggccagacccacacagccgccagcttccggctccccgccttcgtcggccagtggacacacttagccctcagtgtggcaggtggctttgtggccctctacgtggactgtgaggagttccagagaatgccgcttgctcggtcctcacggggcctggagctggagcctggcgccgggctcttcgtggctcaggcggggggagcggaccctgacaagttccagggggtgatcgctgagctgaaggtgcgcagggacccccaggtgagccccatgcactgcctggacgaggaaggcgatgactcagatggggcatccggagactctggcagcgggctcggggacgcccgggagcttctcagggaggagacgggcgcggccctaaaacccaggctccccgcgccaccccccgtcaccacgccacccttggctggaggcagcagcacggaagattccagaagtgaagaagtcgaggagcagaccacggtggcttcgttaggagctcagacacttcctggctcagattctgtctccacgtgggacgggagtgtccggacccctgggggccgcgtgaaagagggcggcctgaaggggcagaaaggggagccaggtgttccgggcccacctggccgggcaggccccccaggatccccatgcctacctggtcccccgggtctcccgtgcccagtgagtcccctgggtcctgcaggcccagcgttgcaaactgtccccggaccacaaggacccccagggcctccggggagggacggcacccctggaagggacggcgagccgggcgaccccggtgaagacggaaagccgggcgacaccgggccacaaggcttccccgggactccaggggacgtaggtcccaagggcgacaagggagaccctggggttggagagagagggcccccaggaccccaagggcctccagggcccccaggaccctccttcagacacgacaagctgaccttcattgacatggagggatctggcttcgggggcgatctggaggccctgcggggtcctcgaggcttccctggacctcccggaccccccggtgtcccaggcctgcccggcgagccaggccgctttggggtgaacagctccgacgtcccaggacccgccggccttcctggtgtgcctgggcgcgagggtccccccgggtttcctggcctcccgggacccccaggccctccgggaagagaggggcccccaggaaggactgggcagaaaggcagcctgggtgaagcaggcgccccaggacataaggggagcaagggagcccccggtcctgctggtgctcgtggggagagcggcctggcaggagcccccggacctgctggaccaccaggcccccctgggccccctgggcccccaggaccaggactccccgctggatttgatgacatggaaggctccggggggcccttctggtcaacagcccgaagcgctgatgggccacagggacctcccggcctgccgggacttaagggggatcctggcgtgcctgggctgccgggggcgaagggagaagttggagcagatggagtccccgggttccccggcctccctggcagagagggcattgctgggccccaggggccaaagggagacagaggcagccggggagaaaagggagatccagggaaggacggagtcgggcagccgggcctccctggcccccccggacccccgggacctgtggtctacgtgtcggagcaggacggatccgtcctgagcgtgccgggacctgagggccggccgggtttcgcaggctttcccggacctgcaggacccaagggcaacctgggctctaagggcgaacgaggctccccgggacccaagggtgagaagggtgaaccgggcagcatcttcagccccgacggcggtgccctgggccctgcccagaaaggagccaagggagagccgggcttccgaggacccccgggtccatacggacggccggggtacaagggagagattggctttcctggacggccgggtcgccccgggatgaacggattgaaaggagagaaaggggagccgggagatgccagccttggatttggcatgaggggaatgcccggccccccaggacctccagggcccccaggccctccagggactcctgtttacgacagcaatgtgtttgctgagtccagccgccccgggcctccaggattgccagggaatcagggccctccaggacccaagggcgccaaaggagaagtgggcccccccggaccaccagggcagtttccgtttgactttcttcagttggaggctgaaatgaagggggagaagggagaccgaggtgatgcaggacagaaaggcgaaaggggggagcccgggggcggcggtttcttcggctccagcctgcccggcccccccggccccccaggccccccaggcccacgtggctaccctgggattccaggtcccaagggagagagcatccggggccagcccggcccacctggacctcagggaccccccggcatcggctacgaggggcgccagggccctcccggccccccaggccccccagggcccccttcatttcctggccctcacaggcagactatcagcgttcccggccctccgggcccccctgggccccctgggccccctggaaccatgggcgcctcctcaggggtgaggctctgggctacacgccaggccatgctgggccaggtgcacgaggttcccgagggctggctcatcttcgtggccgagcaggaggagctctacgtccgcgtgcagaacgggttccggaaggtccagctggaggcccggacaccactcccacgagggacggacaatgaagtggccgccttgcagccccccgtggtgcagctgcacgacagcaacccctacccgcggcgggagcacccccaccccaccgcgcggccctggcgggcagatgacatcctggccagcccccctcgcctgcccgagccccagccctaccccggagccccgcaccacagctcctacgtgcacctgcggccggcgcgacccacaagcccacccgcccacagccaccgcgacttccagccggtgctccacctggttgcgctcaacagccccctgtcaggcggcatgcggggcatccgcggggccgacttccagtgcttccagcaggcgcgggccgtggggctggcgggcaccttccgcgccttcctgtcctcgcgcctgcaggacctgtacagcatcgtgcgccgtgccgaccgcgcagccgtgcccatcgtcaacctcaaggacgagctgctgtttcccagctgggaggctctgttctcaggctctgagggtccgctgaagcccggggcacgcatcttctcctttgacggcaaggacgtcctgaggcaccccacctggccccagaagagcgtgtggcatggctcggaccccaacgggcgcaggctgaccgagagctactgtgagacgtggcggacggaggctccctcggccacgggccaggcctcctcgctgctggggggcaggctcctggggcagagtgccgcgagctgccatcacgcctacatcgtgctctgcattgagaacagcttcatgactgcctccaagtagccaccgcctggatgcggatggccggagaggaccggcggctcggaggaagcccccaccgtgggcagggagcggccggccagcccctggccccaggacctggctgccatactttcctgtatagttcacgtttcatgtaatcctcaagaaataaaaggaagccaaagagtgtatttttttaaaagtttaaaacagaagcctgatgctgacattcacctgccccaactctcccctgacctgtgagcccagctgggtcaggcagggtgcagtatcatgccctgtgcaacctcttggcctgatcagaccacggctcgatttctccaggatttcctgctttgggaagccgtgctcgccccagcaggtgctgacttcatctcccacctagcagcaccgttctgtgcacaaaacccagacctgttagcagacaggccccgtgaggcaatgggagctgaggccacactcagcacaaggccatctgggctcctccagggtgtgtgctcgccctgcggtagatgggagggaggctcaggtccctggggctagggggagccccttctgctcagctctgggccattctccacagcaaccccaggctgaagcaggttcccaagctcagaggcgcactgtgacccccagctccggcctgtcctccaacaccaagcacagcagcctggggctggcctcccaaatgagccatgagatgatacatccaaagcagacagctccaccctggccgagtccaagctgggagattcaagggacccatgagttggggtctggcagcctcccatccagggcccccatctcatgcccctggctgggacgtggctcagccagcacttgtccagctgagcgccaggatggaacacggccacatcaaagaggctgaggctggcacaggacatgcggtagccagcacacagggcagtgagggagggctgtcatctgtgcactgcccatggacaggctggctccagatgcagggcagtcattggctgtctcctaggaaacccatatccttaccctccttgggactgaaggggaaccccggggtgcccacaggccgccctgcgggtgaacaaagcagccacgaggtgcaacaaggtcctctgtcagtcacagccacccctgagatccggcaacatcaacccgagtcattcgttctgtggagggacaagtggactcagggcagcgccaggctgaccacagcacagccaacacgcacctgcctcaggactgcgacgaaaccggtggggctggttctgtaattgtgtgtgatgtgaagccaattcagacaggcaaataaaagtgaccttttacactga

SEQ ID NO: 121593 - DNA, 6586 bp, Homo sapiens
  Payload ID: 3838
  Gene Symbol: COL18A1
  Gene Name: collagen, type XVIII, alpha 1
  Uniprot ID: P39060
  ENST ID: ENST00000359759
  CDS Start-End: 1-5265
atggctccctacccctgtggctgccacatcctgctgctgctcttctgctgcctggcggctgcccgggccaacctgctgaacctgaactggctttggttcaataatgaggacaccagccatgcagctaccacgatccctgagccccaggggcccctgcctgtgcagcccacagcagataccaccacacacgtgaccccccggaatggttccacagagccagcgacagcccctggcagccctgagccaccctcagagctgctggaagatggccaggacacccccacttctgccgagagcccggacgcgccagaggagaacattgccggtgtcggagccgagatcctgaacgtggccaaaggcatccggagcttcgtccagctgtggaatgacactgtccccactgagagcttggccagggcggaaaccctggtcctggagactcctgtgggcccccttgccctcgctgggccttccagcaccccccaggagaatgggaccactctctggcccagccgtggcattcctagctctccgggcgcccacacaaccgaggctggcaccttgcctgcacccaccccatcgcctccctccctgggcaggccctgggcaccactcacggggccctcagtgccaccaccatcttcaggtagagcttctctctcctccttgctgggcggggcccctccctggggaagcctgcaggacccagacagccaaggactctcgcccgccgcagccgctcccagccagcagctccaacgccctgacgtccgcctgcgcacgccacttctgcaccccctggtgatgggctccctgggcaagcacgcggccccctccgccttctcctctgggctcccgggcgcactgtctcaggtcgcagtcaccactttaaccagggacagcggtgcttgggtctcccacgtggctaactctgtggggccgggtcttgctaataactctgccctgctcggggctgaccccgaggcccccgccggtcgctgcctgcccctgccaccctccctgccagtctgcggccacctgggcatctcacgcttctggctgcccaaccacctccaccacgagagcggcgagcaggtgcgggccggggcacgggcgtgggggggcctgctgcagacgcactgccaccccttcctcgcctggttcttctgcctgctgctggtccccccatgcggcagcgtcccgccgcccgccccgccaccctgctgccagttctgcgaggccctgcaggatgcgtgttggagccgcctgggcgggggccggctgcccgtcgcctgtgcctcgctcccgacccaggaggatgggtactgtgtgctcattgggccggctgcagagcgcatcagcgaggaggtggggctgctgcagctccttggggaccccccgccccagcaggtcacccagacggatgaccccgacgtcgggctggcctacgtctttgggccagatgccaacagtggccaagtggcccggtaccacttccccagcctcttcttccgtgacttctcactgctgttccacatccggccagccacagagggcccaggggtgctgttcgccatcacggactcggcgcaggccatggtcttgctgggcgtgaagctctctggggtgcaggacgggcaccaggacatctccctgctctacacagaaccaggtgcaggccagacccacacagccgccagcttccggctccccgccttcgtcggccagtggacacacttagccctcagtgtggcaggtggctttgtggccctctacgtggactgtgaggagttccagagaatgccgcttgctcggtcctcacggggcctggagctggagcctggcgccgggctcttcgtggctcaggcggggggagcggaccctgacaagttccagggggtgatcgctgagctgaaggtgcgcagggacccccaggtgagccccatgcactgcctggacgaggaaggcgatgactcagatggggcatccggagactctggcagcgggctcggggacgcccgggagcttctcagggaggagacgggcgcggccctaaaacccaggctccccgcgccaccccccgtcaccacgccacccttggctggaggcagcagcacggaagattccagaagtgaagaagtcgaggagcagaccacggtggcttcgttaggagctcagacacttcctggctcagattctgtctccacgtgggacgggagtgtccggacccctgggggccgcgtgaaagagggcggcctgaaggggcagaaaggggagccaggtgttccgggcccacctggccgggcaggccccccaggatccccatgcctacctggtcccccgggtctcccgtgcccagtgagtcccctgggtcctgcaggcccagcgttgcaaactgtccccggaccacaaggacccccagggcctccggggagggacggcacccctggaagggacggcgagccgggcgaccccggtgaagacggaaagccgggcgacaccgggccacaaggcttccccgggactccaggggacgtaggtcccaagggcgacaagggagaccctggggttggagagagagggcccccaggaccccaagggcctccagggcccccaggaccctccttcagacacgacaagctgaccttcattgacatggagggatctggcttcgggggcgatctggaggccctgcggggtcctcgaggcttccctggacctcccggaccccccggtgtcccaggcctgcccggcgagccaggccgctttggggtgaacagctccgacgtcccaggacccgccggccttcctggtgtgcctgggcgcgagggtccccccgggtttcctggcctcccgggacccccaggccctccgggaagagaggggcccccaggaaggactgggcagaaaggcagcctgggtgaagcaggcgccccaggacataaggggagcaagggagcccccggtcctgctggtgctcgtggggagagcggcctggcaggagcccccggacctgctggaccaccaggcccccctgggccccctgggcccccaggaccaggactccccgctggatttgatgacatggaaggctccggggggcccttctggtcaacagcccgaagcgctgatgggccacagggacctcccggcctgccgggacttaagggggatcctggcgtgcctgggctgccgggggcgaagggagaagttggagcagatggagtccccgggttccccggcctccctggcagagagggcattgctgggccccaggggccaaagggagacagaggcagccggggagaaaagggagatccagggaaggacggagtcgggcagccgggcctccctggcccccccggacccccgggacctgtggtctacgtgtcggagcaggacggatccgtcctgagcgtgccgggacctgagggccggccgggtttcgcaggctttcccggacctgcaggacccaagggcaacctgggctctaagggcgaacgaggctccccgggacccaagggtgagaagggtgaaccgggcagcatcttcagccccgacggcggtgccctgggccctgcccagaaaggagccaagggagagccgggcttccgaggacccccgggtccatacggacggccggggtacaagggagagattggctttcctggacggccgggtcgccccgggatgaacggattgaaaggagagaaaggggagccgggagatgccagccttggatttggcatgaggggaatgcccggccccccaggacctccagggcccccaggccctccagggactcctgtttacgacagcaatgtgtttgctgagtccagccgccccgggcctccaggattgccagggaatcagggccctccaggacccaagggcgccaaaggagaagtgggcccccccggaccaccagggcagtttccgtttgactttcttcagttggaggctgaaatgaagggggagaagggagaccgaggtgatgcaggacagaaaggcgaaaggggggagcccgggggcggcggtttcttcggctccagcctgcccggcccccccggccccccaggccccccaggcccacgtggctaccctgggattccaggtcccaagggagagagcatccggggccagcccggcccacctggacctcagggaccccccggcatcggctacgaggggcgccagggccctcccggccccccaggccccccagggcccccttcatttcctggccctcacaggcagactatcagcgttcccggccctccgggcccccctgggccccctgggccccctggaaccatgggcgcctcctcaggggtgaggctctgggctacacgccaggccatgctgggccaggtgcacgaggttcccgagggctggctcatcttcgtggccgagcaggaggagctctacgtccgcgtgcagaacgggttccggaaggtccagctggaggcccggacaccactcccacgagggacggacaatgaagtggccgccttgcagccccccgtggtgcagctgcacgacagcaacccctacccgcggcgggagcacccccaccccaccgcgcggccctggcgggcagatgacatcctggccagcccccctcgcctgcccgagccccagccctaccccggagccccgcaccacagctcctacgtgcacctgcggccggcgcgacccacaagcccacccgcccacagccaccgcgacttccagccggtgctccacctggttgcgctcaacagccccctgtcaggcggcatgcggggcatccgcggggccgacttccagtgcttccagcaggcgcgggccgtggggctggcgggcaccttccgcgccttcctgtcctcgcgcctgcaggacctgtacagcatcgtgcgccgtgccgaccgcgcagccgtgcccatcgtcaacctcaaggacgagctgctgtttcccagctgggaggctctgttctcaggctctgagggtccgctgaagcccggggcacgcatcttctcctttgacggcaaggacgtcctgaggcaccccacctggccccagaagagcgtgtggcatggctcggaccccaacgggcgcaggctgaccgagagctactgtgagacgtggcggacggaggctccctcggccacgggccaggcctcctcgctgctggggggcaggctcctggggcagagtgccgcgagctgccatcacgcctacatcgtgctctgcattgagaacagcttcatgactgcctccaagtagccaccgcctggatgcggatggccggagaggaccggcggctcggaggaagcccccaccgtgggcagggagcggccggccagcccctggccccaggacctggctgccatactttcctgtatagttcacgtttcatgtaatcctcaagaaataaaaggaagccaaagagtgtatttttttaaaagtttaaaacagaagcctgatgctgacattcacctgccccaactctcccctgacctgtgagcccagctgggtcaggcagggtgcagtatcatgccctgtgcaacctcttggcctgatcagaccacggctcgatttctccaggatttcctgctttgggaagccgtgctcgccccagcaggtgctgacttcatctcccacctagcagcaccgttctgtgcacaaaacccagacctgttagcagacaggccccgtgaggcaatgggagctgaggccacactcagcacaaggccatctgggctcctccagggtgtgtgctcgccctgcggtagatgggagggaggctcaggtccctggggctagggggagccccttctgctcagctctgggccattctccacagcaaccccaggctgaagcaggttcccaagctcagaggcgcactgtgacccccagctccggcctgtcctccaacaccaagcacagcagcctggggctggcctcccaaatgagccatgagatgatacatccaaagcagacagctccaccctggccgagtccaagctgggagattcaagggacccatgagttggggtctggcagcctcccatccagggcccccatctcatgcccctggctgggacgtggctcagccagcacttgtccagctgagcgccaggatggaacacggccacatcaaagaggctgaggctggcacaggacatgcggtagccagcacacagggcagtgagggagggctgtcatctgtgcactgcccatggacaggctggctccagatgcagggcagtcattggctgtctcctaggaaacccatatccttaccctccttgggactgaaggggaaccccggggtgcccacaggccgccctgcgggtgaacaaagcagccacgaggtgcaacaaggtcctctgtcagtcacagccacccctgagatccggcaacatcaacccgagtcattcgttctgtggagggacaagtggactcagggcagcgccaggctgaccacagcacagccaacacgcacctgcctcaggactgcgacgaaaccggtggggctggttctgtaattgtgtgtgatgtgaagccaattcagacaggcaaataaaagtgaccttttacactg

SEQ ID NO: 121594 - DNA, 5436 bp, Homo sapiens
  Payload ID: 3838
  Gene Symbol: COL18A1
  Gene Name: collagen, type XVIII, alpha 1
  Uniprot ID: P39060
  ENST ID: ENST00000400337
  CDS Start-End: 95-4114
ctcccagcggcggcggctgcagcgcggcggtccgagcgggtgcaccgcggcggaggaggcagcatcccgcggcgctgacggtcctggggagagcatggcgccgaggtgcccctggccatggccgcggcggcggcgcctcctggacgtgctcgcgcccctggtcctgctgctcggggtccgcgcggcctccgcggagccagagcgcatcagcgaggaggtggggctgctgcagctccttggggaccccccgccccagcaggtcacccagacggatgaccccgacgtcgggctggcctacgtctttgggccagatgccaacagtggccaagtggcccggtaccacttccccagcctcttcttccgtgacttctcactgctgttccacatccggccagccacagagggcccaggggtgctgttcgccatcacggactcggcgcaggccatggtcttgctgggcgtgaagctctctggggtgcaggacgggcaccaggacatctccctgctctacacagaaccaggtgcaggccagacccacacagccgccagcttccggctccccgccttcgtcggccagtggacacacttagccctcagtgtggcaggtggctttgtggccctctacgtggactgtgaggagttccagagaatgccgcttgctcggtcctcacggggcctggagctggagcctggcgccgggctcttcgtggctcaggcggggggagcggaccctgacaagttccagggggtgatcgctgagctgaaggtgcgcagggacccccaggtgagccccatgcactgcctggacgaggaaggcgatgactcagatggggcatccggagactctggcagcgggctcggggacgcccgggagcttctcagggaggagacgggcgcggccctaaaacccaggctccccgcgccaccccccgtcaccacgccacccttggctggaggcagcagcacggaagattccagaagtgaagaagtcgaggagcagaccacggtggcttcgttaggagctcagacacttcctggctcagattctgtctccacgtgggacgggagtgtccggacccctgggggccgcgtgaaagagggcggcctgaaggggcagaaaggggagccaggtgttccgggcccacctggccgggcaggccccccaggatccccatgcctacctggtcccccgggtctcccgtgcccagtgagtcccctgggtcctgcaggcccagcgttgcaaactgtccccggaccacaaggacccccagggcctccggggagggacggcacccctggaagggacggcgagccgggcgaccccggtgaagacggaaagccgggcgacaccgggccacaaggcttccccgggactccaggggacgtaggtcccaagggcgacaagggagaccctggggttggagagagagggcccccaggaccccaagggcctccagggcccccaggaccctccttcagacacgacaagctgaccttcattgacatggagggatctggcttcgggggcgatctggaggccctgcggggtcctcgaggcttccctggacctcccggaccccccggtgtcccaggcctgcccggcgagccaggccgctttggggtgaacagctccgacgtcccaggacccgccggccttcctggtgtgcctgggcgcgagggtccccccgggtttcctggcctcccgggacccccaggccctccgggaagagaggggcccccaggaaggactgggcagaaaggcagcctgggtgaagcaggcgccccaggacataaggggagcaagggagcccccggtcctgctggtgctcgtggggagagcggcctggcaggagcccccggacctgctggaccaccaggcccccctgggccccctgggcccccaggaccaggactccccgctggatttgatgacatggaaggctccggggggcccttctggtcaacagcccgaagcgctgatgggccacagggacctcccggcctgccgggacttaagggggatcctggcgtgcctgggctgccgggggcgaagggagaagttggagcagatggagtccccgggttccccggcctccctggcagagagggcattgctgggccccaggggccaaagggagacagaggcagccggggagaaaagggagatccagggaaggacggagtcgggcagccgggcctccctggcccccccggacccccgggacctgtggtctacgtgtcggagcaggacggatccgtcctgagcgtgccgggacctgagggccggccgggtttcgcaggctttcccggacctgcaggacccaagggcaacctgggctctaagggcgaacgaggctccccgggacccaagggtgagaagggtgaaccgggcagcatcttcagccccgacggcggtgccctgggccctgcccagaaaggagccaagggagagccgggcttccgaggacccccgggtccatacggacggccggggtacaagggagagattggctttcctggacggccgggtcgccccgggatgaacggattgaaaggagagaaaggggagccgggagatgccagccttggatttggcatgaggggaatgcccggccccccaggacctccagggcccccaggccctccagggactcctgtttacgacagcaatgtgtttgctgagtccagccgccccgggcctccaggattgccagggaatcagggccctccaggacccaagggcgccaaaggagaagtgggcccccccggaccaccagggcagtttccgtttgactttcttcagttggaggctgaaatgaagggggagaagggagaccgaggtgatgcaggacagaaaggcgaaaggggggagcccgggggcggcggtttcttcggctccagcctgcccggcccccccggccccccaggccccccaggcccacgtggctaccctgggattccaggtcccaagggagagagcatccggggccagcccggcccacctggacctcagggaccccccggcatcggctacgaggggcgccagggccctcccggccccccaggccccccagggcccccttcatttcctggccctcacaggcagactatcagcgttcccggccctccgggcccccctgggccccctgggccccctggaaccatgggcgcctcctcaggggtgaggctctgggctacacgccaggccatgctgggccaggtgcacgaggttcccgagggctggctcatcttcgtggccgagcaggaggagctctacgtccgcgtgcagaacgggttccggaaggtccagctggaggcccggacaccactcccacgagggacggacaatgaagtggccgccttgcagccccccgtggtgcagctgcacgacagcaacccctacccgcggcgggagcacccccaccccaccgcgcggccctggcgggcagatgacatcctggccagcccccctcgcctgcccgagccccagccctaccccggagccccgcaccacagctcctacgtgcacctgcggccggcgcgacccacaagcccacccgcccacagccaccgcgacttccagccggtgctccacctggttgcgctcaacagccccctgtcaggcggcatgcggggcatccgcggggccgacttccagtgcttccagcaggcgcgggccgtggggctggcgggcaccttccgcgccttcctgtcctcgcgcctgcaggacctgtacagcatcgtgcgccgtgccgaccgcgcagccgtgcccatcgtcaacctcaaggacgagctgctgtttcccagctgggaggctctgttctcaggctctgagggtccgctgaagcccggggcacgcatcttctcctttgacggcaaggacgtcctgaggcaccccacctggccccagaagagcgtgtggcatggctcggaccccaacgggcgcaggctgaccgagagctactgtgagacgtggcggacggaggctccctcggccacgggccaggcctcctcgctgctggggggcaggctcctggggcagagtgccgcgagctgccatcacgcctacatcgtgctctgcattgagaacagcttcatgactgcctccaagtagccaccgcctggatgcggatggccggagaggaccggcggctcggaggaagcccccaccgtgggcagggagcggccggccagcccctggccccaggacctggctgccatactttcctgtatagttcacgtttcatgtaatcctcaagaaataaaaggaagccaaagagtgtatttttttaaaagtttaaaacagaagcctgatgctgacattcacctgccccaactctcccctgacctgtgagcccagctgggtcaggcagggtgcagtatcatgccctgtgcaacctcttggcctgatcagaccacggctcgatttctccaggatttcctgctttgggaagccgtgctcgccccagcaggtgctgacttcatctcccacctagcagcaccgttctgtgcacaaaacccagacctgttagcagacaggccccgtgaggcaatgggagctgaggccacactcagcacaaggccatctgggctcctccagggtgtgtgctcgccctgcggtagatgggagggaggctcaggtccctggggctagggggagccccttctgctcagctctgggccattctccacagcaaccccaggctgaagcaggttcccaagctcagaggcgcactgtgacccccagctccggcctgtcctccaacaccaagcacagcagcctggggctggcctcccaaatgagccatgagatgatacatccaaagcagacagctccaccctggccgagtccaagctgggagattcaagggacccatgagttggggtctggcagcctcccatccagggcccccatctcatgcccctggctgggacgtggctcagccagcacttgtccagctgagcgccaggatggaacacggccacatcaaagaggctgaggctggcacaggacatgcggtagccagcacacagggcagtgagggagggctgtcatctgtgcactgcccatggacaggctggctccagatgcagggcagtcattggctgtctcctaggaaacccatatccttaccctccttgggactgaaggggaaccccggggtgcccacaggccgccctgcgggtgaacaaagcagccacgaggtgcaacaaggtcctctgtcagtcacagccacccctgagatccggcaacatcaacccgagtcattcgttctgtggagggacaagtggactcagggcagcgccaggctgaccacagcacagccaacacgcacctgcctcaggactgcgacgaaaccggtggggctggttctgtaattgtgtgtgatgtgaagccaattcagacaggcaaataaaagtgaccttttacactga

SEQ ID NO: 121595 - DNA, 839 bp, Homo sapiens
  Payload ID: 3838
  Gene Symbol: COL18A1
  Gene Name: collagen, type XVIII, alpha 1
  ENST ID: ENST00000423214
  CDS Start-End: 1-839
ctatcagcgttcccggccctccgggcccccctgggccccctgggccccctggaaccatgggcgcctcctcaggggtgaggctctgggctacacgccaggccatgctgggccaggtgcacgaggttcccgagggctggctcatcttcgtggccgagcaggaggagctctacgtccgcgtgcagaacgggttccggaaggtccaggacaatgaagtggccgccttgcagccccccgtggtgcagctgcacgacagcaacccctacccgcggcgggagcacccccaccccaccgcgcggccctggcgggcagatgacatcctggccagcccccctcgcctgcccgagccccagccctaccccggagccccgcaccacagctcctacgtgcacctgcggccggcgcgacccacaagcccacccgcccacagccaccgcgacttccagccggtgctccacctggttgcgctcaacagccccctgtcaggcggcatgcggggcatccgcggggccgacttccagtgcttccagcaggcgcgggccgtggggctggcgggcaccttccgcgccttcctgtcctcgcgcctgcaggacctgtacagcatcgtgcgccgtgccgaccgcgcagccgtgcccatcgtcaacctcaaggacgagctgctgtttcccagctgggaggctctgttctcaggctctgagggtccgctgaagcccggggcacgcatcttctcctttgacggcaaggacgtcctgaggcaccccacctggccccagaagagcgtgtggcatggctcggaccccaacgggcgcaggctgaccgagagctactgtgagacgtggcgg

SEQ ID NO: 121596 - DNA, 4172 bp, Homo sapiens
  Payload ID: 3839
  Gene Symbol: COL20A1
  Gene Name: collagen, type XX, alpha 1
  Uniprot ID: Q9P218
  ENST ID: ENST00000358894
  CDS Start-End: 101-3955
ataagctccagccttcctgtggccacagcaggaccagagtggaccagcacaccccaggagagaggactggggtcccaggagtaggaggagcccgagcaccatgagctccggagaccctgcacacctcggcctctgcctctggctgtggctgggcgccaccctgggaagagagcaagttcaagcaagcggtctcctgaggctggctgtgctgcctgaggaccggctgcagatgaagtggagagagtcggaggggagcggcctcggctacctggtgcaggtgaagcccatggcaggggactcggaacaggaggtgatactgaccaccaagacccctaaggccacagtggggggcctgagcccctccaagggctacaccttgcagatcttcgagctcactggctctgggcgcttcctgctagctcggagggagtttgtgattgaggatctgaagagtagctccctggacaggagcagccagaggcccctcggctctggagccccggagcccaccccctcccacacggggagcccagaccctgagcaggcttctgagccccaagttgccttcacaccaagccaggatccgcgcactcctgccggcccccagttccgctgcctgccccccgtgcctgctgacatggtcttcctggtggacgggtcctggagcattggccacagtcacttccagcaggtcaaggacttcctggccagtgtcatcgcaccctttgaaatcgggccggataaggtccaagtaggcctgactcagtacagcggggatgctcagactgagtgggacctgaactccctcagcaccaaggaacaggtgctggcagctgtgcgccgcctccgctacaagggggggaacacgttcacaggccttgccctgacccacgtgctggggcagaacctgcagccggcggctggcctccgtccagaggcagccaaggtggtgattctggtgacggacggcaagtcccaggacgatgtgcacactgctgcccgtgtcctcaaggacctgggcgtgaacgtcttcgctgtgggtgtgaagaacgccgatgaggctgagctgaggctcctggcgtccccgccgagggacatcaccgtccacagcgtgctggacttcctgcagctcggcgcgctggctggcctgctcagccgtctcatctgccagaggctccagggtgggagcccgcggcagggcccagcagcggctccagccctggacaccctccctgcccccaccagcctggtcctgagccaggtgacctcctccagcatccgcctgtcctggactccagccccccggcaccccctcaagtatctgatcgtttggcgagcctctagaggtggcacccccagggaggtggtggtggagggacccgccgcctccacggagctgcacaacctggcctcccgcacagagtacctggtctccgtgttccccatctatgagggcggggttggcgaaggcctgcggggcctggtgaccacagcacctctgcctccgccccgggcgctgaccctggccgcagtgacgcccagaaccgtccacctcacctggcagccctcggccggggccacccactacctggtgcgatgttctcctgcttcccccaagggtgaagaggaggagcgagaggtgcaggtcgggcggcccgaggtgctgctggatggcctggaacctggcagggactatgaggtctcggtgcagagcctgcgaggccctgagggcagcgaggcccggggcatccgtgccaggacccccaccctggcccccccgagacacctgggcttctcagacgtgagccacgacgcggcacgagtgttctgggagggtgccccgaggcctgtgcgcctggtcagggtcacctatgtgtccagcgagggtggacactcggggcagacagaggctcctgggaacgccacctcggccacgctggggcctctctcttcctccaccacctacactgtccgtgtcacctgcctctaccctgggggtggctcctctacgctgactggccgggtgaccaccaagaaagctcccagcccaagccagctgtccatgacggagctgccaggggatgcagtccagctggcgtgggtggccgcagccccgtctggcgtgcttgtctaccagatcacgtggacgcccctgggagaggggaaggctcacgagatctctgtcccagggaacctcggcacggccgtcctgcctggcctagggaggcacacagagtacgacgtcaccatcttggcctactacagggacggggcccgcagtgaccctgtgtccctccgctataccccctccacggtgagcaggagcccaccctccaacctggccctggcctcggagacccccgacagcctgcaggtcagctggacgcccccgcttggccgcgtgctccattactggctcacctacgcccccgcctctggcttgggacccgagaaatccgtctctgtgccaggagccaggagccacgtgacactgcccgacctgcaggcagccacgaagtacagggtcctggtctcagctatctatgcagcaggcaggagtgaggctgtgtctgccacgggccagacagcctgcccagccctccgccctgacggctccctcccagggtttgacctgatggtggccttcagcctggtggaaaaggcttatgcgtccatccggggcgtggccatggagccctctgccttcggtgggaccccgaccttcacgctcttcaaggacgcccagctgacaagacgggtcagtgacgtctacccagcccccctacctccagagcacaccatcgtcttccttgtgcgcctacttcccgagacaccccgtgaggccttcgcgctgtggcagatgacagccgaggacttccagcccctccttggggttctgctggatgccgggaagaagtccctgacctacttccaccgtgaccccagggctgccttgcaggaggccaccttcgacccgcaggaagtgaggaagattttcttcgggagcttccacaaggtgcacgtggctgtgggccgctccaaggtcaggctctatgtggactgccggaaggtggctgagcggccccttggggagatgggcagcccacccgctgcgggcttcgtcacgctggggaggctggccaaggccaggggcccccggagcagttcggccgcgtttcagctccagatgctgcagatcgtgtgcagtgacacctgggccgatgaggaccggtgctgtgagctccctgcctcgagggatggagagacctgccccgccttcgtgtctgcctgttcctgttcctcagagacccctgggcccccaggacctcaaggacccccaggcctccctgggaggaatggcaccccaggagagcagggcttcccagggcccaggggtccaccaggggtcaaaggagagaagggagaccatgggcttccaggcttgcagggccaccccggccaccagggcatccccgggagagttggcctccagggaccaaagggaatgagaggcctggagggaactgctggcctgcctggaccccctggccccagggggttccagggcatggcaggggccaggggcactagtggagagcgaggacctccagggaccgtggggcccacaggactgccagggcccaaaggggaacgaggagagaagggcgagccgcagtcccttgccaccctctaccagcttgtgagccaggcctcacacgtgtcaaagttcgactccttccacgagaacaccaggccccccatgcccatcttggagcagaagctggagccgggcactgagcccctggggtcccctggcacccgcagcaaggccctggttcctggagaatgggggcgtggtggccgccaccttgagggcagaggggagcctggagctgttggtcagatgggcagccctgggcagcagggggctagcacccagggcctctgggagtgacaggacattttctgcactgccccgaggaacgctgagccttcctccctgggtttgtctggacaccgagagcgaccacatcctggagaagccaggagaaaagctcaggaagagcctgcaggtggaaggagagggaagcagcggcctcggccaaggcccaccccatactcttggctctgtagcatttccaagttcagataaacccctgagtgctcaccca

SEQ ID NO: 121597 - DNA, 750 bp, Homo sapiens
  Payload ID: 3839
  Gene Symbol: COL20A1
  Gene Name: collagen, type XX, alpha 1
  ENST ID: ENST00000455906
  CDS Start-End: 1-750
gagcggccccttggggagatgggcagcccacccgctgcgggcttcgtcacgctggggaggctggccaaggccaggggcccccggagcagttcggccgcgtttcagctccagatgctgcagatcgtgtgcagtgacacctgggccgatgaggaccggtgctgtgagctccctgcctcgagggatggagagacctgccccgccttcgtgtctgcctgttcctgttcctcagagacccctgggcccccaggacctcaaggacccccaggtccaccaggggtcaaaggagagaagggagaccatgggcttccaggcttgcagggccaccccggccaccagggcatccccgggagagttggcctccagggaccaaagggaatgagaggcctggagggaactgctggcctgcctggaccccctggccccagggggttccagggcatggcaggggccaggggcactagtggagagcgaggacctccagggaccgtggggcccacaggactgccagggcccaaaggggaacgaggagagaagggcgagccgcagtcccttgccaccctctaccagcttgtgagccaggcctgtgagtctgccattcagacacacgtgtcaaagttcgactccttccacgagaacaccaggccccccatgcccatcttggagcagaagctggagccgggcactgagcccctggggtcccctggcacccgcagcaaggccctggttcctggagaatgggggcgtggtggc

SEQ ID NO: 121598 - DNA, 1204 bp, Homo sapiens
  Payload ID: 3839
  Gene Symbol: COL20A1
  Gene Name: collagen, type XX, alpha 1
  ENST ID: ENST00000415763
  CDS Start-End: 1-1204
gagcacaccatcgtcttccttgtgcgcctacttcccgagacaccccgtgaggccttcgcgctgtggcagatgacagccgaggacttccagcccctccttggggttctgctggatgccgggaagaagtccctgacctacttccaccgtgaccccagggctgccttgcaggaggccaccttcgacccgcaggaagtgaggaagattttcttcgggagcttccacaaggtgcacgtggctgtgggccgctccaaggtcaggctctatgtggactgccggaaggtggctgagcggccccttggggagatgggcagcccacccgctgcgggcttcgtcacgctggggaggctggccaaggccaggggcccccggagcagttcggccgcgtttcagctccagatgctgcagatcgtgtgcagtgacacctgggccgatgaggaccggtgctgtgagctccctgcctcgagggatggagagacctgccccgccttcgtgtctgcctgttcctgttcctcagagacccctgggcccccaggacctcaaggacccccaggcctccctgggaggaatggcaccccaggagagcagggcttcccagggcccaggggagagcccgggccacccggacagatgggaccagaaggtcctggaggccagcagggctcgccggggacccagggccgtgcagtccaggggcctgtgggtccaccaggggtcaaaggagagaagggagaccatgggcttccaggcttgcagggccaccccggccaccagggcatccccgggagagttggcctccagggaccaaagggaatgagaggcctggagggaactgctggcctgcctggaccccctggccccagggggttccagggcatggcaggggccaggggcactagtggagagcgaggacctccagggaccgtggggcccacaggactgccagggcccaaaggggaacgaggagagaagggcgagccgcagtcccttgccaccctctaccagcttgtgagccaggcctgtgagtctgccattcagacacacgtgtcaaagttcgactccttccacgagaacaccaggccccccatgcccatcttggagcagaagctggagccgggcactgagcccctggggtcccctggcacccgcagcaaggccctggttcctggagaatgggggcgtggtggccgccaccttgagggcagag

SEQ ID NO: 121599 - DNA, 8097 bp, Homo sapiens
  Payload ID: 3839
  Gene Symbol: COL20A1
  Gene Name: collagen, type XX, alpha 1
  Uniprot ID: Q9P218
  ENST ID: ENST00000422202
  CDS Start-End: 69-3962
gtcagggagaggacagacggggggacggctgaagggcatggcctcttccctgccacagcccgagcaccatgagctccggagaccctgcacacctcggcctctgcctctggctgtggctgggcgccaccctgggaagagagcaagttcaagcaagcggtctcctgaggctggctgtgctgcctgaggaccggctgcagatgaagtggagagagtcggaggggagcggcctcggctacctggtgcaggtgaagcccatggcaggggactcggaacaggaggtgatactgaccaccaagacccctaaggccacagtggggggcctgagcccctccaagggctacaccttgcagatcttcgagctcactggctctgggcgcttcctgctagctcggagggagtttgtgattgaggatctgaagagtagctccctggacaggagcagccagaggcccctcggctctggagccccggagcccaccccctcccacacggggagcccagaccctgagcaggcttctgagccccaagttgccttcacaccaagccaggatccgcgcactcctggtgggtcagagtggagagagaccggcccccagttccgctgcctgccccccgtgcctgctgacatggtcttcctggtggacgggtcctggagcattggccacagtcacttccagcaggtcaaggacttcctggccagtgtcatcgcaccctttgaaatcgggccggataaggtccaagtaggcctgactcagtacagcggggatgctcagactgagtgggacctgaactccctcagcaccaaggaacaggtgctggcagctgtgcgccgcctccgctacaagggggggaacacgttcacaggccttgccctgacccacgtgctggggcagaacctgcagccggcggctggcctccgtccagaggcagccaaggtggtgattctggtgacggacggcaagtcccaggacgatgtgcacactgctgcccgtgtcctcaaggacctgggcgtgaacgtcttcgctgtgggtgtgaagaacgccgatgaggctgagctgaggctcctggcgtccccgccgagggacatcaccgtccacagcgtgctggacttcctgcagctcggcgcgctggctggcctgctcagccgtctcatctgccagaggctccagggtgggagcccgcggcagggcccagcagcggctccagccctggacaccctccctgcccccaccagcctggtcctgagccaggtgacctcctccagcatccgcctgtcctggactccagccccccggcaccccctcaagtatctgatcgtttggcgagcctctagaggtggcacccccagggaggtggtggtggagggacccgccgcctccacggagctgcacaacctggcctcccgcacagagtacctggtctccgtgttccccatctatgagggcggggttggcgaaggcctgcggggcctggtgaccacagcacctctgcctccgccccgggcgctgaccctggccgcagtgacgcccagaaccgtccacctcacctggcagccctcggccggggccacccactacctggtgcgatgttctcctgcttcccccaagggtgaagaggaggagcgagaggtgcaggtcgggcggcccgaggtgctgctggatggcctggaacctggcagggactatgaggtctcggtgcagagcctgcgaggccctgagggcagcgaggcccggggcatccgtgccaggacccccaccctggcccccccgagacacctgggcttctcagacgtgagccacgacgcggcacgagtgttctgggagggtgccccgaggcctgtgcgcctggtcagggtcacctatgtgtccagcgagggtggacactcggggcagacagaggctcctgggaacgccacctcggccacgctggggcctctctcttcctccaccacctacactgtccgtgtcacctgcctctaccctgggggtggctcctctacgctgactggccgggtgaccaccaagaaagctcccagcccaagccagctgtccatgacggagctgccaggggatgcagtccagctggcgtgggtggccgcagccccgtctggcgtgcttgtctaccagatcacgtggacgcccctgggagaggggaaggctcacgagatctctgtcccagggaacctcggcacggccgtcctgcctggcctagggaggcacacagagtacgacgtcaccatcttggcctactacagggacggggcccgcagtgaccctgtgtccctccgctataccccctccacggtgagcaggagcccaccctccaacctggccctggcctcggagacccccgacagcctgcaggtcagctggacgcccccgcttggccgcgtgctccattactggctcacctacgcccccgcctctggcttgggacccgagaaatccgtctctgtgccaggagccaggagccacgtgacactgcccgacctgcaggcagccacgaagtacagggtcctggtctcagctatctatgcagcaggcaggagtgaggctgtgtctgccacgggccagacagcctgcccagccctccgccctgacggctccctcccagggtttgacctgatggtggccttcagcctggtggaaaaggcttatgcgtccatccggggcgtggccatggagccctctgccttcggtgggaccccgaccttcacgctcttcaaggacgcccagctgacaagacgggtcagtgacgtctacccagcccccctacctccagagcacaccatcgtcttccttgtgcgcctacttcccgagacaccccgtgaggccttcgcgctgtggcagatgacagccgaggacttccagcccctccttggggttctgctggatgccgggaagaagtccctgacctacttccaccgtgaccccagggctgccttgcaggaggccaccttcgacccgcaggaagtgaggaagattttcttcgggagcttccacaaggtgcacgtggctgtgggccgctccaaggtcaggctctatgtggactgccggaaggtggctgagcggccccttggggagatgggcagcccacccgctgcgggcttcgtcacgctggggaggctggccaaggccaggggcccccggagcagttcggccgcgtttcagctccagatgctgcagatcgtgtgcagtgacacctgggccgatgaggaccggtgctgtgagctccctgcctcgagggatggagagacctgccccgccttcgtgtctgcctgttcctgttcctcagagacccctgggcccccaggacctcaaggacccccaggcctccctgggaggaatggcaccccaggagagcagggcttcccagggcccaggggtccaccaggggtcaaaggagagaagggagaccatgggcttccaggcttgcagggccaccccggccaccagggcatccccgggagagttggcctccagggaccaaagggaatgagaggcctggagggaactgctggcctgcctggaccccctggccccagggggttccagggcatggcaggggccaggggcactagtggagagcgaggacctccagggaccgtggggcccacaggactgccagggcccaaaggggaacgaggagagaagggcgagccgcagtcccttgccaccctctaccagcttgtgagccaggcctgtgagtctgccattcagacacacgtgtcaaagttcgactccttccacgagaacaccaggccccccatgcccatcttggagcagaagctggagccgggcactgagcccctggggtcccctggcacccgcagcaaggccctggttcctggagaatgggggcgtggtggccgccaccttgagggcagaggggagcctggagctgttggtcagatgggcagccctgggcagcagggggctagcacccagggcctctgggagtgacaggacattttctgcactgccccgaggaacgctgagccttcctccctgggtttgtctggacaccgagagcgaccacatcctggagaagccaggagaaaagctcaggaagagcctgcaggtggaaggagagggaagcagcggcctcggccaaggcccaccccatactcttggctctgtagcatttccaagttcagataaacccctgagtgctcacccagccaagcgaggcgggagtcatttcctgggagagtgtcccccaccctggctctgtgcaccccaccttgaggccctgcagcttcagccgcagtggggaaggggaggggctgggctgatggcgaatcgggttcaggagggcagcagtgccctgtggccgtctcagtagctctaaaacaggctcaacaacatgccccgcccctttctctgggcctcatctaagcctggccagggccctgtgggcccgcctctctctgcgcctcacgcaggcaacagatggttccactgctggcccaccagtcacctgcacgatggctcctccctcagaacagcactcccaccccggccccagcaccttcacatctgggcacaggcaggtccctgcctgcctcatcgtcccctctgtccccagcccaagaaggagttcagatcctgtgtgtgaatggccacccctcacccacccagccctgtgctgagttccttgtgcagggacattgctttgagacttggcaccatcagcccctggtccttagggtctcagagcaaggtcatccctcagcaggcttctggcctgtgcgctcctcagcacctctgcccaggtctctcccaaccatcacagacgctgtgtgagcctggacttcctgccttatccccactgtggcccaaacagcatgggggcaagctcagaacacacacctgggcttctgggccttgtggcccgtgggggtgatgtgggaacttctacttcctttccaaacaaatattcagtaactagtccactgttaccacttaggcagctaagcaagaaaggtgccagaaatgaagagggaagccatatcattgaggagagaatgaaaagtattaaaaaggaacaaagagagacccttgatattgacagaaggaaaacccaccaagatcaccagtgcagcattgcgtgcaccaaagcataccccaaagaggtgagcgcaaaacagcttcagggcaaacacttcatctatgattcaactgttccaggaactgaccagacctggagaccaaatagagagtcataggcagggtcagcaggatgggagagagcgcctgcacccacaggagccacagccctgactgaggccaggaagcagccccaaatgccagctcccactgcagcatgagaacagaaacagaccactgaaaattcccaaagtctgtggacaaatcagacgtcgaagaagtcacgtggcatcgagacagattttgcactgagggacaaggagagcatgtggccaaagtaggtgcaggtaaagcagcatctggggcagagttatagccttcagtgcaggtatcagacacagttgttgagagcagcagcccaagccagcccctccgtcctgcagggaggacacctaggtcacttggcttctgttggggagctgagttgcttcagattgtgtgaccagcaaaacagcttggttgctctcacttggtttctccagggcggggaattacatgtccccagctgaactgagaaggctctttgagcagtggagtgagcaggctttgtcatgaggcaggagtggggctagaatcaagcccagagcccacagggcatccagagccttccaaaggagcccctctcctggggctctccaatttgatgaagggactgggcactgggtggctgagaccacattggcagccaggaggaggcagcctggccggggggaaccagggtggctctaatccccaccaccccctcagctgccctacccccgccacgctggtgtgacaccagtgatgctcagcctcaaaaggggagtccggctgtcttcgggaaactgactttatgctggaggccaattaaaatggcacagcaaaggcagcggccagctggtgcccaggcagcttagggactggtccctgaggccccacccgccccagcctgtgcagtggagctgagtacgaatcaaaggtgaggatggcaagggagctgagagcagcctccggatgcaccaaaccggcctggctcctgtttgcaggaaggcagcctccccgagacccagccgacctgcacgtctcccatcagccccgactccaccgcatccctctgggtccttttaggagcccccagggactgagccggggctcacgctcctggccagagcgctgggtttctggcaatgcctcccctcctgcctttacggccacagctctcccctccagaggcccctctgtagtgggcctcggtcccctctccacccccagaggcagcacagcttcagccctacgcagtgtgggggctccgggaggaaatgcagggaggtgcttggtcttggcccagagctcatggccttaggtgctgcccccagtcacccccgtgcccatgcagccggggatgttcagctcaggccagccaccgaggtggtgtgacgcaaggctgatctgacgctcagctcaggccgctggggtcatgggggttgtgggaaggtcatggaatcacggggctcacgctggggtcacagggtggtgtggctgtgtggactgtaaggggcgtgcagccatgcgtatctgacctgccctccctaggtctgcaggcagtgccgagtggctctgcctgaggccccaagagcgaccttggaagctccaggccttcacagcccctctgagagccacctgcaaggtggggagctgggaagaacggctcagtgatgagctcagagggaggggtgggcacagcgcccaggaaggcgggtgcgtgcaggcctgggaggaatgtgtagcaggaggcagggggtgctgtgcccgcaggaccagcaggtgaggcgtgtccacccacagaggatggctctggcccaggcagtgtcagaaatggaagctgaggaaacccaaccccagctgtagaggagcctgccccgatgccatctgcacctggggggcgacgtatggctgccagcctcttcatctaccaaggaccagggcagtggggacgggagagctgggacacgtggactcacaccagggcagatggtgggggaagccagtgtctgtagattcagtgcatttcttggggaagggcgtggaacatttggacttgagccccagcacagagacgatgtcataatacagccccccatcgtgatctgatggtaagtacagaactccttgcccagtggagaaacactctcctctcatgtgtggaatatccacacactaaccatgaactgggccataagaaaccttacattccaaaggatcctgctgttcagaactcactcactcactgatgaaactggaaaaacaaccaatgataacaagctaaagaatgcctctagaagctaaaagacacacccatgactccacagtaattcatgggttaaagagaaaaaaggaaacgtgaagatacttgtaaccaaataatgatggatgcagcgccacgtcagaatctctgtgctgcagctgcagtggtacctagagggcaatttatagctgtaaatacagtgctttgttttgttttcttgttttttgagacaaggtcttgctctgtcacccaggctggagtacagtggcatgatctcggctcaatgcaacctctgtgccaccctgggctcaagtggtcctcctgctccggtcttctgagtagcaggaaccacaggcgtgcgccaccacgcttggctaatgttttttgtatttttttaaatagagacagggtgttgccgtgttacccaggctggtcttgaacttctgagctcaaacgatccaccctccttggcctcccaaagtggtgggattacaggtgtgagtcacctcaccggcccttaaacacagtttttagggaagattccaactcaaacaattttaaatagtagaaaataaaccctgaagcagtgtgcattcattagtactgtgtttgcctgtatttaattaaaacctgattgccattggc

SEQ ID NO: 121600 - DNA, 4339 bp, Homo sapiens
  Payload ID: 3840
  Gene Symbol: COL21A1
  Gene Name: collagen, type XXI, alpha 1
  Uniprot ID: Q96P44
  ENST ID: ENST00000244728
  CDS Start-End: 399-3272
attttctgatgctagcaggatttgaactgagtgtttccaccagggcgacactagcagttcgcccttcaagatccagatccaaaatccaccctctggtcttcggccaaggaaagggggcgggtggggagcgcgaaccttatctcccgggctccgcctccagggggctgagagcgagtttctgagcctctgagctctgcactggccgctgcagggagaacggactccgggcggagggcagccaatccgtttcagcgcaggtcttgctcgggttgggcttgccactgcctggaacatacctgtccccctggcgcaacactcagctggctgcgacggcaaccccgagcctggacactgcgccaggaatcctaaaaccaaaatattagaacgaaaacagaaacatggctcactatattacatttctctgcatggttttggtgctgcttcttcagaattctgtgttagctgaagatggggaagtaagatcaagttgtcgtactgctccgacagatttagttttcatcttagatggctcttatagtgttggcccagaaaactttgaaatagtgaaaaagtggcttgtcaatatcacaaaaaactttgacatagggccgaagtttattcaagttggagtggttcaatatagtgactaccctgtgctggagattcctctcggaagctatgattcaggagaacatttgacggcagcagtggaatccatactctacttaggaggaaacacaaagacagggaaggccatccagtttgcgctcgattacctttttgccaagtcctcacgatttctgactaagatagcagtggtacttacggatggcaaatcccaagatgacgtcaaggatgcagctcaagcagcaagagatagtaagataacattatttgctattggtgttggttcagaaacagaagatgccgaacttagagctattgccaacaagccttcgtctacttatgtgttttatgtggaagactatattgcaatatccaaaataagggaagtgatgaagcagaaactttgtgaagaatctgtctgtccaacacgaattccagtggcagctcgtgatgaaaggggatttgatattcttttaggtttagatgtaaataaaaaggttaagaaaagaatacagctttcaccaaaaaagataaaaggatatgaagtaacatcaaaagttgatttatcagaactcacaagcaatgttttcccagaaggtcttcctccatcatatgtatttgtgtctactcaaagatttaaagtcaagaaaatttgggatttatggagaatattaactattgatggaaggccacaaatagcagttaccttaaatggtgtggacaaaatcttattatttacaacaaccagcgtaattaatggctcacaagtggttacctttgctaaccctcaagttaagacgttgtttgatgaaggctggcaccaaattcgtctcttagtaacagaacaagatgtgactttgtatattgatgaccaacaaattgaaaacaagcccttacatccagttttagggatcttgatcaatgggcaaacccaaattggaaaatattctggaaaagaagaaactgttcagtttgatgtccaaaagttgcgaatctactgtgacccagaacagaacaaccgggagacagcatgtgagattcctggatttaatggagagtgccttaatggtcccagtgatgtaggttcaactccagctccctgtatttgtcctccgggaaaaccaggacttcaaggccccaaaggtgaccctggactgcctgggaaccctggctaccctggacaacctggtcaagatggtaagcctggatatcagggaattgcagggacaccaggtgttccaggatctccaggaatacaaggagctcgaggactaccaggttacaaaggagaaccagggcgagatggtgacaagggtgatcgtggacttcctggttttcctgggcttcatggcatgccaggatcaaagggtgaaatgggtgccaaaggagacaaaggatcacctggattttatggcaaaaagggtgcaaaaggtgaaaaggggaatgctggcttccctggcctccctggacctgctggagaaccaggaagacatggaaaggatggattaatgggtagtcccggtttcaagggagaagcaggatcccctggtgctccggggcaggatggaacacggggagagcctggaatcccaggatttcctggaaaccgaggattaatgggccaaaagggagaaattgggcctccaggacagcaaggaaaaaaaggagccccagggatgcctggtttaatgggaagcaatggctcaccaggccagcctggaacaccgggatctaagggaagcaaaggtgaacctggaattcaagggatgcctggggcttctgggctcaagggagaaccaggagcaacgggttccccaggagaaccaggatacatgggtttacccgggattcaaggaaaaaagggggacaaaggaaatcaaggtgaaaaaggtattcagggtcaaaagggagaaaatggaagacagggaattccagggcaacagggaattcaaggccatcatggtgcaaaaggagagagaggtgaaaagggagaacctggtgtccgaggtgccattggatcaaaaggagaatctggggtggatggcttgatggggcccgcaggtcctaaggggcaacctggggatccaggtcctcagggacccccaggtttggatgggaagcccggaagagagttttcagaacaatttattcgacaagtttgcacagatgtaataagagcccagctaccagtcttacttcagagtggaagaattagaaattgtgatcattgcctgtcccaacatggctccccgggtattcctgggccacctggtccgataggcccagagggtcccagaggattacctggtttgccaggaagagatggtgttcctggattagtgggtgtccctggacgtccaggtgtcagaggattaaaaggcctaccaggaagaaatggggaaaaagggagccaagggtttgggtatcctggagaacaaggtcctcctggtcccccaggtccagagggccctcctggaataagcaaagaaggtcctccaggagacccaggtctccctggcaaagatggagaccatggaaaacctggaatccaagggcaaccaggccccccaggcatctgcgacccatcactatgttttagtgtaattgccagaagagatccgttcagaaaaggaccaaactattagtgtctgatgcctcattcagcagcctaggcatggtgctttttctgtggtcttttgcatctcaggaagataaccaacagtaatcccttgaaaagaaacttaagtacctcggtgtttttattttttttttcttatggaaaaaaatataaaagatcacatatactgattttaaaggctcctcagtcatttggagcccttggattagcagcattaattaaatctcaagggtttcttgtaaagtccatttatgttaatcaaagttgaatataaaaatccaccattgcctgttagccagtcagttttagtcactgtgaaatatttcacattcagcctccatgcagtagagatttgagtttaatttcatgtccatgtgactttcatgtttcctatctcatagctcatgctactacataagccaaaacatgtatctcatcattggaagtaagatcagggctgatattcacctgggatagacagtattggtgaactactcatttactacagtgtctcagccttgataaggggcagtggattgcctgttgttcggtgttgtgaatagcacctctgaataagattagagtgtttcttaattcatttcaaactctaaaattagattaatggtggtgctaagaaagagtattaattactttgggaatggtcaaaattaacattaaaaacattttagacaaaaagtttcattgtacattcaaagaaaatgtaagtttggaagtactaaaagactattttatacttgttgattaatcggaatgtttgttgtatgccttcattttccatttcacttatatgtgtatgtccatatatgttaattttcattgtagcaaagctaatggaaataaagctaatgctctagttgaaagaaaaggaaaactcctgaaatcctagaatgtcttgttatttttagctgactgtaaaatattatgaacagtctttgtgtattgtgcttaatgcttttgtaagaaacagaatttgaaatatttcatccttgtcatgctcaaaattttgttacatgcttgttattcagagtataataaagttttgtacaggcctga

SEQ ID NO: 121601 - DNA, 624 bp, Homo sapiens
  Payload ID: 3840
  Gene Symbol: COL21A1
  Gene Name: collagen, type XXI, alpha 1
  ENST ID: ENST00000370817
  CDS Start-End: 216-624
gcaacactcagctggctgcgacggcaaccccgagcctggacactgcgccaggaaacctcttctggcatccttagtaaatggcagtagagtcatctgggaggtaaaagaagattgtaccatgtgagggatctcctacccaggaaacaaagcccacaggaagaccatcacataggaatggaatcctaaaaccaaaatattagaacgaaaacagaaacatggctcactatattacatttctctgcatggttttggtgctgcttcttcagaattctgtgttagctgaagatggggaagtaagatcaagttgtcgtactgctccgacagatttagttttcatcttagatggctcttatagtgttggcccagaaaactttgaaatagtgaaaaagtggcttgtcaatatcacaaaaaactttgacatagggccgaagtttattcaagttggagtggttcaatatagtgactaccctgtgctggagattcctctcggaagctatgattcaggagaacatttgacggcagcagtggaatccatactctacttaggaggaaacacaaagacagggaaggccatccagtttgcgctcgattacctttttgccaagtcctcacgatttctgacta

SEQ ID NO: 121602 - DNA, 4094 bp, Homo sapiens
  Payload ID: 3840
  Gene Symbol: COL21A1
  Gene Name: collagen, type XXI, alpha 1
  Uniprot ID: Q96P44
  ENST ID: ENST00000370819
  CDS Start-End: 163-3027
tggttctggccaagggagttcatacccactcaaagattatattacgaatttcagatgggagcttctctcaacctgcagccaccacatgagttagctggccgacttctgtgaggttcccagtgaggaatcctaaaaccaaaatattagaacgaaaacagaaacatggctcactatattacatttctctgcatggttttggtgctgcttcttcagaattctgtgttagctgaagatggggaagtaagatcaagttgtcgtactgctccgacagatttagttttcatcttagatggctcttatagtgttggcccagaaaactttgaaatagtgaaaaagtggcttgtcaatatcacaaaaaactttgacatagggccgaagtttattcaagttggagtggttcaatatagtgactaccctgtgctggagattcctctcggaagctatgattcaggagaacatttgacggcagcagtggaatccatactctacttaggaggaaacacaaagacagggaaggccatccagtttgcgctcgattacctttttgccaagtcctcacgatttctgactaagatagcagtggtacttacggatggcaaatcccaagatgacgtcaaggatgcagctcaagcagcaagagatagtaagataacattatttgctattggtgttggttcagaaacagaagatgccgaacttagagctattgccaacaagccttcgtctacttatgtgttttatgtggaagactatattgcaatatccaaaataagggaagtgatgaagcagaaactttgtgaagaatctgtctgtccaacacgaattccagtggcagctcgtgatgaaaggggatttgatattcttttaggtttagatgtaaataaaaaggttaagaaaagaatacagctttcaccaaaaaagataaaaggatatgaagtaacatcaaaagttgatttatcagaactcacaagcaatgttttcccagaaggtcttcctccatcatatgtatttgtgtctactcaaagatttaaagtcaagaaaatttgggatttatggagaatattaactattgatggaaggccacaaatagcagttaccttaaatggtgtggacaaaatcttattatttacaacaaccagcgtaattaatggctcacaagtggttacctttgctaaccctcaagttaagacgttgtttgatgaaggctggcaccaaattcgtctcttagtaacagaacaagatgtgactttgtatattgatgaccaacaaattgaaaacaagcccttacatccagttttagggatcttgatcaatgggcaaacccaaattggaaaatattctggaaaagaagaaactgttcagtttgatgtccaaaagttgcgaatctactgtgacccagaacagaacaaccgggagacagcatgtgagattcctggattttgccttaatggtcccagtgatgtaggttcaactccagctccctgtatttgtcctccgggaaaaccaggacttcaaggccccaaaggtgaccctggactgcctgggaaccctggctaccctggacaacctggtcaagatggtaagcctggatatcagggaattgcagggacaccaggtgttccaggatctccaggaatacaaggagctcgaggactaccaggttacaaaggagaaccagggcgagatggtgacaagggtgatcgtggacttcctggttttcctgggcttcatggcatgccaggatcaaagggtgaaatgggtgccaaaggagacaaaggatcacctggattttatggcaaaaagggtgcaaaaggtgaaaaggggaatgctggcttccctggcctccctggacctgctggagaaccaggaagacatggaaaggatggattaatgggtagtcccggtttcaagggagaagcaggatcccctggtgctccggggcaggatggaacacggggagagcctggaatcccaggatttcctggaaaccgaggattaatgggccaaaagggagaaattgggcctccaggacagcaaggaaaaaaaggagccccagggatgcctggtttaatgggaagcaatggctcaccaggccagcctggaacaccgggatctaagggaagcaaaggtgaacctggaattcaagggatgcctggggcttctgggctcaagggagaaccaggagcaacgggttccccaggagaaccaggatacatgggtttacccgggattcaaggaaaaaagggggacaaaggaaatcaaggtgaaaaaggtattcagggtcaaaagggagaaaatggaagacagggaattccagggcaacagggaattcaaggccatcatggtgcaaaaggagagagaggtgaaaagggagaacctggtgtccgaggtgccattggatcaaaaggagaatctggggtggatggcttgatggggcccgcaggtcctaaggggcaacctggggatccaggtcctcagggacccccaggtttggatgggaagcccggaagagagttttcagaacaatttattcgacaagtttgcacagatgtaataagagcccagctaccagtcttacttcagagtggaagaattagaaattgtgatcattgcctgtcccaacatggctccccgggtattcctgggccacctggtccgataggcccagagggtcccagaggattacctggtttgccaggaagagatggtgttcctggattagtgggtgtccctggacgtccaggtgtcagaggattaaaaggcctaccaggaagaaatggggaaaaagggagccaagggtttgggtatcctggagaacaaggtcctcctggtcccccaggtccagagggccctcctggaataagcaaagaaggtcctccaggagacccaggtctccctggcaaagatggagaccatggaaaacctggaatccaagggcaaccaggccccccaggcatctgcgacccatcactatgttttagtgtaattgccagaagagatccgttcagaaaaggaccaaactattagtgtctgatgcctcattcagcagcctaggcatggtgctttttctgtggtcttttgcatctcaggaagataaccaacagtaatcccttgaaaagaaacttaagtacctcggtgtttttattttttttttcttatggaaaaaaatataaaagatcacatatactgattttaaaggctcctcagtcatttggagcccttggattagcagcattaattaaatctcaagggtttcttgtaaagtccatttatgttaatcaaagttgaatataaaaatccaccattgcctgttagccagtcagttttagtcactgtgaaatatttcacattcagcctccatgcagtagagatttgagtttaatttcatgtccatgtgactttcatgtttcctatctcatagctcatgctactacataagccaaaacatgtatctcatcattggaagtaagatcagggctgatattcacctgggatagacagtattggtgaactactcatttactacagtgtctcagccttgataaggggcagtggattgcctgttgttcggtgttgtgaatagcacctctgaataagattagagtgtttcttaattcatttcaaactctaaaattagattaatggtggtgctaagaaagagtattaattactttgggaatggtcaaaattaacattaaaaacattttagacaaaaagtttcattgtacattcaaagaaaatgtaagtttggaagtactaaaagactattttatacttgttgattaatcggaatgtttgttgtatgccttcattttccatttcacttatatgtgtatgtccatatatgttaattttcattgtagcaaagctaatggaaataaagctaatgctctagttgaaagaaaaggaaaactcctgaaatcctagaatgtcttgttatttttagctgactgtaaaatattatgaacagtctttgtgtattgtgcttaatgcttttgtaagaaacagaatttgaaatatttcatccttgtcatgctcaaaattttgttacatgcttgttattcagagtataataaagttttgtacaggcctga

SEQ ID NO: 121603 - DNA, 480 bp, Homo sapiens
  Payload ID: 3840
  Gene Symbol: COL21A1
  Gene Name: collagen, type XXI, alpha 1
  ENST ID: ENST00000456983
  CDS Start-End: 1-377
accgggagacagcatgtgagattcctggatttaatggagagtgccttaatggtcccagtgatgtaggttcaactccagctccctgtatttgtcctccgggaaaaccaggacttcaaggccccaaaggatatcagggaattgcagggacaccaggtgttccaggatctccaggaatacaaggagctcgaggactaccaggttacaaaggagaaccagggcgagatggtgacaagggtgatcgtggacttcctggttttcctgggcttcatggcatgccaggatcaaagggtgaaatgggtgccaaaggagacaaaggatcacctggattttatggcaaaaagggaagtatagatcacacaacaaagtattcatattgaacttttaatgtaatggaaacagaaaactagaattgcagttctaacccagcattagaacagttagctctgttcacccttcttaggggattaattcagaacaatg

SEQ ID NO: 121604 - DNA, 2327 bp, Homo sapiens
  Payload ID: 3840
  Gene Symbol: COL21A1
  Gene Name: collagen, type XXI, alpha 1
  ENST ID: ENST00000488912
  CDS Start-End: 1-240
gccaaaggagacaaaggatcacctggattttatggcaaaaagggtgcaaaaggtgaaaaggggaatgctggcttccctggcctccctggacctgctggagaaccaggaagacatggaaaggatggattaatgggtagtcccggtttcaagggagaagcaggatcccctggtgctccggggcaggatggaacacggggagagcctacatgtgcatatgagttcagccacgtgaaagagtgacctgtacttctttatgtctcttcacaaactgtggtcttcatattcttcatgattgcatcaggaatcccaggatttcctggaaaccgaggattaatgggccaaaagggagaaattgggcctccaggacagcaaggaaaaaaaggagccccagggatgcctggtttaatgggaagcaatggctcaccaggccagcctggaacaccgggatctaagggaagcaaaggtgaacctggaattcaagggatgcctggggcttctgggctcaagggagaaccaggagcaacgggttccccaggagaaccaggatacatgggtttacccgggattcaaggaaaaaagggggacaaaggaaatcaaggtgaaaaaggtattcagggtcaaaagggagaaaatggaagacagggaattccagggcaacagggaattcaaggccatcatggtgcaaaaggagagagaggtgaaaagggagaacctggtgtccgaggtgccattggatcaaaaggagaatctggggtggatggcttgatggggcccgcaggtcctaaggggcaacctggggatccaggtcctcagggacccccaggtttggatgggaagcccggaagagagttttcagaacaatttattcgacaagtttgcacagatgtaataagaggcccagagggtcccagaggattacctggtttgccaggaagagatggtgttcctggattagtgggtgtccctggacgtccaggtgtcagaggattaaaaggcctaccaggaagaaatggggaaaaagggagccaagggtttgggtatcctggagaacaaggtcctcctggtcccccaggtccagagggccctcctggaataagcaaagaaggtcctccaggagacccaggtctccctggcaaagatggagaccatggaaaacctggaatccaagggcaaccaggccccccaggcatctgcgacccatcactatgttttagtgtaattgccagaagagatccgttcagaaaaggaccaaactattagtgtctgatgcctcattcagcagcctaggcatggtgctttttctgtggtcttttgcatctcaggaagataaccaacagtaatcccttgaaaagaaacttaagtacctcggtgtttttattttttttttcttatggaaaaaaatataaaagatcacatatactgattttaaaggctcctcagtcatttggagcccttggattagcagcattaattaaatctcaagggtttcttgtaaagtccatttatgttaatcaaagttgaatataaaaatccaccattgcctgttagccagtcagttttagtcactgtgaaatatttcacattcagcctccatgcagtagagatttgagtttaatttcatgtccatgtgactttcatgtttcctatctcatagctcatgctactacataagccaaaacatgtatctcatcattggaagtaagatcagggctgatattcacctgggatagacagtattggtgaactactcatttactacagtgtctcagccttgataaggggcagtggattgcctgttgttcggtgttgtgaatagcacctctgaataagattagagtgtttcttaattcatttcaaactctaaaattagattaatggtggtgctaagaaagagtattaattactttgggaatggtcaaaattaacattaaaaacattttagacaaaaagtttcattgtacattcaaagaaaatgtaagtttggaagtactaaaagactattttatacttgttgattaatcggaatgtttgttgtatgccttcattttccatttcacttatatgtgtatgtccatatatgttaattttcattgtagcaaagctaatggaaataaagctaatgctctagttgaaagaaaaggaaaactcctgaaatcctagaatgtcttgttatttttagctgactgtaaaatattatgaacagtctttgtgtattgtgcttaatgcttttgtaagaaacagaatttgaaatatttcatccttgtcatgctcaaaattttgttacatgcttgttattcagagtataataaagttttgtacaggcctga

SEQ ID NO: 121605 - DNA, 3369 bp, Homo sapiens
  Payload ID: 3840
  Gene Symbol: COL21A1
  Gene Name: collagen, type XXI, alpha 1
  ENST ID: ENST00000535941
  CDS Start-End: 162-3032
aacactcagctggctgcgacggcaaccccgagcctggacactgcgccaggaaacctcttctggcatccttagtaaatggcagtagagtcatctgggaggtaaaagaagattgtaccatgtgaggaatcctaaaaccaaaatattagaacgaaaacagaaacatggctcactatattacatttctctgcatggttttggtgctgcttcttcagaattctgtgttagctgaagatggggaagtaagatcaagttgtcgtactgctccgacagatttagttttcatcttagatggctcttatagtgttggcccagaaaactttgaaatagtgaaaaagtggcttgtcaatatcacaaaaaactttgacatagggccgaagtttattcaagttggagtggttcaatatagtgactaccctgtgctggagattcctctcggaagctatgattcaggagaacatttgacggcagcagtggaatccatactctacttaggaggaaacacaaagacagggaaggccatccagtttgcgctcgattacctttttgccaagtcctcacgatttctgactaagatagcagtggtacttacggatggcaaatcccaagatgacgtcaaggatgcagctcaagcagcaagagatagtaagataacattatttgctattggtgttggttcagaaacagaagatgccgaacttagagctattgccaacaagccttcgtctacttatgtgttttatgtggaagactatattgcaatatccaaaataagggaagtgatgaagcagaaactttgtgaagaatctgtctgtccaacacgaattccagtggcagctcgtgatgaaaggggatttgatattcttttaggtttagatgtaaataaaaaggttaagaaaagaatacagctttcaccaaaaaagataaaaggatatgaagtaacatcaaaagttgatttatcagaactcacaagcaatgttttcccagaaggtcttcctccatcatatgtatttgtgtctactcaaagatttaaagtcaagaaaatttgggatttatggagaatattaactattgatggaaggccacaaatagcagttaccttaaatggtgtggacaaaatcttattatttacaacaaccagcgtaattaatggctcacaagtggttacctttgctaaccctcaagttaagacgttgtttgatgaaggctggcaccaaattcgtctcttagtaacagaacaagatgtgactttgtatattgatgaccaacaaattgaaaacaagcccttacatccagttttagggatcttgatcaatgggcaaacccaaattggaaaatattctggaaaagaagaaactgttcagtttgatgtccaaaagttgcgaatctactgtgacccagaacagaacaaccgggagacagcatgtgagattcctggatttgtaaagtgccttaatggtcccagtgatgtaggttcaactccagctccctgtatttgtcctccgggaaaaccaggacttcaaggccccaaaggtgaccctggactgcctgggaaccctggctaccctggacaacctggtcaagatggtaagcctggatatcagggaattgcagggacaccaggtgttccaggatctccaggaatacaaggagctcgaggactaccaggttacaaaggagaaccagggcgagatggtgacaagggtgatcgtggacttcctggttttcctgggcttcatggcatgccaggatcaaagggtgaaatgggtgccaaaggagacaaaggatcacctggattttatggcaaaaagggtgcaaaaggtgaaaaggggaatgctggcttccctggcctccctggacctgctggagaaccaggaagacatggaaaggatggattaatgggtagtcccggtttcaagggagaagcaggatcccctggtgctccggggcaggatggaacacggggagagcctggaatcccaggatttcctggaaaccgaggattaatgggccaaaagggagaaattgggcctccaggacagcaaggaaaaaaaggagccccagggatgcctggtttaatgggaagcaatggctcaccaggccagcctggaacaccgggatctaagggaagcaaaggtgaacctggaattcaagggatgcctggggcttctgggctcaagggagaaccaggagcaacgggttccccaggagaaccaggatacatgggtttacccgggattcaaggaaaaaagggggacaaaggaaatcaaggtgaaaaaggtattcagggtcaaaagggagaaaatggaagacagggaattccagggcaacagggaattcaaggccatcatggtgcaaaaggagagagaggtgaaaagggagaacctggtgtccgaggtgccattggatcaaaaggagaatctggggtggatggcttgatggggcccgcaggtcctaaggggcaacctggggatccaggtcctcagggacccccaggtttggatgggaagcccggaagagagttttcagaacaatttattcgacaagtttgcacagatgtaataagagcccagctaccagtcttacttcagagtggaagaattagaaattgtgatcattgcctgtcccaacatggctccccgggtattcctgggccacctggtccgataggcccagagggtcccagaggattacctggtttgccaggaagagatggtgttcctggattagtgggtgtccctggacgtccaggtgtcagaggattaaaaggcctaccaggaagaaatggggaaaaagggagccaagggtttgggtatcctggagaacaaggtcctcctggtcccccaggtccagagggccctcctggaataagcaaagaaggtcctccaggagacccaggtctccctggcaaagatggagaccatggaaaacctggaatccaagggcaaccaggccccccaggcatctgcgacccatcactatgttttagtgtaattgccagaagagatccgttcagaaaaggaccaaactattagtgtctgatgcctcattcagcagcctaggcatggtgctttttctgtggtcttttgcatctcaggaagataaccaacagtaatcccttgaaaagaaacttaagtacctcggtgtttttattttttttttcttatggaaaaaaatataaaagatcacatatactgattttaaaggctcctcagtcatttggagcccttggattagcagcattaattaaatctcaagggtttcttgtaaagtccatttatgttaatcaaagttgaatataaaaatccaccattgcctgttagccagtcagttttagtcactgtgaaatatttcacattcagcctccatgca

SEQ ID NO: 121606 - DNA, 6346 bp, Homo sapiens
  Payload ID: 3841
  Gene Symbol: COL22A1
  Gene Name: collagen, type XXII, alpha 1
  Uniprot ID: Q8NFW1
  ENST ID: ENST00000303045
  CDS Start-End: 448-5328
ggggctggccgaggctgcggcgtttctccccaaggaagtgtcttctccgctttccctgttcttctgtttctcacacactttctatctcattctgtaactttcaagcctttccttctaactgtatgtatttagttacttgttttcaagctggttccctctctggccccctggcctggggaaagcctccacacttactgcgggtcttgtttagagtctgagtttgtgagattatttgggggagagtgggcgagtggctgacaggtgacccccaggaggaggattcctggggctggtgtcttctcccagctgctgcttccagtgggcctgggcccaggactggacctccgctggcacccctgagtgcctccctgccaggccatgctgctgtagaccctaacagcgtctcttcctggccaagagaagcctgtccccaagaacaggagagccatggccggcctccgagggaacgctgtggctggcctcctctggatgctgctgctgtggagtgggggcggcggctgccaggctcagcgggcaggttgcaaaagtgtccactacgatctggtcttcctcctggacacctcctccagcgtgggcaaggaggactttgagaaggtccggcagtgggtggccaacctggtggacaccttcgaggtgggccccgaccgcacccgtgtgggggtcgtgcgctacagcgaccggcccaccacggccttcgagttgggactctttggctcgcaggaggaggtcaaggcggctgcccggcgtctcgcctaccacgggggcaacaccaacacgggagacgcgctccgctacatcacggcccgcagcttctccccacacgccggcggccgccccagggaccgcgcctacaagcaggtggccatcctgctcaccgacggccgcagccaggacctggtgctggacgccgcggcggcagcccaccgcgctggcatccgcatctttgccgtgggcgtgggcgaggcactcaaggaggagctggaggagatcgcctcagagcccaagtccgcccacgtcttccacgtgtccgacttcaatgccatcgacaagatccggggcaagctgcggcgccgtctttgtgaaaatgtgctctgtcctagcgttcgtgtagaaggagatcgctttaagcacaccaatggaggaaccaaggaaatcacaggttttgacctgatggatttgttcagtgtgaaggaaatcttggggaagagagagaatggagctcagagttcctatgtacggatgggatccttccctgtggtgcaaagtactgaggatgtgttcccccaaggtttacctgatgagtacgcctttgtcacaaccttccggttcaggaaaacctctcggaaggaagactggtatatctggcaggtcatcgaccagtacagcatcccacaggtctccatccggctggatggtgaaaacaaggcagtcgagtacaacgctgtgggtgccatgaaagatgctgtcagggtggtcttccgaggttctcgggtcaatgacctctttgaccgggactggcacaagatggccctgagcatccaggcccagaacgtctccctgcacattgactgtgcgctggtgcagacactacccatcgaggaacgggagaacattgacatccagggcaagactgtgattggcaagcgcctctacgacagtgtgcccattgactttgacctacagcggattgtgatctattgtgactcgagacacgcagaattggagacttgttgtgatatcccctcgggtccgtgccaggtgaccgtggtgacagagcctccacctccacccccaccccagcggcctcccaccccaggcagtgaacagattgggtttttgaagaccatcaactgctcctgcccagctggagagaagggtgaaatgggagttgctggccccatggggctccctggtccaaagggagacataggagccattgggccggttggcgctcctggacctaagggagagaaaggtgatgtgggcataggaccttttggccaaggggaaaagggtgaaaagggttccctgggcctgcccggcccccctgggagagacggcagcaaaggcatgagaggggagccaggagagctgggagagccggggctgccgggtgaggtcggcatgcgggggccccaaggaccacctggactccccggacctcctggacgtgtcggagctcctggtctccaaggagaacgaggtgaaaagggaactcgaggagaaaagggagagcgaggcctggatggattccctgggaagcctggggacacaggacagcagggcaggcccggcccttctggtgtggcaggaccccagggagaaaagggtgacgtgggacctgcggggccacctggtgtaccaggctcagtggtgcagcaagagggcttgaaaggggaacagggagctccaggacccagaggtcaccaaggcgcccccggtcctccaggagctcggggtccaataggcccagaaggcagggatggacctcctggtttgcaaggtctccgagggaagaaaggtgacatgggaccacctggaatccctggattgctggggctgcagggccctccaggaccccctggtgtcccaggcccccctggaccgggaggttctccgggtttgcctggagagatcggcttcccgggaaagcctggacctcctgggcccacgggaccccctggaaaggacgggccaaatggaccaccaggtccgccaggaaccaagggagaaccaggagaaagaggggaagatggtctgcctggaaaaccaggccttcggggagaaattggggagcagggcctggcaggccgacctggagagaagggagaagcaggcctcccaggggctccaggcttcccaggtgtgagaggagagaaaggagaccagggagaaaaaggtgaactgggacttccaggactgaaaggtgaccgaggtgaaaagggtgaagctggtcctgcaggccctcccgggttacctggaactacatccctgttcacaccacatccacggatgcccggagaacaagggcccaaaggagagaagggcgatccaggcctgcctggggaaccgggactgcagggccgtcctggagaattggggcctcagggacccactggaccaccgggtgccaagggacaggaaggtgcacatggggctcctggagcagctggaaaccccggtgctcccggacatgtcggtgcccccggtcccagtggccctccaggaagtgtgggtgctcccggcctcagaggcaccccagggaaagatggggagcgtggtgagaagggtgcagcgggggaagaaggcagcccagggccagttggtcccaggggagatcctggtgctcctgggctccctgggccacccggaaaagggaaggatggagagccgggactccgtggatcacctggactccctggacccctaggaaccaaggctgcttgcggaaaagtcagagggtcagaaaactgtgcactgggagggcaatgtgttaagggggatcgaggagctcctgggatccctggttctcctggcagccgtggtgacccaggcattggggttgctggccctcctggcccttccggaccaccaggagacaaaggatccccgggatcacgaggcttacctggattccctggcccccagggcccagccggccgggacggtgcaccaggaaatccaggagaaagagggcctcctggcaagccgggcctctcttcactactgtctccaggggacataaatctcttggctaaggatgtgtgcaatgactgccctcctggccccccaggcctccctggtctaccaggttttaaaggggacaaaggtgtcccaggaaagccagggagagaaggcacagaagggaaaaagggagaggctgggcctccaggcctaccagggcccccaggaatagctggaccacagggaagtcaaggagaacgtggtgcagatggtgaggttgggcagaaaggtgatcagggtcatcctggagttccaggtttcatggggcccccagggaaccctgggccaccaggggcagatggaattgcaggagctgctggaccaccaggaatccaagggtcacctgggaaagaaggccctcctggcccccaaggcccatctggattacccggaatcccaggagaagaaggcaaagagggcagagatggaaagccgggtccccctggagagccgggcaaagcaggagagccaggtctaccaggaccagagggtgcccgaggcccacctggcttcaagggacacacaggcgattctggtgcacccggtccccggggagagtctggtgccatggggcttcctggtcaggaagggttaccaggaaaagatggtgacactggacccactgggccacagggtccccaaggaccaaggggcccaccgggcaagaatggatcaccgggatctccaggagagcctggcccttcaggaacccctggccagaaaggaagcaaaggggaaaatggcagcccaggacttcctggcttcctgggtccccgtgggcctccgggagaaccaggagagaaaggagtcccaggcaaggagggggtccctgggaagcctggagagcctggattcaaaggagaaaggggagatcctgggatcaaaggtgacaaaggacctcctggtggaaaaggccagcctggggaccctggaatcccaggccacaaaggccacacaggcctgatgggtccccaaggactacctggggagaatggaccagttggacccccagggcctccaggccagccgggatttccaggactgaggggggagtctccatccatggaaaccctgcgtcggcttattcaagaagagctggggaagcagcttgaaaccagactcgcctacctcctggcccagatgcccccggcgtacatgaagtcatctcaaggcagacctgggcccccagggccccctggaaaagatgggcttccaggccgggccggccccatgggggagccaggtcgtcctgggcaggggggtctggaaggaccctctggacccataggtcccaaaggtgagcgaggagccaaaggtgacccaggtgcacctggagttggcctccgaggcgagatgggaccccctggaatcccaggtcaacccggggaacctggctatgctaaagatggacttcctgggatccctggccctcaaggggagacaggaccagctggacatcctggcctcccaggacctcccggtcccccaggccaatgtgacccttcccagtgtgcctacttcgccagccttgctgcccggccgggtaatgtgaagggtccctaaaggactctggaaagccagaagactgcagtggatttctgaaacttgaactcagagcccagtgggaagccagaggtcttgaaagacttcagccatgtgttccttttttttttctttcttttatcgtttgctttttgttttattttcttgagagacctcaaaattattaaatccaacagacgctgccggtcggtcagattattattaatattattgttgttgttaattattattattatttcatatgctgatgctttgtgagttcttttccactcctttaaagttgggaaaacttgattcgtggggcaggagattgtttcttcattcttctgacagcccccatctgacgcgtaactgcccattttaaggaaactcttggtgctacaaaaccctgaccagacacttggcaaatttacctctttcttcaaaagaaaaactttaagaaaatgagccaatgggcttcattctcagtcatgcccggagatcacccaggagaaataatacaaacaccaccactgtccagagagagtaaagaagcagaaagagaaagaatttgcaaccatgaggaatgttcccacctcccgacgggacgtgcatttggaaaacacagaatcagccctcagggtgcactccagccacctcagtgctctaagctcacagaagtgaaataatgtctgtgggttggcaatggctttgtgggatcatatgtcttggccaaagatgggaaaacctatgttgaagaggcagcccttgagtgttaatttgtcttctaaactgtgtaaggccccttcaagttcctcttgttggtttcaattatattaattataaaacaagtggatgtggtgaccatccacttgtgtttccctaatgatgggcagttggccagggcactgaccagagctgggaaatttgtatctccaaggcggctctgtctctgaaataaatggcatcaagtgcatgtgtgtatgcgacatgccctgcctgaacaggtgctcaataaatccaagtttccttctcttga

SEQ ID NO: 121607 - DNA, 4355 bp, Homo sapiens
  Payload ID: 3841
  Gene Symbol: COL22A1
  Gene Name: collagen, type XXII, alpha 1
  Uniprot ID: Q8NFW1
  ENST ID: ENST00000435777
  CDS Start-End: 40-3999
cctggccaagagaagcctgtccccaagaacaggagagccatggccggcctccgagggaacgctgtggctggcctcctctggatgctgctgctgtggagtgggggcggcggctgccaggctcagcgggcaggttgcaaaagtgtccactacgatctggtcttcctcctggacacctcctccagcgtgggcaaggaggactttgagaaggtccggcagtgggtggccaacctggtggacaccttcgaggtgggccccgaccgcacccgtgtgggggtcgtgcgctacagcgaccggcccaccacggccttcgagttgggactctttggctcgcaggaggaggtcaaggcggctgcccggcgtctcgcctaccacgggggcaacaccaacacgggagacgcgctccgctacatcacggcccgcagcttctccccacacgccggcggccgccccagggaccgcgcctacaagcaggtggccatcctgctcaccgacggccgcagccaggacctggtgctggacgccgcggcggcagcccaccgcgctggcatccgcatctttgccgtgggcgtgggcgaggcactcaaggaggagctggaggagatcgcctcagagcccaagtccgcccacgtcttccacgtgtccgacttcaatgccatcgacaagatccggggcaagctgcggcgccgtctttgtgaaaatgtgctctgtcctagcgttcgtgtagaaggagatcgctttaagcacaccaatggaggaaccaaggaaatcacaggttttgacctgatggatttgttcagtgtgaaggaaatcttggggaagagagagaatggagctcagagttcctatgtacggatgggatccttccctgtggtgcaaagtactgaggatgtgttcccccaaggtttacctgatgagtacgcctttgtcacaaccttccggttcaggaaaacctctcggaaggaagactggtatatctggcaggtcatcgaccagtacagcatcccacaggtctccatccggctggatggtgaaaacaaggcagtcgagtacaacgctgtggcaggaccccagggagaaaagggtgacgtgggacctgcggggccacctggtgtaccaggctcagtggtgcagcaagagggcttgaaaggggaacagggagctccaggacccagaggtcaccaaggcgcccccggtcctccaggagctcggggtccaataggcccagaaggcagggatggacctcctggtttgcaaggtctccgagggaagaaaggtgacatgggaccacctggaatccctggattgctggggctgcagggccctccaggaccccctggtgtcccaggcccccctggaccgggaggttctccgggtttgcctggagagatcggcttcccgggaaagcctggacctcctgggcccacgggaccccctggaaaggacgggccaaatggaccaccaggtccgccaggaaccaagggagaaccaggagaaagaggggaagatggtctgcctggaaaaccaggccttcggggagaaattggggagcagggcctggcaggccgacctggagagaagggagaagcaggcctcccaggggctccaggcttcccaggtgtgagaggagagaaaggagaccagggagaaaaaggtgaactgggacttccaggactgaaaggtgaccgaggtgaaaagggtgaagctggtcctgcaggccctcccgggttacctggaactacatccctgttcacaccacatccacggatgcccggagaacaagggcccaaaggagagaagggcgatccaggcctgcctggggaaccgggactgcagggccgtcctggagaattggggcctcagggacccactggaccaccgggtgccaagggacaggaaggtgcacatggggctcctggagcagctggaaaccccggtgctcccggacatgtcggtgcccccggtcccagtggccctccaggaagtgtgggtgctcccggcctcagaggcaccccagggaaagatggggagcgtggtgagaagggtgcagcgggggaagaaggcagcccagggccagttggtcccaggggagatcctggtgctcctgggctccctgggccacccggaaaagggaaggatggagagccgggactccgtggatcacctggactccctggacccctaggaaccaagggggatcgaggagctcctgggatccctggttctcctggcagccgtggtgacccaggcattggggttgctggccctcctggcccttccggaccaccaggagacaaaggatccccgggatcacgaggcttacctggattccctggcccccagggcccagccggccgggacggtgcaccaggaaatccaggagaaagagggcctcctggcaagccgggcctctcttcactactgtctccaggggacataaatctcttggctaaggatgtgtgcaatgactgccctcctggccccccaggcctccctggtctaccaggttttaaaggggacaaaggtgtcccaggaaagccagggagagaaggcacagaagggaaaaagggagaggctgggcctccaggcctaccagggcccccaggaatagctggaccacagggaagtcaaggagaacgtggtgcagatggtgaggttgggcagaaaggtgatcagggtcatcctggagttccaggtttcatggggcccccagggaaccctgggccaccaggggcagatggaattgcaggagctgctggaccaccaggaatccaagggtcacctgggaaagaaggccctcctggcccccaaggcccatctggattacccggaatcccaggagaagaaggcaaagagggcagagatggaaagccgggtccccctggagagccgggcaaagcaggagagccaggtctaccaggaccagagggtgcccgaggcccacctggcttcaagggacacacaggcgattctggtgcacccggtccccggggagagtctggtgccatggggcttcctggtcaggaagggttaccaggaaaagatggtgacactggacccactgggccacagggtccccaaggaccaaggggcccaccgggcaagaatggatcaccgggatctccaggagagcctggcccttcaggaacccctggccagaaaggaagcaaaggggaaaatggcagcccaggacttcctggcttcctgggtccccgtgggcctccgggagaaccaggagagaaaggagtcccaggcaaggagggggtccctgggaagcctggagagcctggattcaaaggagaaaggggagatcctgggatcaaaggtgacaaaggacctcctggtggaaaaggccagcctggggaccctggaatcccaggccacaaaggccacacaggcctgatgggtccccaaggactacctggggagaatggaccagttggacccccagggcctccaggccagccgggatttccaggactgaggggggagtctccatccatggaaaccctgcgtcggcttattcaagaagagctggggaagcagcttgaaaccagactcgcctacctcctggcccagatgcccccggcgtacatgaagtcatctcaaggcagacctgggcccccagggccccctggaaaagatgggcttccaggccgggccggccccatgggggagccaggtcgtcctgggcaggggggtctggaaggaccctctggacccataggtcccaaaggtgagcgaggagccaaaggtgacccaggtgcacctggagttggcctccgaggcgagatgggaccccctggaatcccaggtcaacccggggaacctggctatgctaaagatggacttcctgggatccctggccctcaaggggagacaggaccagctggacatcctggcctcccaggacctcccggtcccccaggccaatgtgacccttcccagtgtgcctacttcgccagccttgctgcccggccgggtaatgtgaagggtccctaaaggactctggaaagccagaagactgcagtggatttctgaaacttgaactcagagcccagtgggaagccagaggtcttgaaagacttcagccatgtgttccttttttttttctttcttttatcgtttgctttttgttttattttcttgagagacctcaaaattattaaatccaacagacgctgccggtcggtcagattattattaatattattgttgttgttaattattattattatttcatatgctgatgctttgtgagttcttttccactcctttaaagttgggaaaacttgattcgtggggcaggagattgtttcttcattcttctgacagcccccatctgacgcgtaactgcc

SEQ ID NO: 121608 - DNA, 554 bp, Homo sapiens
  Payload ID: 3841
  Gene Symbol: COL22A1
  Gene Name: collagen, type XXII, alpha 1
  ENST ID: ENST00000522546
  CDS Start-End: 1-198
ggggagccaggagagctgggagagccggggctgccgggtgaggtcggcatgcgggggccccaaggaccacctggactccccggacctcctggacgtgtcggagctcctgtaagtgaaggcacttgtctgggcaggggttctaccccttctccaggaatcaaaaaccaggttctagcaagttcctccacctgcatctagacagtaatgctgttttgccttactgatgccaatgaagtgttggtatctcctttcttagaccagaaattattagatgttacagtccataagaatcacccagagaacaagtttaaatgcatattcctgggacccctttctcacatcaagaagcagggtagatcccaggaatctgcatttttaaccagcaccacaggatttttgacacttgatctaaagaattcattttccccagcctgtcctgtactgtactcttgtaagaagggtggagtctactgaattcttagcccctggaacagtgccagactgtccagtatggtgttcagtatgtccagtgaataaagagatgaacaaacaga

SEQ ID NO: 121609 - DNA, 3061 bp, Homo sapiens
  Payload ID: 3842
  Gene Symbol: COL23A1
  Gene Name: collagen, type XXIII, alpha 1
  Uniprot ID: Q86Y22
  ENST ID: ENST00000390654
  CDS Start-End: 359-1981
agaggtgcgcgctgcgcgtgggatcagcccggcgccgacgggtggctccgaggagctcgctccttcctcgcccccgccccctcgccgcgcggggccagcccggccgctcctcccctgggtgggtccctgctccttttctggcagggtctatttgcatagaggaaactgcccaaagtggccgctgtggaggagctggctgcggcgaagggggcgtgcgcggcgatccgctgctacccggaggctaacccccgcgcccggcggacctcgtgcctcgggctgtcccgcctgctcctctcgcacccagcctctgccccagcagcaccgccccctcggagagtccacgcgcgacgaacgcgccatgggcccaggcgagcgcgccggtggcggcggcgacgcggggaagggcaatgcggcgggcggcggcggcggagggcgctcggcgacgacggccgggtcccgggcggtgagcgcgctgtgcctgctgctctccgtgggctcggcggctgcctgcctgctgctgggtgtccaggcggccgcgctgcagggccgggtggcggcgctcgaggaggagcgggagctgctgcggcgcgcggggccgccaggcgccctggacgcctgggccgagccgcacctggagcgcctgctgcgggagaagttggacggactagcgaagatccggactgctcgggaagctccatccgaatgtgtctgccccccagggccccctggacggcgcggcaagcctgggagaagaggcgaccctggtcctccagggcaatcaggacgagatggctacccgggacccctgggtttggatggcaagcccggacttccaggcccgaaaggggaaaagggtgcaccaggagactttggcccccggggagaccaaggacaagatggagctgctgggcctccggggccccctggacctcctggggcccggggccctcctggcgacactgggaaagatggccccaggggagcacaaggcccagcgggccccaaaggagagcccggacaagacggcgagatgggcccaaagggacccccagggcccaagggtgagcctggagtacctggaaagaagggcgacgatgggacaccaagccagcctggaccaccagggcccaagggcgagccagggagcatggggcctcggggagagaacggtgtggacggtgccccaggaccgaagggggagcctggccaccgaggcacggatggagctgcagggccccggggtgccccaggcctcaagggcgagcagggagacacagtggtgatcgactatgatggcaggatcttggatgccctcaaggggcctcccggaccacaggggcccccagggccaccagggatccctggagccaagggcgagcttggattgcccggtgccccaggaatcgatggagagaagggccccaaaggacagaaaggagacccaggagagcctgggccagcaggactcaaaggggaagcaggcgagatgggcttgtccggcctcccgggcgctgacggcctcaagggggagaagggggagtcggcgtctgacagcctacaggagagcctggctcagctcatagtggagccagggccccctggcccccctggccccccaggcccgatgggcctccagggaatccagggtcccaagggcttggatggagcaaagggagagaagggtgcgtcgggtgagagaggccccagcggcctgcctgggccagttggcccaccgggccttattgggctgccaggaaccaaaggagagaagggcagacccggggagccaggactagatggtttccctggaccccgaggagagaaaggtgatcggagcgagcgtggagagaagggagaacgaggggtccccggccggaaaggagtgaagggccagaagggcgagccgggaccaccaggcctggaccagccgtgtcccgtgggccccgacgggctgcctgtgcctggctgctggcataagtgacccacaggcccagctcacacctgtacagatccgtgtggacatttttaatttttgtaaaaacaaaacagtaatatattgatcttttttcatggaatgcgctacctgtggccttttaacattcaagagtatgcccacccagccccaaagccaccggcatgtgaagctgccggaaagtggacaggccagaccagggagatgtgtacctgaggggcacccttgggcctgggctttcccaggaaggagatgaaggtagaagcacctggctcgggcaaggctagaaagatgctacgttgggccttcagtcacctgatcagcagagagactctcagctgtggtactgccctgtaagaacctgcccccgcaaaactctggagtccctgggacacaccctatccaagaagacccaggggtggaacagcggctgctgttgctcctggcctcatcagcctccaaactcaaccacaaccagctgcctctgcagttggacaagacttggcccccggacaagactcgcccagcacttgcggctgggcccggggagcagtgagtggaaatcccccacgagggtctagctctaccacattcaggaggcctcaggaggccagcctgccatgagagcacatgtcctctggccaggagtagtggctgagctctgtgatcgctgtgatgtggacccagctccagggagcagagtgtcgaggatggaggggcccagcctggactgactgctacttcctgtctctgtttccattatcacccagagagggacaagataggacatggcctggaccagggaggcaggcctcccactcagagtctgggtctcactggccccaagtctcccacccagaactctggccaaaaatggctctctaggtgggctgtgcaggcaaagcaaagctcagggctggttcccagctggcctgagcagggggcctgccaccagacccacccacgctctgacgagaggcttttccacctccagcaagtgttcccagcaaccagctccatcctggctgcttgccttccatttccgtgtagatggagatcactgtgtgtaataaaccacaagtgcgtgtc

SEQ ID NO: 121610 - DNA, 2329 bp, Homo sapiens
  Payload ID: 3842
  Gene Symbol: COL23A1
  Gene Name: collagen, type XXIII, alpha 1
  ENST ID: ENST00000407622
  CDS Start-End: 70-1251
tgttttcctgtctagggccccctggacggcgcggcaagcctgggagaagaggcgaccctggttttccagggacccctgggtttggatggcaagcccggacttccaggcccgaaaggggaaaagggtgcaccaggagactttggcccccggggagaccaaggacaagatggagctgctgggcctccggggccccctggacctcctggggcccggggccctcctggcgacactgggaaagatggccccaggggagcacaaggcccagcgggccccaaaggagagcccggacaagacggcgagatgggcccaaagggacccccagggcccaagggtgagcctggagtacctggaaagaagggcgacgatgggacaccaagccagcctggaccaccagggcccaagggcgagccagggagcatggggcctcggggagagaacggtgtggacggtgccccaggaccgaagggggagcctggccaccgaggcacggatggagctgcagggccccggggtgccccaggcctcaagggcgagcagggagacacagtggtgatcgactatgatggcaggatcttggatgccctcaaggggcctcccggaccacaggggcccccagggccaccagggatccctggagccaagggcgagcttggattgcccggtgccccaggaatcgatggagagaagggccccaaaggacagaaaggagacccaggagagcctgggccagcaggactcaaaggggaagcaggcgagatgggcttgtccggcctcccgggcgctgacggcctcaagggggagaagggggagtcggcgtctgacagcctacaggagagcctggctcagctcatagtggagccagggccccctggcccccctggccccccaggcccgatgggcctccagggaatccagggtcccaagggcttggatggagcaaagggagagaagggtgcgtcgggtgagagaggccccagcggcctgcctgggccagttggcccaccgggccttattgggctgccaggaaccaaaggagagaagggcagacccggggagccaggactagatggtttccctggaccccgaggagagaaaggtgatcggagcgagcgtggagagaagggagaacgaggggtccccggccggaaaggagtgaagggccagaagggcgagccgggaccaccaggcctggaccagccgtgtcccgtgggccccgacgggctgcctgtgcctggctgctggcataagtgacccacaggcccagctcacacctgtacagatccgtgtggacatttttaatttttgtaaaaacaaaacagtaatatattgatcttttttcatggaatgcgctacctgtggccttttaacattcaagagtatgcccacccagccccaaagccaccggcatgtgaagctgccggaaagtggacaggccagaccagggagatgtgtacctgaggggcacccttgggcctgggctttcccaggaaggagatgaaggtagaagcacctggctcgggcaaggctagaaagatgctacgttgggccttcagtcacctgatcagcagagagactctcagctgtggtactgccctgtaagaacctgcccccgcaaaactctggagtccctgggacacaccctatccaagaagacccaggggtggaacagcggctgctgttgctcctggcctcatcagcctccaaactcaaccacaaccagctgcctctgcagttggacaagacttggcccccggacaagactcgcccagcacttgcggctgggcccggggagcagtgagtggaaatcccccacgagggtctagctctaccacattcaggaggcctcaggaggccagcctgccatgagagcacatgtcctctggccaggagtagtggctgagctctgtgatcgctgtgatgtggacccagctccagggagcagagtgtcgaggatggaggggcccagcctggactgactgctacttcctgtctctgtttccattatcacccagagagggacaagataggacatggcctggaccagggaggcaggcctcccactcagagtctgggtctcactggccccaagtctcccacccagaactctggccaaaaatggctctctaggtgggctgtgcaggcaaagcaaagctcagggctggttcccagctggcctgagcagggggcctgccaccagacccacccacgctctgacgagaggcttttccacctccagcaagtgttcccagcaaccagctccatcctggctgcttgccttccatttccgtgtagatggagatcactgtgtgtaataaaccacaagtgcgtg

SEQ ID NO: 121611 - DNA, 6825 bp, Homo sapiens
  Payload ID: 3843
  Gene Symbol: COL24A1
  Gene Name: collagen, type XXIV, alpha 1
  Uniprot ID: Q17RW2
  ENST ID: ENST00000370571
  CDS Start-End: 368-5512
acagagtcgcctttgaaccgcaagtgaacttgagtgctgcactagcagcccggctcccgctgccgccggcgccccgaggcctcccagtgaggtttacctcctcgcccgccctccccggggagcgcaaccctgggctcgttcgttaccgagccagagagctaggaagcctgtcctccccttcgggtgctatttcctacctcctcccgacttcaccccctcccctcctttttttcttgttgcgggtttgaagcatggttttcatgtgattgttttttccctttttcatggacagtacctgcaccctaagcagttcagagttggcttctgttttccgttagcgctttgctgcacggacaaatgcatacaaatgcatttaagagcccacagaacaaggcgtggaaaagtctcccccacggcaaaaacgaaatcacttcttcattttattgtactatgtgtggctggggtggttgttcatgcacaagaacaaggcatagatattcttcatcaactaggccttggaggcaaagacgtaagacactcatcaccagcgactgctgtaccatcagcatctacaccgttacctcagggggtccatttaacagaatcaggagtcatttttaaaaatgatgcttatatcgagacacctttcgtgaaaattttaccagtcaacttggggcagccgtttacaatattaactgggttacagtcacatcgggtgaacaatgcatttctcttcagcattagaaataaaaatagactgcaattaggagtacaattactacctaaaaaattagtagtacacattagaggaaagcagcctgcagttttcaactacagtgttcatgatgagcaatggcactcatttgccattactattagaaaccaaagtgtctcaatgtttgttgagtgtggaaagaaatattttagcacagagactattccagaagttcagacctttgattctaatagtgtgtttactttaggaagtatgaataataattctatccattttgaaggaatagtatgtcagttagatattattccttctgcagaagcatctgcagactactgcagatatgtgaaacagcagtgtcgccaagcagacaaataccaacctgaaacaagcattccttgtacaactctcataccaacaaagataccggaacactctcccccgcccaaactatttgctgaaaaagtactgtcagaggatacatttactgaaggcaaaagcattccaaatatcataaaaaatgattctgaaaccgtgtataaaagacaagaacaccagatatcaagatctcagttatcttctcttcagtcaggaaatgtctctgctgtggatctcacaaaccatgggattcaggccaaagaaatgatcactgaggaagatactcagacaaatttcagcctgtcagtgaccactcatcgcatcagtgaggcaaaaatgaataccaaagagaaatttagctctctcctaaacatgtctgacaatatcacacaacatgatgatagagtaactggtctgtcactgtttaagaagatgccatctattcttccacaaattaaacaagatacaattactaatctcaagaaggctatcacagcaaatctacacactaacgaactcatggaaatgcaaccaattttaaacacaagcttgcatagagtgacaaatgagccatctgtggataatcaccttgatctaaggaaagaaggtgaattttatcctgatgctacttatcccatcgaaaatagctatgaaactgagctttatgattattattattatgaggatctaaatacaatgcttgaaatggagtatctgagagggccaaaaggagacactggacctcccggtccacctggtccagcaggtatcccaggtccgtcagggaagagaggtccacggggcataccagggccacatggaaatcctggtttacctggattacctggtccaaagggccccaaaggagatccaggattttccccaggtcaacctgttcctggagaaaagggtgatcaaggcctttctggattaatgggcccccctggtatgcaaggtgataagggtctcaaaggacatcctggactcccaggacttccaggtgaacaaggaattccaggatttgctggtaatattggttcacccggttaccctggcaggcagggtttagctggaccagaaggtaatccaggtcctaaaggtgcacaaggttttattggctctcctggagaagcgggacaactgggacctgaaggagaacggggcattcctgggatccgtggaaagaagggttttaaggggagacagggttttccaggtgactttggagacagaggccctgctggtcttgatggcagtcctggacttgtaggtggcactggtcctccggggtttcctgggcttagaggcagtgttggccctgtgggaccaattggacctgctggaattcctggcccaatgggcctttcagggaataaaggactacctggaatcaaaggtgataagggtgaacaaggcacagcaggagagctaggagaacccgggtatcctggagacaagggtgctgttggtttaccaggaccaccagggatgagaggaaagtcagggccttcaggccaaacaggtgacccaggactccaaggaccatctggccctccaggaccagagggttttccaggagatattgggattcctggacaaaacggccctgaaggaccaaagggactccttggaaatagaggacctcctggacctcctggtctcaaaggaactcagggagaagaaggaccaattggagcctttggggaactggggccaagaggaaaaccaggtcaaaaggggtatgcaggtgaaccaggaccagaaggcttaaagggagaagtaggagatcaaggaaatattggaaaaattggtgaaacaggacctgttggcttacctggagaagttgggatgactggaagcattggcgaaaagggagaacgtggaagtccaggcccactaggtccgcagggagaaaaaggtgttatgggatatccaggtcctcctggggttccaggacctatcggtccattgggattacctggtcatgtgggggcaagaggaccacctgggagtcaaggtcctaaaggacaaagaggatcaagaggaccagatggtctcttaggggaacaaggtatacaaggtgccaagggtgaaaaaggagatcaaggaaaaagagggcctcatggtcttattggtaagactggaaaccctggagaaagaggatttcaagggaaaccaggtttacagggattgcctggaagtacaggtgacagaggacttccaggagagccaggactgcgaggactgcaaggtgatgttggacctcctggagaaatgggcatggagggacctccaggcactgagggagagtctggtctgcaaggtgaaccaggtgcaaagggagatgttggaactgctggcagtgttggaggaactggggaaccaggtttacggggtgaaccaggagctcctggagaagaaggtctccagggaaaagatgggttaaagggagtaccaggaggaaggggacttcctggagaggatggagaaaaaggagagatgggcttaccaggaattataggacccttgggtagatcaggccaaacaggccttccgggacctgaaggaattgtgggaattccagggcaaagaggtcgtccaggaaaaaagggtgataaaggacaaataggacccacaggagaagttggaagcagaggtcctcctggaaaaattgggaaaagtggtcctaagggtgccagaggaactagaggtgctgtgggacatttaggattgatgggacctgatggagaaccaggaattccagggtacaggggccatcagggccaaccaggaccctctggattgccaggacctaaaggagaaaagggctacccaggagaagatagcacagtcctaggaccacctgggcctcgaggtgaaccaggtccagtgggggaccaaggagagagaggagagcctggagcagagggatataagggccatgtgggtgtaccaggactaagaggtgccactggacaacaaggacccccaggcgaaccaggtgaccagggtgaacaaggactaaaaggagagagaggatctgaaggtaataaggggaaaaaaggagctcctggtccttctgggaaacctgggattcctggacttcaaggcctacttgggccaaaaggcatacaaggataccatggagcagatggcatttcaggaaaccctggaaaaattgggccaccaggaaaacagggacttcctggcatcagaggcggcccaggaagaacaggtcttgctggggctccaggtcctccaggagtaaagggttcatcaggcttgccaggaagcccaggaattcaaggcccaaagggtgaacaagggctacctggtcaacctggaattcaaggtaaaagaggtcaccgaggagcacaaggtgatcaaggaccatgtggagaccctggcctgaaagggcagcctggagaatatggtgttcaaggtttgacaggtttccaaggattcccaggccctaaaggtcctgaaggggatgctggcattgttgggatatcaggtcctaaaggtcctattggacacagaggaaacactggtccccttggcagagaaggtataataggcccaacaggtagaactggacccagaggtgaaaagggctttagaggtgaaactggtcctcaaggaccaagaggtcaaccagggcctccaggtccacctggagcaccaggcccaagaaagcaaatggatatcaatgctgctattcaagccttgattgaatcaaatactgccctacagatggagagctaccagaatactgaagtgactttaattgaccacagtgaagagatattcaaaaccctgaactaccttagcaatttattgcacagcatcaagaatcctcttggcacacgagataacccagcacgaatctgcaaagatttacttaactgtgaacaaaaagtatcagatggaaaatactggattgacccaaatcttggctgtccttcagatgccattgaggttttctgcaatttcagtgctggtggccagacatgcttacctcctgtttctgtaacaaagttggagtttggagttgggaaagtccagatgaacttccttcatttactgagttcggaagccacccatatcatcaccattcactgtctaaacaccccaaggtggacaagcacacaaacaagtggcccaggattgcctattggtttcaagggatggaatggccagatttttaaagtaaacactctacttgaacctaaagtgctttcagatgactgcaagattcaagatggcagctggcataaggcaacatttctttttcacacccaggaacctaatcaacttccagtgattgaagtacaaaaacttcctcatctcaaaactgaacgaaagtattacattgacagcagttctgtatgctttctgtaaagtctctgaattagttccgaattcaggctgttggccaggtaattgctgcagagggagaaataagacagacagatacagtcattatgaaatgcatgtaataaagcattggctaaatcttaaagaatctcaggaagaacagacttcctcctaagaaggagaaaaggcatttttaaaggactatgattgataaagtatttaattcttttaaaaattatattcatctcagctttcttagagaattccctagaactaaaaatttataaatatggaattcttcagggtatcttatatttttgactgagtgcgtagtacccattagacagctggagatgcagagcactatggagcaatactggctaatgcttccagatgtgcactgcttctgtctaaaaattacaagccacagtctaatatgtcttattttccaaaacactaagctgtattcaggtccccgatgggcatatacatcttagccggtgatacactacctcttacgtgttgcctctttgtgttgcttggtgctctttcgaaaacaaggtgcttatggctttcatagactatttcctttttcatctttgtcattctttaaaagtgtatgtactggttacatcaagatatgttttggttgttagtacttattttaatttgtttggtcacacacttaataacacgtgaaactatttatgtgaagtccttgttttattttaaaattctctttgtgtatttggaatcaaagccagcacattgtaacctgtgcttgtacgcaaaagaattagatttctttgtttttgttttattttttaaattgttgtaaaaattattataggccagctacatctagtagtaggtttggggtacagattgggggttgtgccatactgtttttaaagttcatgatcatctggaatgatacttagtgtatatatattttgtaaagttttaattcagcaaattttttgaaattgctgctgttttaaattataaaacctttatatttctgctttgtagaaattatatgttttgtagtattcattgattttctttcactgtacttaaatttagtgttagtactttaaaatttttaatttaccagtctttaaagcaacatccagaaaaaaaaaagtcttttcccatttaaaataggctcagccagttcaatgtctccttgttatcagagaaatattagttcaatactgaaagaaaaatattatacctcttggtatctagaaaagcttgttcatccattataaatatatctttagccacagcaaaccacacttaacctatctataataaaaatgtgctttaaataa

SEQ ID NO: 121612 - DNA, 6036 bp, Homo sapiens
  Payload ID: 3843
  Gene Symbol: COL24A1
  Gene Name: collagen, type XXIV, alpha 1
  ENST ID: ENST00000426639
  CDS Start-End: 368-3040
acagagtcgcctttgaaccgcaagtgaacttgagtgctgcactagcagcccggctcccgctgccgccggcgccccgaggcctcccagtgaggtttacctcctcgcccgccctccccggggagcgcaaccctgggctcgttcgttaccgagccagagagctaggaagcctgtcctccccttcgggtgctatttcctacctcctcccgacttcaccccctcccctcctttttttcttgttgcgggtttgaagcatggttttcatgtgattgttttttccctttttcatggacagtacctgcaccctaagcagttcagagttggcttctgttttccgttagcgctttgctgcacggacaaatgcatacaaatgcatttaagagcccacagaacaaggcgtggaaaagtctcccccacggcaaaaacgaaatcacttcttcattttattgtactatgtgtggctggggtggttgttcatgcacaagaacaaggcatagatattcttcatcaactaggccttggaggcaaagacgtaagacactcatcaccagcgactgctgtaccatcagcatctacaccgttacctcagggggtccatttaacagaatcaggagtcatttttaaaaatgatgcttatatcgagacacctttcgtgaaaattttaccagtcaacttggggcagccgtttacaatattaactgggttacagtcacatcgggtgaacaatgcatttctcttcagcattagaaataaaaatagactgcaattaggagtacaattactacctaaaaaattagtagtacacattagaggaaagcagcctgcagttttcaactacagtgttcatgatgagcaatggcactcatttgccattactattagaaaccaaagtgtctcaatgtttgttgagtgtggaaagaaatattttagcacagagactattccagaagttcagacctttgattctaatagtgtgtttactttaggaagtatgaataataattctatccattttgaaggaatagtatgtcagttagatattattccttctgcagaagcatctgcagactactgcagatatgtgaaacagcagtgtcgccaagcagacaaataccaacctgaaacaagcattccttgtacaactctcataccaacaaagataccggaacactctcccccgcccaaactatttgctgaaaaagtactgtcagaggatacatttactgaaggcaaaagcattccaaatatcataaaaaatgattctgaaaccgtgtataaaagacaagaacaccagatatcaagatctcagttatcttctcttcagtcaggaaatgtctctgctgtggatctcacaaaccatgggattcaggccaaagaaatgatcactgaggaagatactcagacaaatttcagcctgtcagtgaccactcatcgcatcagtgaggcaaaaatgaataccaaagagaaatttagctctctcctaaacatgtctgacaatatcacacaacatgatgatagagtaactggtctgtcactgtttaagaagatgccatctattcttccacaaattaaacaagatacaattactaatctcaagaaggctatcacagcaaatctacacactaacgaactcatggaaatgcaaccaattttaaacacaagcttgcatagagtgacaaatgagccatctgtggataatcaccttgatctaaggaaagaaggtgaattttatcctgatgctacttatcccatcgaaaatagctatgaaactgagctttatgattattattattatgaggatctaaatacaatgcttgaaatggagtatctgagagggccaaaaggagacactggacctcccggtccacctggtccagcaggtatcccaggtccgtcagggaagagaggtccacggggcataccagggccacatggaaatcctggtttacctggattacctggtccaaagggccccaaaggagatccaggattttccccaggtcaacctgttcctggagaaaagggtgatcaaggcctttctggattaatgggcccccctggtatgcaaggtgataagggtctcaaaggacatcctggactcccaggacttccaggtgaacaaggaattccaggatttgctggtaatattggttcacccggttaccctggcaggcagggtttagctggaccagaaggtaatccaggtcctaaaggtgcacaaggttttattggctctcctggagaagcgggacaactgggacctgaaggagaacggggcattcctgggatccgtggaaagaagggttttaaggggagacagggttttccaggtgactttggagacagaggccctgctggtcttgatggcagtcctggacttgtaggtggcactggtcctccggggtttcctgggcttagaggcagtgttggccctgtgggaccaattggacctgctggaattcctggcccaatgggcctttcagggaataaaggactacctggaatcaaaggtgataagggtgaacaaggcacagcaggagagctaggagaacccgggtatcctggagacaagggtgctgttggtttaccaggaccaccagggatgagaggaaagtcagggccttcaggccaaacaggtgacccaggactccaaggaccatctggccctccaggaccagagggttttccaggagatattgggattcctggacaaaacggccctgaaggaccaaagggactccttggaaatagaggacctcctggacctcctggtctcaaaggaactcagggagaagaaggaccaattggagcctttggggaactggggccaagaggaaaaccaggtcaaaaggggtatgcaggtgaaccaggaccagaaggcttaaagggagaagtaggagatcaaggaaatattggaaaaattggtgaaacaatggagtcttgctctgtcacccaagctggagcacagtggcatgatcttggctcactgcatcctctgcctcccgggttcaagcgattctcctgcctcagcctcccgggatagctggaattacagggacctgttggcttacctggagaagttgggatgactggaagcattggcgaaaagggagaacgtggaagtccaggcccactaggtccgcagggagaaaaaggtgttatgggatatccaggtcctcctggggttccaggacctatcggtccattgggattacctggtcatgtgggggcaagaggaccacctgggagtcaaggtcctaaaggacaaagaggatcaagaggaccagatggtctcttaggggaacaaggtatacaaggtgccaagggtgaaaaaggagatcaaggaaaaagagggcctcatggtcttattggtaagactggaaaccctggagaaagaggatttcaagggaaaccaggtttacagggattgcctggaagtacaggtgacagaggacttccaggagagccaggactgcgaggactgcaaggtgatgttggacctcctggagaaatgggcatggagggacctccaggcactgagggagagtctggtctgcaaggtgaaccaggtgcaaagggagatgttggaactgctggcagtgttggaggaactggggaaccaggtttacggggtgaaccaggagctcctggagaagaaggtctccagggaaaagatgggttaaagggagtaccaggaggaaggggacttcctggagaggatggagaaaaaggagagatgggcttaccaggaattataggacccttgggtagatcaggccaaacaggccttccgggacctgaaggaattgtgggaattccagggcaaagaggtcgtccaggaaaaaagggtgataaaggacaaataggacccacaggagaagttggaagcagaggtcctcctggaaaaattgggaaaagtggtcctaagggtgccagaggaactagaggtgctgtgggacatttaggattgatgggacctgatggagaaccaggaattccagggtacaggggccatcagggccaaccaggaccctctggattgccaggacctaaaggagaaaagggctacccaggagaagatagcacagtcctaggaccacctgggcctcgaggtgaaccaggtccagtgggggaccaaggagagagaggagagcctggagcagagggatataagggccatgtgggtgtaccaggactaagaggtgccactggacaacaaggacccccaggcgaaccaggtgaccagggtgaacaaggactaaaaggagagagaggatctgaaggtaataaggggaaaaaaggagctcctggtccttctgggaaacctgggattcctggacttcaaggcctacttgggccaaaaggcatacaaggataccatggagcagatggcatttcaggaaaccctggaaaaattgggccaccaggaaaacagggacttcctggcatcagaggcggcccaggaagaacaggtcttgctggggctccaggtcctccaggagtaaagggttcatcaggcttgccaggaagcccaggaattcaaggcccaaagggtgaacaagggctacctggtcaacctggaattcaaggtaaaagaggtcaccgaggagcacaaggtgatcaaggaccatgtggagaccctggcctgaaagggcagcctggagaatatggtgttcaaggtttgacaggtttccaaggattcccaggccctaaaggtcctgaaggggatgctggcattgttgggatatcaggtcctaaaggtcctattggacacagaggaaacactggtccccttggcagagaaggtataataggcccaacaggtagaactggacccagaggtgaaaagggctttagaggtgaaactaagcaaatggatatcaatgctgctattcaagccttgattgaatcaaatactgccctacagatggagagctaccagaatactgaagtgactttaattgaccacagtgaagagatattcaaaaccctgaactaccttagcaatttattgcacagcatcaagaatcctcttggcacacgagataacccagcacgaatctgcaaagatttacttaactgtgaacaaaaagtatcagatggaaaatactggattgacccaaatcttggctgtccttcagatgccattgaggttttctgcaatttcagtgctggtggccagacatgcttacctcctgtttctgtaacaaagttggagtttggagttgggaaagtccagatgaacttccttcatttactgagttcggaagccacccatatcatcaccattcactgtctaaacaccccaaggtggacaagcacacaaacaagtggcccaggattgcctattggtttcaagggatggaatggccagatttttaaagtaaacactctacttgaacctaaagtgctttcagatgactgcaagattcaagatggcagctggcataaggcaacatttctttttcacacccaggaacctaatcaacttccagtgattgaagtacaaaaacttcctcatctcaaaactgaacgaaagtattacattgacagcagttctgtatgctttctgtaaagtctctgaattagttccgaattcaggctgttggccaggtaattgctgcagagggagaaataagacagacagatacagtcattatgaaatgcatgtaataaagcattggctaaatcttaaagaatctcaggaagaacagacttcctcctaagaaggagaaaaggcatttttaaaggactatgattgataaagtatttaattcttttaaaaattatattcatctcagctttcttagagaattccctagaactaaaaatttataaatatggaattcttcagggtatcttatatttttgactgagtgcgtagtacccattagacagctggagatgcagagcactatggagcaatactggctaatgcttccagatgtgcactgcttctgtctaaaaattacaagccacagtctaatatgtcttattttccaaaacactaagctgtattcaggtccccgatgggcatat

SEQ ID NO: 121613 - DNA, 784 bp, Homo sapiens
  Payload ID: 3843
  Gene Symbol: COL24A1
  Gene Name: collagen, type XXIV, alpha 1
  ENST ID: ENST00000473734
  CDS Start-End: 1-500
gcatcaagaatcctcttggcacacgagataacccagcacgaatctgcaaagatttacttaactgtgaacaaaaagtatcagatggaaaatactggattgacccaaatcttggctgtccttcagatgccattgaggttttctgcaatttcagtgctggtggccagacatgcttacctcctgtttctgtaacaaaggcattcaccattattacccctgaaatagaagagggaaggatccttccattcctagggaatcatgaacctctaataaagagcagcatgatagtcctacttccaaaatatccacatcatcatcctcattccagtggaagttggcataggattatcatagaaggaaagaagatggggctgtgtgaactgtgcagaggaaataggagcagtggggaagcggactctagttgtttccatgaccaaatcacttctctaatttctttgattcataaactcaacccaaggaagaccagagaagtactgggatgaacagtagacttggaatcagggactggggttctagtctctattctatgaacctagggaataaaactgtgatccaccagagggcctgctctgtgccaggaacaatgctagttggagtttggagttgggaaagtccagatgaacttccttcatttactgagttcggaagccacccatatcatcaccattcactgtctaaacaccccaaggtggacaagcacacaaacaagtggcccaggattgcctattggtttcaagggatggaatggccagatttttaaagtaaa

SEQ ID NO: 121614 - DNA, 366 bp, Homo sapiens
  Payload ID: 3843
  Gene Symbol: COL24A1
  Gene Name: collagen, type XXIV, alpha 1
  ENST ID: ENST00000496682
  CDS Start-End: 123-366
gcgcctgcagttgccaccggccccctcgcaccgacttgatttccgaatacctgcaccctaagcagttcagagttggcttctgttttccgttagcgctttgctgcacggacaaatgcatacaaatgcatttaagagcccacagaacaaggcgtggaaaagtctcccccacggcaaaaacgaaatcacttcttcattttattgtactatgtgtggctggggtggttgttcatgcacaagaacaaggcatagatattcttcatcaactaggccttggaggcaaagacgtaagacactcatcaccagcgactgctgtaccatcagcatctacaccgttacctcagggggtccatttaacagaatcaggag

SEQ ID NO: 121615 - DNA, 2674 bp, Homo sapiens
  Payload ID: 3844
  Gene Symbol: COL25A1
  Gene Name: collagen, type XXV, alpha 1
  Uniprot ID: Q9BXS0
  ENST ID: ENST00000399126
  CDS Start-End: 532-2460
ccgcgacttcggcttcgcgagtagcattggttccttgggtttatttcgttttcctctctcttctccaccttagtcgcccctttcgcgctgcgctgtagcgtgctctcacagcctttttgccttgaactgaatgcaggtgggaaacaggtcggcgtgccgaaagacaccgagtaggtagaaataaggcaaactcacagaggcgcaacaggtccggtcctccgtggccagggcgagccgcggccccgcgtggcgcctcggccgttgccctcggaccctgagcggccactgttggggccctcgaaagaggtgtcggtcctctgggagtcggaagagctgtctgggtgggtttcgtcttgctttttaccccaccgccacccagtccccggacggagggtgcttttcacttccagctgggaggagagaagaaagcggggatggtgcacgcctgcgggtctggacgctgagcaaggcaggggattatttgaggtgtagagggtgggaagcgaagccgagacggccgaccccgccacgatgctgctgaagaagcacgcagggaaaggagggggccgggagcccagatccgaggacccgacccctgccgaacagcattgtgcccggaccatgcccccgtgtgccgtcctggcggccctcctgtcagtggtggccgtggtgtcttgcctgtacctgggtgtgaaaaccaacgacctccaggcgaggatcgccgctctcgaatccgccaaaggggccccttccattcatctgctgcctgataccctggatcacctcaagactatggtgcaagagaaagtggagcgacttctggctcagaaatcctatgaacatatggctaaaataagaatcgcaagagaagcaccttcagaatgtaactgcccagcaggccctccagggaaacgaggtaagagaggccgaagaggagaatctggtcctcctggacagcctggtcctcagggccctcctggtccaaaaggcgataagggagaacaaggtgatcagggacctaggatggtgtttcctaaaatcaatcatgggtttctctctgctgatcagcagctcattaaacgccgcctgattaagggtgaccaaggacaggcagggcctccaggaccccctggccctccaggcccaagagggccacctggggacacagggaaagatggcccccgtggaatgccaggagtacccggtgaaccaggaaagccaggagaacaaggcttgatgggtcctctagggcctccgggacaaaagggttctattggagcacctggaattccagggatgaatgggcaaaagggtgagcccgggttgcctggagcagtaggacagaatggaataccaggacctaagggagaacctggagaacaaggtgaaaagggagacgctggagagaacggccccaagggtgacacaggcgaaaagggtgaccctggatcatctgctgcaggaattaagggagaacctggggaatctggtcgtccagggcaaaagggtgaaccagggcttcctgggcttcctggacttccggggataaagggagaaccaggtttcattggtcctcaaggagaaccaggcttaccaggtttaccaggaacaaaaggtgaacggggggaagcagggcctcctggaagaggtgagcgaggggaacctggagcccccggaccaaaggggaaacaaggtgaatcaggaactagaggcccaaaggggtcaaagggggatcgtggagaaaaaggggactctggagctcagggaccaaggggtccacctggtcaaaaaggggatcaaggagccactgagatcatagactacaacggcaacctccacgaagccttacagaggattaccaccttaactgtcacgggtccccctggacctcctggacctcaaggactacaagggccaaagggagagcagggatctccaggaatcccaggaatggatggagagcagggactcaaaggctcaaagggagacatgggggacccaggtatgacaggtgaaaaaggaggaattggacttcctggattaccgggagccaatggaatgaaaggagaaaaaggagattctggaatgccgggtccacagggtccttctatcataggcccaccaggcccaccaggtccccatggcccacctggccccatgggacctcatggacttcctggaccaaagggtacagatggtcctatgggaccccatggccctgcaggtcccaaaggagaaagaggtgaaaaaggagctatgggagagcctggaccaagagggccctatgggctgcctgggaaagatggagagcctggtcttgatggcttccctggtccacggggtgagaagggtgatctaggagaaaagggagaaaaggtgacctctccatcccagcatgtaccttgtttgattcttctcctgctgtctgctttgctgttcagcttgtgtgattccatttgacacttaatctttctccatcctgtgctccaaaaacatactgatgcctgatttaaggaatcaggtcttcagagaggaatgaagaaggctgtactgccagatataagggcactgcctggcatagaagaaaaaattattatcaccagatattctagctacagtttttcaaccacctgacaccaatttatggaaaaataaaggatttttgaaaaaaaaa

SEQ ID NO: 121616 - DNA, 2500 bp, Homo sapiens
  Payload ID: 3844
  Gene Symbol: COL25A1
  Gene Name: collagen, type XXV, alpha 1
  ENST ID: ENST00000399127
  CDS Start-End: 349-2286
gagcggccactgttggggccctcgaaagaggtgtcggtcctctgggagtcggaagagctgtctgggtgggtttcgtcttgctttttaccccaccgccacccagtccccggacggagggtgcttttcacttccagctgggaggagagaagaaagcggggatggtgcacgcctgcgggtctggacgctgagcaaggcaggggtccgtatccgctcgtgggcttgactccaccaactagttgtgcagccacagggactgaactttggaggaatcgacctttttctttccttttaggattatttgaggtgtagagggtgggaagcgaagccgagacggccgaccccgccacgatgctgctgaagaagcacgcagggaaaggagggggccgggagcccagatccgaggacccgacccctgccgaacagcattgtgcccggaccatgcccccgtgtgccgtcctggcggccctcctgtcagtggtggccgtggtgtcttgcctgtacctgggtgtgaaaaccaacgacctccaggcgaggatcgccgctctcgaatccgccaaaggggccccttccattcatctgctgcctgataccctggatcacctcaagactatggtgcaagagaaagtggagcgacttctggctcagaaatcctatgaacatatggctaaaataagaatcgcaagagaagcaccttcagaatgtaactgcccagcaggccctccagggaaacgaggtaagagaggccgaagaggagaatctggtcctcctggacagcctggtcctcagggccctcctggtccaaaaggcgataagggagaacaaggtgatcagggacctaggggcctgccaggcttccccacagttgctgccctgcacagtaatcagatcctcaccgtcaagggtgaccaaggacaggcagggcctccaggaccccctggccctccaggcccaagagggccacctggggacacagggaaagatggcccccgtggaatgccaggagtacccggtgaaccaggaaagccaggagaacaaggcttgatgggtcctctagggcctccgggacaaaagggttctattggagcacctggaattccagggatgaatgggcaaaagggtgagcccgggttgcctggagcagtaggacagaatggaataccaggacctaagggagaacctggagaacaaggtgaaaagggagacgctggagagaacggccccaagggtgacacaggcgaaaagggtgaccctggatcatctgctgcaggaattaagggagaacctggggaatctggtcgtccagggcaaaagggtgaaccagggcttcctgggcttcctggacttccggggataaagggagaaccaggtttcattggtcctcaaggagaaccaggcttaccaggtttaccaggaacaaaaggtgaacggggggaagcagggcctcctggaagaggtgagcgaggggaacctggagcccccggaccaaagggggatcgtggagaaaaaggggactctggagctcagggaccaaggggtccacctggtcaaaaaggggatcaaggagccactgagatcatagactacaacggcaacctccacgaagccttacagggtccccctggacctcctggacctcaaggactacaagggccaaagggagagcagggatctccaggaatcccaggaatggatggagagcagggactcaaaggctcaaagggagacatgggggacccaggtatgacaggtgaaaaaggaggaattggacttcctggattaccgggagccaatggaatgaaaggagaaaaaggagattctggaatgccgggtccacagggtccttctatcataggcccaccaggcccaccaggtccccatggcccacctggccccatgggacctcatggacttcctggaccaaagggtgaaccagggttaaatggtgttaaaggattgaagggtgaaccaggtcaaaagggtgacagaggaccccttggtcttccaggagcatctggcttagacggaaagccaggatcccggggtacagatggtcctatgggaccccatggccctgcaggtcccaaaggagaaagaggtgaaaaaggagctatgggagagcctggaccaagagggccctatgggctgcctggcttccctggtccacggggtgagaagggtgatctaggagaaaagggagaaaaggtgacctctccatcccagcatgtaccttgtttgattcttctcctgctgtctgctttgctgttcagcttgtgtgattccatttgacacttaatctttctccatcctgtgctccaaaaacatactgatgcctgatttaaggaatcaggtcttcagagaggaatgaagaaggctgtactgccagatataagggcactgcctggcatagaagaaaaaattattatcaccagatattctagctacagtttttcaaccacctgacaccaatttatggaaaaataaaggatttttgaaaaaaaaa

SEQ ID NO: 121617 - DNA, 2724 bp, Homo sapiens
  Payload ID: 3844
  Gene Symbol: COL25A1
  Gene Name: collagen, type XXV, alpha 1
  Uniprot ID: Q9BXS0
  ENST ID: ENST00000399132
  CDS Start-End: 532-2496
ccgcgacttcggcttcgcgagtagcattggttccttgggtttatttcgttttcctctctcttctccaccttagtcgcccctttcgcgctgcgctgtagcgtgctctcacagcctttttgccttgaactgaatgcaggtgggaaacaggtcggcgtgccgaaagacaccgagtaggtagaaataaggcaaactcacagaggcgcaacaggtccggtcctccgtggccagggcgagccgcggccccgcgtggcgcctcggccgttgccctcggaccctgagcggccactgttggggccctcgaaagaggtgtcggtcctctgggagtcggaagagctgtctgggtgggtttcgtcttgctttttaccccaccgccacccagtccccggacggagggtgcttttcacttccagctgggaggagagaagaaagcggggatggtgcacgcctgcgggtctggacgctgagcaaggcaggggattatttgaggtgtagagggtgggaagcgaagccgagacggccgaccccgccacgatgctgctgaagaagcacgcagggaaaggagggggccgggagcccagatccgaggacccgacccctgccgaacagcattgtgcccggaccatgcccccgtgtgccgtcctggcggccctcctgtcagtggtggccgtggtgtcttgcctgtacctgggtgtgaaaaccaacgacctccaggcgaggatcgccgctctcgaatccgccaaaggggccccttccattcatctgctgcctgataccctggatcacctcaagactatggtgcaagagaaagtggagcgacttctggctcagaaatcctatgaacatatggctaaaataagaatcgcaagagaagcaccttcagaatgtaactgcccagcaggccctccagggaaacgaggtaagagaggccgaagaggagaatctggtcctcctggacagcctggtcctcagggccctcctggtccaaaaggcgataagggagaacaaggtgatcagggacctaggatggtgtttcctaaaatcaatcatgggtttctctctgctgatcagcagctcattaaacgccgcctgattaagggtgaccaaggacaggcagggcctccaggaccccctggccctccaggcccaagagggccacctggggacacagggaaagatggcccccgtggaatgccaggagtacccggtgaaccaggaaagccaggagaacaaggcttgatgggtcctctagggcctccgggacaaaagggttctattggagcacctggaattccagggatgaatgggcaaaagggtgagcccgggttgcctggagcagtaggacagaatggaataccaggacctaagggagaacctggagaacaaggtgaaaagggagacgctggagagaacggccccaagggtgacacaggcgaaaagggtgaccctggatcatctgctgcaggaattaagggagaacctggggaatctggtcgtccagggcaaaagggtgaaccagggcttcctgggcttcctggacttccggggataaagggagaaccaggtttcattggtcctcaaggagaaccaggcttaccaggtttaccaggaacaaaaggtgaacggggggaagcagggcctcctggaagaggtgagcgaggggaacctggagcccccggaccaaaggggaaacaaggtgaatcaggaactagaggcccaaaggggtcaaagggggatcgtggagaaaaaggggactctggagctcagggaccaaggggtccacctggtcaaaaaggggatcaaggagccactgagatcatagactacaacggcaacctccacgaagccttacagaggattaccaccttaactgtcacgggtccccctggacctcctggacctcaaggactacaagggccaaagggagagcagggatctccaggaatcccaggaatggatggagagcagggactcaaaggctcaaagggagacatgggggacccaggtatgacaggtgaaaaaggaggaattggacttcctggattaccgggagccaatggaatgaaaggagaaaaaggagattctggaatgccgggtccacagggtccttctatcataggcccaccaggcccaccaggtccccatggcccacctggccccatgggacctcatggacttcctggaccaaagggtacagatggtcctatgggaccccatggccctgcaggtcccaaaggagaaagaggtgaaaaaggagctatgggagagcctggaccaagagggccctatgggctgcctgggaaagatggagagcctggtcttgatggcttccctggtccacggggtgagaagggtgatctaggagaaaagggagaaaagggattccgtggcgttaagggggaaaaaggggagccaggccagcctggcctggatgggctggatgccccttgccaattggggccagatggcttacccatgcctggctgttggcaaaagtgatgaatctaacctttcaagcatgaagttgtgtatataagggtccatttttaatatttatagttgaaaactgaattgcagattttacaagtctgagatatgtttacatagggctgcttcttcctgctggcagtagtatacatgtccatttttactccacttacatctgaaattgggcaatttgtgaaaccagtgagaatcctgcaaaaaatatagatcagtatctcctta

SEQ ID NO: 121618 - DNA, 428 bp, Homo sapiens
  Payload ID: 3844
  Gene Symbol: COL25A1
  Gene Name: collagen, type XXV, alpha 1
  ENST ID: ENST00000505591
  CDS Start-End: 218-428
gatccttcgggcagccgcgacttcggcttcgcgagtagcattggttccttgggtttatttcgttttcctctctcttctccaccttagtcgcccctttcgcgctgcgctgtagcgtgctctcacagcctttttgccttgaactgaatgcaggtgggaaacaggattatttgaggtgtagagggtgggaagcgaagccgagacggccgaccccgccacgatgctgctgaagaagcacgcagggaaaggagggggccgggagcccagatccgaggacccgacccctgccgaacagcattgtgcccggaccatgcccccgtgtgccgtcctggcggccctcctgtcagtggtggccgtggtgtcttgcctgtacctgggtgtgaaaaccaacgacctccaggcgaggatcgccgctctcgaatccgccaaag

SEQ ID NO: 121619 - DNA, 316 bp, Homo sapiens
  Payload ID: 3844
  Gene Symbol: COL25A1
  Gene Name: collagen, type XXV, alpha 1
  ENST ID: ENST00000512961
  CDS Start-End: 1-88
tggtccacggggtgagaagggtgatctaggagaaaagggagaaaaggggccagatggcttacccatgcctggctgttggcaaaagtgatgaatctaacctttcaagcatgaagttgtgtatataagggtccatttttaatatttatagttgaaaactgaattgcagattttacaagtctgagatatgtttacatagggctgcttcttcctgctggcagtagtatacatgtccatttttactccacttacatctgaaattgggcaatttgtgaaaccagtgagaatcctgcaaaaaatatagatcagtatctcctta

SEQ ID NO: 121620 - DNA, 4630 bp, Homo sapiens
  Payload ID: 3844
  Gene Symbol: COL25A1
  Gene Name: collagen, type XXV, alpha 1
  ENST ID: ENST00000494183
  CDS Start-End: 122-1612
gagcggccactgttggggccctcgaaagaggtgtcggtcctctgggagtcggaagagctgtctgggattatttgaggtgtagagggtgggaagcgaagccgagacggccgaccccgccacgatgctgctgaagaagcacgcagggaaaggagggggccgggagcccagatccgaggacccgacccctgccgaacagcattgtgcccggaccatgcccccgtgtgccgtcctggcggccctcctgtcagtggtggccgtggtgtcttgcctgtacctgggtgtgaaaaccaacgacctccaggcgaggatcgccgctctcgaatccgccaaaggggccccttccattcatctgctgcctgataccctggatcacctcaagactatggtgcaagagaaagtggagcgacttctggctcagaaatcctatgaacatatggctaaaataagaatcgcaagagaagcaccttcagaatgtaactgcccagcaggccctccagggaaacgaggtaagagaggccgaagaggagaatctggtcctcctggacagcctggtcctcagggccctcctggtccaaaaggcgataagggagaacaaggtgatcagggacctaggggtcctctagggcctccgggacaaaagggttctattggagcacctggaattccagggatgaatgggcaaaagggtgagcccgggttgcctggagcagtaggacagaatggaataccaggacctaagggagaacctggagaacaaggtgaaaagggagacgctggagagaacggccccaagggtgacacaggcgaaaagggtgaccctggatcatctgctgcaggaattaagggagaacctggggaatctggtcgtccagggcaaaagggtgaaccagggcttcctgggcttcctggacttccggggataaagggagaaccaggtttcattggtcctcaaggagaaccaggcttaccaggtttaccaggaacaaaaggtgaacggggggaagcagggcctcctggaagaggtgagcgaggggaacctggagcccccggaccaaaggggaaacaaggtgaatcaggaactagaggcccaaaggggtcaaagggggatcgtggagaaaaaggggactctggagctcagggaccaaggggtccacctggtcaaaaaggggatcaaggagccactgagatcatagactacaacggcaacctccacgaagccttacagaggattaccaccttaactgtcacgggtccccctggacctcctggacctcaaggactacaagggccaaagggagagcagggatctccaggaatcccaggaatggatggagagcagggactcaaaggctcaaagggagacatgggggacccagggagccaatggaatgaaaggagaaaaaggagattctggaatgccgggtccacagggtccttctatcataggcccaccaggcccaccaggtccccatggcccacctggccccatgggacctcatggacttcctggaccaaagggagcatctggcttagacggaaagccaggatcccggggtacagatggtcctatgggaccccatggccctgcaggtcccaaaggagaaagaggtgaaaaaggagctatgggagagcctggaccaagagggccctatgggctgcctgggaaagatggagagcctggtcttgatggcttccctggtccacggggtgagaagggtgatctaggagaaaagggagaaaagggggaaaagggaaagaaaggcaaaaaggggcctaaaggggagaaaggagaacagggtgctcctggattagatgcaccctgcccgttggggccagatggcttacccatgcctggctgttggcaaaagtgatgaatctaacctttcaagcatgaagttgtgtatataagggtccatttttaatatttatagttgaaaactgaattgcagattttacaagtctgagatatgtttacatagggctgcttcttcctgctggcagtagtatacatgtccatttttactccacttacatctgaaattgggcaatttgtgaaaccagtgagaatcctgcaaaaaatatagatcagtatctccttatcttatgtgaagatacgtatttatatggacaaatcagtggtagagaatgattgattgtactagctattttccttcttttggcttgctaattgcatggacaaaaagtgccatgaaatagtttacatgaaatggtgaccaaatatggactcaaagctatgaaaatgtactatactgactgattttagagctgattatcacattcccattcacctttcatgtcggcgttgactcatacctacaccacccattgaaactaactaaaaaagcatgactgtgtgccaaacctgcttgctgtgcaacttcagatgctagcatgttgatcaggagtcctttgattacatctgaacctttattccttttgtcatctcaagggggttacaccatggcttattgccaaaaagagataaggtggcggagagcacacacacaatttgtcttgtattttgagggagttgcagtcctgactgcagatctacagcttccagtattgtgggctcatgtggccactttggttgaaatacgaaggggttgagcctgttgctgccaccagttttccttgggctgcccttggcagtgaagacatgggaagaggaccgattcagcctccagcactgcctctcatgtgaccaagtaggaaagaggtttacaaatgcaaacatgcagaaccacagactttaaaaatatgtataaataaactgaatttcagcaagtgttaatataggtgcttttaaaaatgacagaggcacagcacttcttttggaataggagattcttggaatgggagatcctgtccctgagggaaaagggatgtccatcccaccaaaacttgggttgctgaagaaataacatgttctgagaagggatcagccaaaatcgcctctcccgatgatataggagagcttactgggacaatctgtgccaaagttgttgtgagagctttccttcctcctacgatccaaccatgtcaaacatttcctacaaagtttgagaaacagaccaaatctaagatctcagaaagctgtgaaatatagttgccataaagaaaatatttttcatctacttgctcaaactttacctaaccatattagatggaacatttctttgcacagtaaagagttggtagcgtgttttgaaatggcttattctaagtggaagtgttacattgaaagaaacattatcaatgaggagtaggcaccctttcagcccattagagaatttaatttctctcctgactcaatgccatcttctgggaagatttctagtttcatgcataggtgtcaccaccagaagggaaattaactcatccttggcttatagttaagatataaccataagacaaggaacctaaaatcctcatgatctcatttatgttatgtaaccaaatgacagtcatacaaaatggcatcttcttttttttctattaaatttttaaggttgaaagatgtttaaactattagatcagtctaattggtaacatttctggtaacattccacacccctaagccagtttagcattttgaaaataatggaggacattttctaacaatttcttgtatggcatggtgttaggataacgtattgctcaatgtctgacacaatttgtcttaaatggtttggaaaaatgaactgaagtgggtggaactacattctcttcaggaaaacaaactacagtgtccagtggctatatttttttcccttctatctttttttctgctcctctagtagaaagaggtggattgaaatggatcactatttaaaacttgcacagcttcaggagacgatacctcaacatcaaaagaaaaacactttatgtataaaaaaattttttgaaatacagcccttcaaagaatactattctgtcctgtgtgtatattgagtttttgctctataactgatttgacaacatcaacttatttcatgattaaatgaggttgtaaactttcattacatttatttccttgggaaaaacaaagggatggaaatactcctccttgttcagtggaattgctaggtcttaaccatgatggataatctttaacttttggttactacaatgttttcaagcatccattttgtcatatagagaattcttaaataatttctaagtgaatgaaagaattgtgtttgttgatatgtgttgatagataatatactttccttaaagatttctttaatgtgtgttattggatagagggttgagaaaatatacatgaaagacacattggaaataaggcaaggtcagtttctatttctaataaaacattgaaggatagcaaattgatatgtgttttagatttaaaattgtttttcatttatgttggttggtgctaatgtatctcttttcctttttctctatggacaatacaactactatggataattttatttccctgtttaatagcattcctaaatcattagtgtgttattttatttttaaagttcatgaatttgctataattatggtccaatgaccaggctttcttaatgtaaaacaaaacagtgtaccaatagatgatgtgtgtttactcgga

SEQ ID NO: 121621 - DNA, 4799 bp, Homo sapiens
  Payload ID: 3844
  Gene Symbol: COL25A1
  Gene Name: collagen, type XXV, alpha 1
  ENST ID: ENST00000610288
  CDS Start-End: 342-1343
caggccctccagggaaacgaggtaagagaggccgaagaggagaatctggtaagtctggacagcctggtcctcagggccctcctggtccaaaaggcgataagggagaacaaggtgatcagggacctaggatggtgtttcctaaaatcaatcatgggtttctctctgctgatcagcagctcattaaacgccgcctgattaagggtgaccaaggacaggcagggcctccaggaccccctggccctccaggcccaagagggccacctggggacacagggaaagatggcccccgtggaatgccaggagtacccggtgaaccaggaaagccaggagaacaaggcttgatgggtcctctagggcctccgggacaaaagggttctattggagcacctggaattccagggatgaatgggcaaaagggtgagcccgggttgcctggagcagtaggacagaatggaataccaggacctaagggagaacctggagaacaaggtgaaaagggagacgctggagagaacggccccaagggtgacacaggcgaaaagggtgaccctggatcatctgctgcaggaattaagggagaacctggggaatctggtcgtccagggcaaaagggtgaaccagggcttcctgggcttcctggacttccggggataaagggagaaccaggtttcattggtcctcaaggagaaccaggcttaccaggtttaccaggaacaaaaggtgaacggggggaagcagggcctcctggaagaggtgagcgaggggaacctggagcccccggaccaaaggggaaacaaggtgaatcaggaactagaggcccaaaggggtcaaagggggatcgtggagaaaaaggggactctggagctcagggaccaaggggtccacctggtcaaaaaggggatcaaggagccactgagatcatagactacaacggcaacctccacgaagccttacagaggattaccaccttaactgtcacgggtccccctggacctcctggacctcaaggactacaagggccaaagggagagcagggatctccaggaatcccaggaatggatggagagcagggactcaaaggctcaaagggagacatgggggacccagggagccaatggaatgaaaggagaaaaaggagattctggaatgccgggtccacagggtccttctatcataggcccaccaggcccaccaggtccccatggcccacctggccccatgggacctcatggacttcctggaccaaagggagcatctggcttagacggaaagccaggatcccggggtacagatggtcctatgggaccccatggccctgcaggtcccaaaggagaaagaggtgaaaaaggagctatgggagagcctggaccaagagggccctatgggctgcctgggaaagatggagagcctggtcttgatggcttccctggtccacggggtgagaagggtgatctaggagaaaagggagaaaagggattccgtggcgttaagggggaaaaaggggagccaggccagcctggcctggatgggctggatgccccttgccaattggggccagatggcttacccatgcctggctgttggcaaaagtgatgaatctaacctttcaagcatgaagttgtgtatataagggtccatttttaatatttatagttgaaaactgaattgcagattttacaagtctgagatatgtttacatagggctgcttcttcctgctggcagtagtatacatgtccatttttactccacttacatctgaaattgggcaatttgtgaaaccagtgagaatcctgcaaaaaatatagatcagtatctccttatcttatgtgaagatacgtatttatatggacaaatcagtggtagagaatgattgattgtactagctattttccttcttttggcttgctaattgcatggacaaaaagtgccatgaaatagtttacatgaaatggtgaccaaatatggactcaaagctatgaaaatgtactatactgactgattttagagctgattatcacattcccattcacctttcatgtcggcgttgactcatacctacaccacccattgaaactaactaaaaaagcatgactgtgtgccaaacctgcttgctgtgcaacttcagatgctagcatgttgatcaggagtcctttgattacatctgaacctttattccttttgtcatctcaagggggttacaccatggcttattgccaaaaagagataaggtggcggagagcacacacacaatttgtcttgtattttgagggagttgcagtcctgactgcagatctacagcttccagtattgtgggctcatgtggccactttggttgaaatacgaaggggttgagcctgttgctgccaccagttttccttgggctgcccttggcagtgaagacatgggaagaggaccgattcagcctccagcactgcctctcatgtgaccaagtaggaaagaggtttacaaatgcaaacatgcagaaccacagactttaaaaatatgtataaataaactgaatttcagcaagtgttaatataggtgcttttaaaaatgacagaggcacagcacttcttttggaataggagattcttggaatgggagatcctgtccctgagggaaaagggatgtccatcccaccaaaacttgggttgctgaagaaataacatgttctgagaagggatcagccaaaatcgcctctcccgatgatataggagagcttactgggacaatctgtgccaaagttgttgtgagagctttccttcctcctacgatccaaccatgtcaaacatttcctacaaagtttgagaaacaggtatttttcattctttttaatgcttttttctttttctttctttagtcccaagaatattgaaaaaatattagtttcagtttttgtcacatatgttttgaacaatttttttaagaagtcttcaaatcataataatttggctccagtagtcaaaatgaccttttactaacttctctcttgttttggataattggatagaatataaaagaagctccactttcagtctaatcattgtaaagcatgaaagttatgcatttttaagtagttttgactttttttacatgatgaatgtaacgtacatggagattatcagttaatataaagccaagattttgtcacatttggtaatattaactaatttctatttttatggttttaagttttgtctatatttagatttctttctctttttaacatttctaaatgtttgtctcatcctcatatccacagaccaaatctaagatctcagaaagctgtgaaatatagttgccataaagaaaatatttttcatctacttgctcaaactttacctaaccatattagatggaacatttctttgcacagtaaagagttggtagcgtgttttgaaatggcttattctaagtggaagtgttacattgaaagaaacattatcaatgaggagtaggcaccctttcagcccattagagaatttaatttctctcctgactcaatgccatcttctgggaagatttctagtttcatgcataggtgtcaccaccagaagggaaattaactcatccttggcttatagttaagatataaccataagacaaggaacctaaaatcctcatgatctcatttatgttatgtaaccaaatgacagtcatacaaaatggcatcttcttttttttctattaaatttttaaggttgaaagatgtttaaactattagatcagtctaattggtaacatttctggtaacattccacacccctaagccagtttagcattttgaaaataatggaggacattttctaacaatttcttgtatggcatggtgttaggataacgtattgctcaatgtctgacacaatttgtcttaaatggtttggaaaaatgaactgaagtgggtggaactacattctcttcaggaaaacaaactacagtgtccagtggctatatttttttcccttctatctttttttctgctcctctagtagaaagaggtggattgaaatggatcactatttaaaacttgcacagcttcaggagacgatacctcaacatcaaaagaaaaacactttatgtataaaaaaattttttgaaatacagcccttcaaagaatactattctgtcctgtgtgtatattgagtttttgctctataactgatttgacaacatcaacttatttcatgattaaatgaggttgtaaactttcattacatttatttccttgggaaaaacaaagggatggaaatactcctccttgttcagtggaattgctaggtcttaaccatgatggataatctttaacttttggttactacaatgttttcaagcatccattttgtcatatagagaattcttaaataatttctaagtgaatgaaagaattgtgtttgttgatatgtgttgatagataatatactttccttaaagatttctttaatgtgtgttattggatagagggttgagaaaatatacatgaaagacacattggaaataaggcaaggtcagtttctatttctaataaaacattgaaggatagcaaattgatatgtgttttagatttaaaattgtttttcatttatgttggttggtgctaatgtatctcttttcctttttctctatggacaatacaactactatggataattttatttccctgtttaatagcattcctaaatcattagtgtgttattttatttttaaagttcatgaatttgctataattatggtccaatgaccaggctttcttaatgtaaaacaaaacagtgtaccaatagatgatgtgtgtttactcgga

SEQ ID NO: 121622 - DNA, 4819 bp, Homo sapiens
  Payload ID: 3844
  Gene Symbol: COL25A1
  Gene Name: collagen, type XXV, alpha 1
  ENST ID: ENST00000622134
  CDS Start-End: 129-1613
caggccctccagggaaacgaggtaagagaggccgaagaggagaatctggtaagtctggacagcctggtcctcagggccctcctggtccaaaaggcgataagggagaacaaggtgatcagggacctaggatggtgtttcctaaaatcaatcatgggtttctctctgctgatcagcagctcattaaacgccgcctgattaagggtgaccaaggacaggcagggcctccaggaccccctggccctccaggcccaagagggccacctggggacacagggaaagatggcccccgtggaatgccaggagtacccggtgaaccaggaaagccaggagaacaaggcttgatggcaaaaggtcctctagggcctccgggacaaaagggttctattggagcacctggaattccagggatgaatgggcaaaagggtgagcccgggttgcctggagcagtaggacagaatggaataccaggacctaagggagaacctggagaacaaggtgaaaagggagacgctggagagaacggccccaagggtgacacaggcgaaaagggtgaccctggatcatctgctgcaggaattaagggagaacctggggaatctggtcgtccagggcaaaagggtgaaccagggcttcctgggcttcctggacttccggggataaagggagaaccaggtttcattggtcctcaaggagaaccaggcttaccaggtttaccaggaacaaaaggtgaacggggggaagcagggcctcctggaagaggtgagcgaggggaacctggagcccccggaccaaaggggaaacaaggtgaatcaggaactagaggcccaaaggggtcaaagggggatcgtggagaaaaaggggactctggagctcagggaccaaggggtccacctggtcaaaaaggggatcaaggagccactgagatcatagactacaacggcaacctccacgaagccttacaggcaagtaggattaccaccttaactgtcacgggtccccctggacctcctggacctcaaggactacaagggccaaagggagagcagggatctccaggaatcccaggaatggatggagagcagggactcaaaggctcaaagggagacatgggggacccaggtatgacaggtgaaaaaggaggaattggacttcctggattaccgggagccaatggaatgaaaggagaaaaaggagattctggaatgccgggtccacagggtccttctatcataggcccaccaggcccaccaggtccccatggcccacctggccccatgggacctcatggacttcctggaccaaagggtacagatggtcctatgggaccccatggccctgcaggtcccaaaggagaaagaggtgaaaaaggagctatgggagagcctggaccaagagggccctatgggctgcctgggaaagatggagagcctggtcttgatggcttccctggtccacggggtgagaagggtgatctaggagaaaagggagaaaagggattccgtggcgttaagggggaaaaaggggagccaggccagcctggcctggatgggctggatgccccttgccaattggggccagatggcttacccatgcctggctgttggcaaaagtgatgaatctaacctttcaagcatgaagttgtgtatataagggtccatttttaatatttatagttgaaaactgaattgcagattttacaagtctgagatatgtttacatagggctgcttcttcctgctggcagtagtatacatgtccatttttactccacttacatctgaaattgggcaatttgtgaaaccagtgagaatcctgcaaaaaatatagatcagtatctccttatcttatgtgaagatacgtatttatatggacaaatcagtggtagagaatgattgattgtactagctattttccttcttttggcttgctaattgcatggacaaaaagtgccatgaaatagtttacatgaaatggtgaccaaatatggactcaaagctatgaaaatgtactatactgactgattttagagctgattatcacattcccattcacctttcatgtcggcgttgactcatacctacaccacccattgaaactaactaaaaaagcatgactgtgtgccaaacctgcttgctgtgcaacttcagatgctagcatgttgatcaggagtcctttgattacatctgaacctttattccttttgtcatctcaagggggttacaccatggcttattgccaaaaagagataaggtggcggagagcacacacacaatttgtcttgtattttgagggagttgcagtcctgactgcagatctacagcttccagtattgtgggctcatgtggccactttggttgaaatacgaaggggttgagcctgttgctgccaccagttttccttgggctgcccttggcagtgaagacatgggaagaggaccgattcagcctccagcactgcctctcatgtgaccaagtaggaaagaggtttacaaatgcaaacatgcagaaccacagactttaaaaatatgtataaataaactgaatttcagcaagtgttaatataggtgcttttaaaaatgacagaggcacagcacttcttttggaataggagattcttggaatgggagatcctgtccctgagggaaaagggatgtccatcccaccaaaacttgggttgctgaagaaataacatgttctgagaagggatcagccaaaatcgcctctcccgatgatataggagagcttactgggacaatctgtgccaaagttgttgtgagagctttccttcctcctacgatccaaccatgtcaaacatttcctacaaagtttgagaaacaggtatttttcattctttttaatgcttttttctttttctttctttagtcccaagaatattgaaaaaatattagtttcagtttttgtcacatatgttttgaacaatttttttaagaagtcttcaaatcataataatttggctccagtagtcaaaatgaccttttactaacttctctcttgttttggataattggatagaatataaaagaagctccactttcagtctaatcattgtaaagcatgaaagttatgcatttttaagtagttttgactttttttacatgatgaatgtaacgtacatggagattatcagttaatataaagccaagattttgtcacatttggtaatattaactaatttctatttttatggttttaagttttgtctatatttagatttctttctctttttaacatttctaaatgtttgtctcatcctcatatccacagaccaaatctaagatctcagaaagctgtgaaatatagttgccataaagaaaatatttttcatctacttgctcaaactttacctaaccatattagatggaacatttctttgcacagtaaagagttggtagcgtgttttgaaatggcttattctaagtggaagtgttacattgaaagaaacattatcaatgaggagtaggcaccctttcagcccattagagaatttaatttctctcctgactcaatgccatcttctgggaagatttctagtttcatgcataggtgtcaccaccagaagggaaattaactcatccttggcttatagttaagatataaccataagacaaggaacctaaaatcctcatgatctcatttatgttatgtaaccaaatgacagtcatacaaaatggcatcttcttttttttctattaaatttttaaggttgaaagatgtttaaactattagatcagtctaattggtaacatttctggtaacattccacacccctaagccagtttagcattttgaaaataatggaggacattttctaacaatttcttgtatggcatggtgttaggataacgtattgctcaatgtctgacacaatttgtcttaaatggtttggaaaaatgaactgaagtgggtggaactacattctcttcaggaaaacaaactacagtgtccagtggctatatttttttcccttctatctttttttctgctcctctagtagaaagaggtggattgaaatggatcactatttaaaacttgcacagcttcaggagacgatacctcaacatcaaaagaaaaacactttatgtataaaaaaattttttgaaatacagcccttcaaagaatactattctgtcctgtgtgtatattgagtttttgctctataactgatttgacaacatcaacttatttcatgattaaatgaggttgtaaactttcattacatttatttccttgggaaaaacaaagggatggaaatactcctccttgttcagtggaattgctaggtcttaaccatgatggataatctttaacttttggttactacaatgttttcaagcatccattttgtcatatagagaattcttaaataatttctaagtgaatgaaagaattgtgtttgttgatatgtgttgatagataatatactttccttaaagatttctttaatgtgtgttattggatagagggttgagaaaatatacatgaaagacacattggaaataaggcaaggtcagtttctatttctaataaaacattgaaggatagcaaattgatatgtgttttagatttaaaattgtttttcatttatgttggttggtgctaatgtatctcttttcctttttctctatggacaatacaactactatggataattttatttccctgtttaatagcattcctaaatcattagtgtgttattttatttttaaagttcatgaatttgctataattatggtccaatgaccaggctttcttaatgtaaaacaaaacagtgtaccaatagatgatgtgtgtttactcgga

SEQ ID NO: 121623 - DNA, 3033 bp, Homo sapiens
  Payload ID: 3845
  Gene Symbol: COL26A1
  Gene Name: collagen, type XXVI, alpha 1
  Uniprot ID: Q96A83
  ENST ID: ENST00000313669
  CDS Start-End: 214-1539
cggcttagagcccacctcgccgaatttgaaaaggcggccccggagaggcgtgggcgccccccacacatttccagctcgcacccgggctccgaccgctcgccccgctcctctcgctgtgctcccggccggtgccgcgggttcggtccgggcgccggtgcgctcctgccggtcctcgtgcccgggactccgggtccccgcgggctgctgcgcacgatgaagctggccctgctcctgccctgggcgtgttgctgcctctgcgggtcggcgctggccaccggcttcctctatcccttctcggccgcagctctgcagcagcacggctaccccgagcccggcgccggctcccctggcagcggctacgcgagccgccggcactggtgccatcacacagtgacacggacggtgtcctgccaggtgcagaatggctcggagacggtggtccagcgcgtgtaccagagctgccggtggccggggccctgcgccaacctcgtaagttacaggactctgatcagacccacctacagagtgtcctaccgcacggtgacggtgctggagtggagatgctgccctggcttcaccgggagcaactgtgatgaggaatgcatgaactgcacccggctcagtgacatgagtgagcgactgaccacactggaggccaaggtcctcctgctagaagcagcagaacggccctccagcccggacaacgacctgccagcccccgagagcactccgccgacctggaatgaggacttcctccccgacgccatccctcttgctcaccctgtgccacgacagagaaggcccacgggcccagccgggcccccggggcagacaggaccaccagggcctgcaggcccccccgggtctaaaggtgaccgaggccagacaggagagaagggtccagcggggccgcctgggctcctggggcctccagggccccgtgggcttcctggagagatggggcgccccggccccccaggaccacccggcccagcaggcaacccaggcccctcaccaaacagcccccagggcgccctctactccctgcagccgcctacagacaaagacaatggagactcaaggctggcctctgccatcgtggacacagtgctggcaggtgtcccaggaccccggggtccccctggtccaccaggtccccctgggcctcgaggtcccccaggacccccaggaacacctggatcccagggcctggctggagagcgaggcacagtggggccgtccggtgaacctggcgtgaagggggaagaaggagagaaagccgccactgcagagggcgagggggtgcagcagctgagagaggccctgaagatcctggcagagcgagtcctcatcctggagcacatgattgggatccacgatcccctggcctccccagagggaggttctggccaggatgctgccctgagagccaacctcaagatgaagaggggtggcgcccaacccgatggggtccttgctgccctgcttgggcccgaccctggacagaagagcgtggaccaggccagcagcaggaagtgagagcccactgctccaggacaccctgtcctggctagagacccagccccagaggcctgagccgccgctgtttcctaaagatgcccccaggggaactgggctccaggcatggatgattgtgaggacatggggggctttggggacagataatgtctccaggggcagggtctggaggggccaacaccctcatcagagccctcctctggcctgtcccctcccctacccccactcccggctggagacggggtctgggtgggctgggtgctgggaatgagaataatcctaatacccatcatttattgagtccctgctgtaactggccctgtccagggaactttcgttacgttgtctcattatttaacccttaggaggtaagcttattatccccacttcacaaggggaccgaggctcagacggtagaaataaccctctcttggccaccagatcacgggtggcaggggcaggatttgaacccaggaccctcagttcctgaagccatgttctctcgaccctgccagcttcccctcttcgagagaaaactcagacagggagggcgcagggccagaacggctccttaaggcaggcagggctgcggggaggctgggccagccagcctgagggggtaggcagggtcctgcagggcctggggcttcccttcctcatcccccttccccactggctgggggagcagcctggactgcagctctcagaggccagggagaccctgaataaatcactgccagccatacggacttgaggaccttgagagagaagcattgggggtgcaagtgtccaccaaaccagataggcatccctggccactgcctcccagtcttgctgagcccacccgctctctctgggtccatcccatccctgagccaggggaggcagcatttcatgggcatgtctatcagaggtgggacttgcagcctctgccccacgagtttgtctctcagtggactctataggtttgctacttttgcatgacacagcaagcccagtgtcccctttgcaagctgcagagagggaaacagagtcccaggcctgctgggaagagatgctcctgcctcccaccttccagagttgggggcctggcaggctccatggcaggcaccaggtccctagcagcccagaacagctctgactggagccctcaaggcctctggggccagggtctccgtgatcagctcagccctggtgttcctctcttgctgggctgggacctgggacacagccacggcagcaaactcagagaattgaaggtgctggcgccaccctggggcactctgtcttcacagcaggagtgactgtctccagtgctcttggtactcctgtttggctgtggcctggtccctctgggccctgggatcttcttctggcccttgaggcaggtctggagaggcagtctctgtcttcatggaggggtggtcagaggcgggcgggaccaccagcctgtagcgttattattatatgtgacaataaaggtgctctccccac

SEQ ID NO: 121624 - DNA, 2970 bp, Homo sapiens
  Payload ID: 3845
  Gene Symbol: COL26A1
  Gene Name: collagen, type XXVI, alpha 1
  Uniprot ID: Q96A83
  ENST ID: ENST00000613501
  CDS Start-End: 157-1476
cccccacacatttccagctcgcacccgggctccgaccgctcgccccgctcctctcgctgtgctcccggccggtgccgcgggttcggtccgggcgccggtgcgctcctgccggtcctcgtgcccgggactccgggtccccgcgggctgctgcgcacgatgaagctggccctgctcctgccctgggcgtgttgctgcctctgcgggtcggcgctggccaccggcttcctctatcccttctcggccgcagctctgcagcagcacggctaccccgagcccggcgccggctcccctggcagcggctacgcgagccgccggcactggtgccatcacacagtgacacggacggtgtcctgccaggtgcagaatggctcggagacggtggtccagcgcgtgtaccagagctgccggtggccggggccctgcgccaacctcgtaaggactctgatcagacccacctacagagtgtcctaccgcacggtgacggtgctggagtggagatgctgccctggcttcaccgggagcaactgtgatgaggaatgcatgaactgcacccggctcagtgacatgagtgagcgactgaccacactggaggccaaggtcctcctgctagaagcagcagaacggccctccagcccggacaacgacctgccagcccccgagagcactccgccgacctggaatgaggacttcctccccgacgccatccctcttgctcaccctgtgccacgacagagaaggcccacgggcccagccgggcccccggggcagacaggaccaccagggcctgcaggcccccccgggtctaaaggtgaccgaggccagacaggagagaagggtccagcggggccgcctgggctcctggggcctccagggccccgtgggcttcctggagagatggggcgccccggccccccaggaccacccggcccagcaggcaacccaggcccctcaccaaacagcccccagggcgccctctactccctgcagccgcctacagacaaagacaatggagactcaaggctggcctctgccatcgtggacacagtgctggcaggtgtcccaggaccccggggtccccctggtccaccaggtccccctgggcctcgaggtcccccaggacccccaggaacacctggatcccagggcctggctggagagcgaggcacagtggggccgtccggtgaacctggcgtgaagggggaagaaggagagaaagccgccactgcagagggcgagggggtgcagcagctgagagaggccctgaagatcctggcagagcgagtcctcatcctggagcacatgattgggatccacgatcccctggcctccccagagggaggttctggccaggatgctgccctgagagccaacctcaagatgaagaggggtggcgcccaacccgatggggtccttgctgccctgcttgggcccgaccctggacagaagagcgtggaccaggccagcagcaggaagtgagagcccactgctccaggacaccctgtcctggctagagacccagccccagaggcctgagccgccgctgtttcctaaagatgcccccaggggaactgggctccaggcatggatgattgtgaggacatggggggctttggggacagataatgtctccaggggcagggtctggaggggccaacaccctcatcagagccctcctctggcctgtcccctcccctacccccactcccggctggagacggggtctgggtgggctgggtgctgggaatgagaataatcctaatacccatcatttattgagtccctgctgtaactggccctgtccagggaactttcgttacgttgtctcattatttaacccttaggaggtaagcttattatccccacttcacaaggggaccgaggctcagacggtagaaataaccctctcttggccaccagatcacgggtggcaggggcaggatttgaacccaggaccctcagttcctgaagccatgttctctcgaccctgccagcttcccctcttcgagagaaaactcagacagggagggcgcagggccagaacggctccttaaggcaggcagggctgcggggaggctgggccagccagcctgagggggtaggcagggtcctgcagggcctggggcttcccttcctcatcccccttccccactggctgggggagcagcctggactgcagctctcagaggccagggagaccctgaataaatcactgccagccatacggacttgaggaccttgagagagaagcattgggggtgcaagtgtccaccaaaccagataggcatccctggccactgcctcccagtcttgctgagcccacccgctctctctgggtccatcccatccctgagccaggggaggcagcatttcatgggcatgtctatcagaggtgggacttgcagcctctgccccacgagtttgtctctcagtggactctataggtttgctacttttgcatgacacagcaagcccagtgtcccctttgcaagctgcagagagggaaacagagtcccaggcctgctgggaagagatgctcctgcctcccaccttccagagttgggggcctggcaggctccatggcaggcaccaggtccctagcagcccagaacagctctgactggagccctcaaggcctctggggccagggtctccgtgatcagctcagccctggtgttcctctcttgctgggctgggacctgggacacagccacggcagcaaactcagagaattgaaggtgctggcgccaccctggggcactctgtcttcacagcaggagtgactgtctccagtgctcttggtactcctgtttggctgtggcctggtccctctgggccctgggatcttcttctggcccttgaggcaggtctggagaggcagtctctgtcttcatggaggggtggtcagaggcgggcgggaccaccagcctgtagcgttattattatatgtgacaataaaggtgctctccccac

SEQ ID NO: 121625 - DNA, 7790 bp, Homo sapiens
  Payload ID: 3846
  Gene Symbol: COL27A1
  Gene Name: collagen, type XXVII, alpha 1
  Uniprot ID: Q8IZC6
  ENST ID: ENST00000356083
  CDS Start-End: 392-5974
cggcggggaggcagcttccaccgccctccgcgcgccctcacccggccttgctctgcctccggggaccgccagcagcccgcctccaaaagtttgatcatctctctctctctttttcttgcttcttcttcctttttggtggaagcagaaaaggaccgaggcaggggcgagcgcggcgcccggactcctgggaccatgggcctggcgcgggcgcccgcggggccccagccgcgctgcctgcctgctcgggcgcccctgggcgcggggctgcgctgggggcgcgggggccgcgcgctctaagccggcctggcgcggcggggcggggggctggcggccccatggggcgcgcccacacttgccccccgggctcgggagcatgaagtaggggcctgccatgggagcgggatcggcgcggggggcccgaggcacagcggcggcggcggcggcgcgcgggggggggtttctcttctcctggatcttagtctcgtttgcctgtcacctggcctccacccaaggagctcctgaagatgtggacatcctccagcggctgggcctcagctggacgaaggccgggagccctgcacccccgggagtcattcctttccagtcgggcttcatctttacgcagcgggcccggctccaggctcccacgggcaccgtcattcctgccgccttgggcacagagctggcactggtgctgagcctctgctcccaccgggtgaaccatgccttcctcttcgctgtccgcagccagaaacgcaagctgcagctgggcctgcagttcctccccggcaagacggtcgtccacctcgggtcccggcgctcagtggccttcgacctcgacatgcacgacgggcgctggcaccacctggccctcgagctccgaggccgcacagtcactctggtgactgcctgcgggcagcgccgggtgcctgtcctgctgcctttccacagggaccctgcactcgaccctgggggctccttcctctttgggaagatgaacccgcatgcagtccagtttgaaggtgctctctgccagttcagtatctaccctgtgacgcaggtcgctcacaattactgtacccacctgaggaagcagtgtggacaggctgacacgtaccagtccccactgggacctctcttctcccaagactctggcagaccttttaccttccagtccgacctcgccctgctaggcctggagaacttgaccactgccacaccagccctggggtcactgccagcaggcaggggacccagggggactgtggcacccgccacgcccaccaagccccaaaggactagccccacaaaccctcaccagcatatggcggtgggaggcccagcccaaaccccgctgctacctgccaagctgtcagccagtaacgcacttgatcccatgctcccagcctctgttggcggctctaccagaacgcctcgccctgcggccgctcaaccatcacagaagatcacagccaccaaaatccccaaaagcctccctaccaagccttcggccccttctacttcaattgtgcccatcaaaagcccccatcctacccagaaaacagctccatcttcatttacaaagtcagccctacccactcagaagcaagtgccacctacttcccgtccagttcctgccagagtctcccgtcccgcagagaagcccatccagaggaacccgggaatgcccaggcccccaccgcccagcacccggcccctacctcctaccaccagctcctctaaaaaacccattcccacactagctcggactgaggccaagataaccagccatgccagtaagccggcctctgcccgcaccagcacccacaaacctcccccatttactgctttatcctcatctcctgcccctactcctggttctaccaggagtactcggccaccagccacgatggtacctccaacttcgggcaccagcactcccagaacagcacctgccgtccccactcctggctcagctcccactggaagcaagaagcccattggatcggaagcctcaaagaaagccggacccaagagcagcccccggaagcctgtccccctcagacctgggaaggcagccagggatgtccccttgagcgatctgacaaccaggcctagccccagacagccccagcccagtcagcagaccaccccggccctggtattggccccggcgcaattcctgtcctccagcccccggcccacgagcagtggctattcgatcttccacctggcaggatctacgcctttccctctgctgatggggcctccgggacccaagggagactgtggcttgccgggtccccctgggctacctgggctacctggaatccctggtgcacgtgggcctcggggtcctcctgggccttatggaaatccaggtctccccggccctcctggagccaaaggacagaaaggggacccagggctctcaccaggaaaggcccacgatggggcaaagggtgacatgggcttgcctgggctctccgggaatccaggacctccgggacgaaagggacacaagggctatcctggaccggcagggcaccccggagaacaggggcagccaggacctgagggcagcccaggggccaaaggttaccctggcaggcaggggttacctggaccggtaggagatcccggccccaaaggcagcaggggctacattgggctcccagggctcttcggcctgccagggtctgatggagaacgaggcctgcctggcgttcctggcaagaggggcaagatgggtatgccggggtttcctggagtctttggggaaagaggccctcctggactggatggaaatcctggagaactgggcctgccaggcccccctggagtccccggcctcattggtgacttaggagtgttgggtccgattggctacccgggacccaagggcatgaagggactgatgggcagcgtgggggagcccggactgaaaggtgataagggtgaacaaggggttccaggtgtgtcaggagatcccggattccaaggagacaaggggagccaggggttgccagggttccccggtgcacgggggaagccagggcctctgggcaaagtcggagacaaaggatccattgggtttcccgggccccctggacccgagggattcccaggagacatcggcccccctggcgacaatggcccagaaggcatgaagggtaagcctggagcccgaggcctgccgggaccccgtgggcagctggggcccgagggagatgagggacccatggggccgccaggggcccctggcttggagggtcagcctggcaggaaggggtttcctgggaggcccggcctggatggcgtgaagggggaaccaggggatcctggtcggccggggcctgtgggagagcagggatttatgggattcattggtctggtcggggagccaggaatcgtgggagaaaagggtgatcgtggcatgatgggacccccaggcgtgcctggacccaaggggtcgatgggtcatcctggaatgccaggtggtatggggacccctggagagcctggaccccagggtcctccaggatctcgaggcccaccaggcatgaggggagcaaagggacgtcggggcccccgaggaccggacggaccagctggggagcaagggtccaggggcctgaagggccctccaggaccccagggcagaccgggccggcctggacagcagggtgtggctggtgagcgaggccacttgggctcgagaggctttcctggcatcccgggtccctcaggccccccaggcaccaagggcctcccaggagaaccgggccctcagggaccccaggggccaattgggcctccaggagagatgggacccaaggggccgcctggtgcagtgggagaaccgggccttcctggggaagccgggatgaagggtgaccttggacccctgggcactcctggggagcagggcctcattgggcaacggggagagccaggccttgagggtgacagtggccccatgggacctgatgggctgaagggggacaggggagacccagggcctgatggagaacatggcgagaaaggccaggaagggctgatgggtgaggacgggccccccggcccccctggcgtcactggtgtccggggtcctgaaggaaaatcagggaagcaaggcgagaagggccgcactggagccaagggtgccaagggctatcaaggacagctgggtgagatgggcgtccctggagaccctggaccccctggcactccaggccctaaagggtcccggggcagcctgggaccaacgggtgctccgggacgcatgggggcccaaggagaaccgggactggctggttatgatggacacaaaggcattgtgggaccccttggacctcctggaccaaaaggcgaaaagggggagcagggcgaggacggcaaggctgaggggccccctgggccacctggagatcggggccctgtgggtgatcgaggagaccgcggggaaccgggagaccctgggtaccctggacaggagggtgtgcaaggcctccgtggaaagccaggccagcagggccaacccgggcatccgggaccccgggggtggccgggacccaaaggatcgaaaggcgcagagggaccaaagggaaagcaaggcaaggcaggggccccaggccggaggggggtccagggcctgcaggggctgccagggccccggggcgtggtggggagacagggcctcgagggcatcgctggaccagatgggcttcctggcagggacgggcaagcaggacagcagggggagcagggagacgatggggaccctggccccatgggccctgctgggaagagaggaaatccaggtgtggccggcttacctggagcacagggacccccaggattcaagggtgagagtgggttacccggacagctgggtccccctggcaagcgaggaacagagggcagaacggggctccctggaaaccagggggagcctgggtccaaaggccagccgggcgactctggcgagatgggcttcccaggaatggcaggtctcttcggacccaagggcccgcctggagacattggcttcaaaggcatccagggccctcgggggccacctggcttgatgggaaaggaaggcatcgtcgggcccctcggaatcctgggaccttcgggactcccgggtccgaagggtgacaaaggcagccgtggggactggggattgcaaggtccgaggggtcctcccggccccagagggcggcccggccccccgggtcctccagggggtcctatccaattgcaacaagatgatcttggggcagctttccagacgtggatggacaccagtggagcactcaggccagagagttacagctatccagaccggctggtgctggaccagggaggagagatctttaaaaccttacactacctcagcaacctcatccagagcattaagacgcccctgggcaccaaagagaaccccgcccgggtctgcagggacctcatggactgtgagcagaagatggtggatggtacctactgggtggatccaaaccttggctgctcctctgacaccatcgaggtctcctgcaacttcactcatggtggacagacgtgtctcaagcccatcacggcctccaaggtcgagtttgccatcagccgggtccagatgaatttcctgcacctgctaagctccgaggtgacccagcacatcaccatccactgccttaacatgaccgtgtggcaggagggcactgggcagaccccagccaagcaggccgtacgcttccgggcctggaatggacagatttttgaagctgggggtcagttccggcccgaggtgtccatggatggctgcaaggtccaagatggccgctggcatcagacactcttcaccttccggacccaagacccccaacagctgcccatcatcagtgtggacaacctccctcctgcctcatcagggaagcagtaccgcctggaagttggacctgcgtgcttcctctgacctctgacctcgtggccactctaggcctcacggaggagggaagaggaagaggcaaggggagggtactgaggggcagatggctccaggagaggcagctcccctgcccaagggtccttgggcagaccccagctgttgtctgcccagtagaagtgggtgggggtaggaggggatagggtgtccttgggaacaatggatcccagcttagccccaaagaccaaccaaagagccagccagagtaagctggacctgcaacctgcctgagccccgtggcctctcagctctgcggccaccccgttccctccccagcttcctgcccaaagagccccacattcaagccaacttgagggaagggggcgtctcgtcagctggtccctgctagggagctattgatgtgcaatattagaaaggagacatgaaaaaaggagaaaaggaaagacagaagtgtatatatatattatttaaacaaacaaaaagaaggtgcgttactatttttttttcacccgggaaagaggtgagaggatgggaaggagcagccaggcgtgggaagcggcgagatcctcgggctgggggtgcccacgtttgctacctcccactgtgaaatcgctggtgctcacaattgtctctcacagtgtatgtgatttttttaaggaaaaaaaaaaatccctatttaagattctgaaggtgctaccattattttgccacagactttgaagaaacttttggatgtggggcatcatccgcatctttctctctcctccaaatgacaaagtttggggaatttttgaattttcctagcatcgcccttgtgctcatcaggtaatctgctaaggaggaaaaaagaaaagaaaaaaggaaaaaaaaaaaaaaaaagcaaaacaaaaacaaaaacaaaaaccctaccagaaaccagaagtagagagatttaccatataacttatggactttgaaatgtctgtccttttaaggcagcagggaggcctgggtgcgaagcatgttggcttggcccttcacggtcctggagggaggtgaggctggccttggaaggcgtgccctggagaggtcttgggtgaaaacttgaccttgaagaaaccaatcacaaaagcggcgttgggtcagggctaggcttagaggtgaagcatcaacatggaaccatctcaggaagccgcatcgcctcttccgaggtcctcacttccaggagcctgtccttgcaagatgcaatcatcgttcctgctttttcattgtcattaaattctgtagaaacccattgtcattagctccaagtgtaaatttgggtcaaggagacagaataataatgggaatctcggagttcgacaccatagtgacgttcagcgtcctctgaattgtgctacatcagcgaacaagtcggcgcttgaattggattttgaggttattttaaccatggaattatttttatagaaggggaaaatgtatgtgaaagtctctatttgtgtatttctctcctaaagttgtgtctctttgggaattggatttgatttttattatttaatacctcactttggcccgtcccccctcccaacacttctgtatcctcgccctgccgccccagcctggacgctctgcgtggaagtgcgtgtttgtagcagctcgggcctcatctcagcgctcggatccctcctgctgccagaatccactggcctctgtctcattcttgggttttcctgctgtcttcgtttacgtctctgtccacatgtcagtgtattaaaaccccaatgggttccgtttctccttttcccctctggattttaaataaatatttaaaactgaggcaatggaa

SEQ ID NO: 121626 - DNA, 2865 bp, Homo sapiens
  Payload ID: 3846
  Gene Symbol: COL27A1
  Gene Name: collagen, type XXVII, alpha 1
  ENST ID: ENST00000451716
  CDS Start-End: 1-2145
ctcagctggacgaaggccgggagccctgcacccccgggagtcattcctttccagtcgggcttcatctttacgcagcgggcccggctccaggctcccacgggcaccgtcattcctgccgccttgggcacagagctggcactggtgctgagcctctgctcccaccgggtgaaccatgccttcctcttcgctgtccgcagccagaaacgcaagctgcagctgggcctgcagttcctccccggcaagacggtcgtccacctcgggtcccggcgctcagtggccttcgacctcgacatgcacgacgggcgctggcaccacctggccctcgagctccgaggccgcacagtcactctggtgactgcctgcgggcagcgccgggtgcctgtcctgctgcctttccacagggaccctgcactcgaccctgggggctccttcctctttgggaagatgaacccgcatgcagtccagtttgaaggtgctctctgccagttcagtatctaccctgtgacgcaggtcgctcacaattactgtacccacctgaggaagcagtgtggacaggctgacacgtaccagtccccactgggacctctcttctcccaagactctggcagaccttttaccttccagtccgacctcgccctgctaggcctggagaacttgaccactgccacaccagccctggggtcactgccagcaggcaggggacccagggggactgtggcacccgccacgcccaccaagccccaaaggactagccccacaaaccctcaccagcatatggcggtgggaggcccagcccaaaccccgctgctacctgccaagctgtcagccagtaacgcacttgatcccatgctcccagcctctgttggcggctctaccagaacgcctcgccctgcggccgctcaaccatcacagaagatcacagccaccaaaatccccaaaagcctccctaccaagccttcggccccttctacttcaattgtgcccatcaaaagcccccatcctacccagaaaacagctccatcttcatttacaaagtcagccctacccactcagaagcaagtgccacctacttcccgtccagttcctgccagagtctcccgtcccgcagagaagcccatccagaggaacccgggaatgcccaggcccccaccgcccagcacccggcccctacctcctaccaccagctcctctaaaaaacccattcccacactagctcggactgaggccaagataaccagccatgccagtaagccggcctctgcccgcaccagcacccacaaacctcccccatttactgctttatcctcatctcctgcccctactcctggttctaccaggagtactcggccaccagccacgatggtacctccaacttcgggcaccagcactcccagaacagcacctgccgtccccactcctggctcagctcccactggaagcaagaagcccattggatcggaagcctcaaagaaagccggacccaagagcagcccccggaagcctgtccccctcagacctgggaaggcagccagggatgtccccttgagcgatctgacaaccaggcctagccccagacagccccagcccagtcagcagaccaccccggccctggtattggccccggcgcaattcctgtcctccagcccccggcccacgagcagtggctattcgatcttccacctggcaggatctacgcctttccctctgctgatggggcctccgggacccaagggagactgtggcttgccgggtccccctgggctacctgggctacctggaatccctggtgcacgtgggcctcggggtcctcctgggccttatggaaatccaggtctccccggccctcctggagccaaaggtgacatgggcttgcctgggctctccgggaatccaggacctccgggacgaaaggggttacctggaccggtaggagatcccggccccaaaggcagcaggggctacattgggctcccagggctcttcggcctgccagggtctgatggagaacgaggcctgcctggcgttcctggcaagaggggcaagatgggtatgccggtccttctaccccaaagttcagaggccagaggtgggaactcaatgccttcagaaggtgccctggctggacgccatggctcacacctgtaatcccaacactttgggaggccaaggcaggcagatcgcttgagcccaggagttcgagaccagcttgggcaacatggagaaaccccatctttaccaaaaatacaaaaattagccaggtgtagtggtgtgcatctgtaatcccagctacttgggaggctgaggcggcaggatcactaggaggcagaggttgcagtgagcagttatcacaccactgcacttcagcctggatgacagagtgagaccctgtatcatgaaaaaaaaagaaggatcccctggacacagcccacctggctgattcttgtcccaggaggtgagacgatctaccttcagcatgaccaagaagagctggtttaggtgagactggaatttaccaggggagaccctaaagatgtgggggaggaagcttgggtaaggtcagatatgcccccacaaagacatgatctggaaacacacacacaccctcccctgccacactcctctgccaccctctgcaaccagttggacacgcgtttgagcagcttctacataccaggctttgcccgtgcatagctcatatgaacatgccaaactccagaggtggacctgggctctgcttgctttatgaccttggccatgtgatgttgcctaaccgagtctcaattttcccatctgtgaaatgggactgataacttttccctcaaagatagatatcaaatgcaaaatgaagtcttgcatgcaaagtga

SEQ ID NO: 121627 - DNA, 5329 bp, Homo sapiens
  Payload ID: 3846
  Gene Symbol: COL27A1
  Gene Name: collagen, type XXVII, alpha 1
  ENST ID: ENST00000494090
  CDS Start-End: 1-1456
ggccgctcaaccatcacagaagatcacagccaccaaaatccccaaaagcctccctaccaagccttcggccccttctacttcaattgtgcccatcaaaagcccccatcctacccagaaaacagctccatcttcatttacaaagtcagccctacccactcagaagcaagtgccacctacttcccgtccagttcctgccagagtctcccgtcccgcagagaagcccatccagaggaacccgggaatgcccaggcccccaccgcccagcacccggcccctacctcctaccaccagctcctctaaaaaacccattcccacactagctcggactgaggccaagataaccagccatgccagtaagccggcctctgcccgcaccagcacccacaaacctcccccatttactgctttatcctcatctcctgcccctactcctggttctaccaggagtactcggccaccagccacgatggtacctccaacttcgggcaccagcactcccagaacagcacctgccgtccccactcctggctcagctcccactggaagcaagaagcccattggatcggaagcctcaaagaaagccggacccaagagcagcccccggaagcctgtccccctcagacctgggaaggcagccagggatgtccccttgagcgatctgacaaccaggcctagccccagacagccccagcccagtcagcagaccaccccggccctggtattggccccggcgcaattcctgtcctccagcccccggcccacgagcagtggctattcgatcttccacctggcaggatctacgcctttccctctgctgatggggcctccgggacccaagggagactgtggcttgccgggtccccctgggctacctgggctacctggaatccctggtgcacgtgggcctcggggtcctcctgggccttatggaaatccaggtctccccggccctcctggagccaaaggtgacatgggcttgcctgggctctccgggaatccaggacctccgggacgaaagggacacaagggctatcctggaccggcagggcaccccggagaacaggggcagccaggacctgagggcagcccaggggccaaaggttaccctggcaggcaggggttacctggaccggtaggagatcccggccccaaaggcagcaggggctacattgggctcccagggctcttcggcctgccagggtctgatggagaacgaggcctgcctggcgttcctggcaagaggggcaagatgggtatgccggggtttcctggagtctttggggaaagaggccctcctggactggatggaaatcctggagaactgggcctgccaggcccccctggagtccccggcctcattggtgacttaggagtgttgggtccgattggctacccgggacccaagggcatgaagggactgatgggcagcgtgggggagcccggactgaaagggtgaacaaggggttccaggtgtgtcaggagatcccggattccaaggagacaaggggagccaggggttgccagggttccccggtgcacgggggaagccagggcctctgggcaaagtcggagacaaaggatccattgggtttcccgggccccctggacccgagggattcccaggagacatcggcccccctggcgacaatggcccagaaggcatgaagggtaagcctggagcccgaggcctgccgggaccccgtgggcagctggggcccgagggagatgagggacccatggggccgccaggggcccctggcttggagggtcagcctggcaggaaggggtttcctgggaggcccggcctggatggcgtgaagggggaaccaggggatcctggtcggccggggcctgtgggagagcagggatttatgggattcattggtctggtcggggagccaggaatcgtgggagaaaagggtgatcgtggcatgatgggacccccaggcgtgcctggacccaaggggtcgatggtaaggaggtcatcctggaatgccaggtggtatggggacccctggagagcctggaccccagggtcctccaggatctcgaggcccaccaggcatgaggggagcaaagggacgtcggggcccccgaggaccggacggaccagctggggagcaagggtccaggggcctgaagggccctccaggaccccagggcagaccgggccggcctggacagcagggtgtggctggtgagcgaggccacttgggctcgagaggctttcctggcatcccgggtccctcaggccccccaggcaccaagggcctcccaggagaaccgggccctcagggaccccaggggccaattgggcctccaggagagatgggacccaaggggccgcctggtgcagtgggagaaccgggccttcctggggaagccgggatgaagggtgaccttggacccctgggcactcctggggagcagggcctcattgggcaacggggagagccaggccttgagggtgacagtggccccatgggacctgatgggctgaagggggacaggggagacccagggcctgatggagaacatggcgagaaaggccaggaagggctgatgggtgaggacgggccccccggcccccctggcgtcactggtgtccggggtcctgaaggaaaatcagggaagcaaggcgagaagggccgcactggagccaagggtgccaagggctatcaaggacagctgggtgagatgggcgtccctggagaccctggaccccctggcactccaggccctaaagggtcccggggcagcctgggaccaacgggtgctccgggacgcatgggggcccaaggagaaccgggactggctggttatgatggacacaaaggcattgtgggaccccttggacctcctggaccaaaaggcgaaaagggggagcagggcgaggacggcaaggctgaggggccccctgggccacctggagatcggggccctgtgggtgatcgaggagaccgcggggaaccgggagaccctgggtaccctggacaggagggtgtgcaaggcctccgtggaaagccaggccagcagggccaacccgggcatccgggaccccgggggtggccgggacccaaaggatcgaaaggcgcagagggaccaaagggaaagcaaggcaaggcaggggccccaggccggaggggggtccagggcctgcaggggctgccagggccccggggcgtggtggggagacagggcctcgagggcatcgctggaccagatgggcttcctggcagggacgggcaagcaggacagcagggggagcagggagacgatggggaccctggccccatgggccctgctgggaagagaggaaatccaggtgtggccggcttacctggagcacagggacccccaggattcaagggtgagagtgggttacccggacagctgggtccccctggcaagcgaggaacagagggcagaacggggctccctggaaaccagggggagcctgggtccaaaggccagccgggcgactctggcgagatgggcttcccaggaatggcaggtctcttcggacccaagggcccgcctggagacattggcttcaaaggcatccagggccctcgggggccacctggcttgatgggaaaggaaggcatcgtcgggcccctcggaatcctgggaccttcgggactcccgggtccgaagggtgacaaaggcagccgtggggactggggattgcaaggtccgaggggtcctcccggccccagagggcggcccggccccccgggtcctccagggggtcctatccaattgcaacaagatgatcttggggcagctttccagacgtggatggacaccagtggagcactcaggccagagagttacagctatccagaccggctggtgctggaccagggaggagagatctttaaaaccttacactacctcagcaacctcatccagagcattaagacgcccctgggcaccaaagagaaccccgcccgggtctgcagggacctcatggactgtgagcagaagatggtggatggtacctactgggtggatccaaaccttggctgctcctctgacaccatcgaggtctcctgcaacttcactcatggtggacagacgtgtctcaagcccatcacggcctccaaggtcgagtttgccatcagccgggtccagatgaatttcctgcacctgctaagctccgaggtgacccagcacatcaccatccactgccttaacatgaccgtgtggcaggagggcactgggcagaccccagccaagcaggccgtacgcttccgggcctggaatggacagatttttgaagctgggggtcagttccggcccgaggtgtccatggatggctgcaaggtccaagatggccgctggcatcagacactcttcaccttccggacccaagacccccaacagctgcccatcatcagtgtggacaacctccctcctgcctcatcagggaagcagtaccgcctggaagttggacctgcgtgcttcctctgacctctgacctcgtggccactctaggcctcacggaggagggaagaggaagaggcaaggggagggtactgaggggcagatggctccaggagaggcagctcccctgcccaagggtccttgggcagaccccagctgttgtctgcccagtagaagtgggtgggggtaggaggggatagggtgtccttgggaacaatggatcccagcttagccccaaagaccaaccaaagagccagccagagtaagctggacctgcaacctgcctgagccccgtggcctctcagctctgcggccaccccgttccctccccagcttcctgcccaaagagccccacattcaagccaacttgagggaagggggcgtctcgtcagctggtccctgctagggagctattgatgtgcaatattagaaaggagacatgaaaaaaggagaaaaggaaagacagaagtgtatatatatattatttaaacaaacaaaaagaaggtgcgttactatttttttttcacccgggaaagaggtgagaggatgggaaggagcagccaggcgtgggaagcggcgagatcctcgggctgggggtgcccacgtttgctacctcccactgtgaaatcgctggtgctcacaattgtctctcacagtgtatgtgatttttttaaggaaaaaaaaaaatccctatttaagattctgaaggtgctaccattattttgccacagactttgaagaaacttttggatgtggggcatcatccgcatctttctctctcctccaaatgacaaagtttggggaatttttgaattttcctagcatcgcccttgtgctcatcaggtaatctgctaaggaggaaaaaagaaaagaaaaaagg

SEQ ID NO: 121628 - DNA, 4277 bp, Homo sapiens
  Payload ID: 3847
  Gene Symbol: COL28A1
  Gene Name: collagen, type XXVIII, alpha 1
  Uniprot ID: Q2UY09
  ENST ID: ENST00000399429
  CDS Start-End: 142-3519
cagaacagaacaatatcaaatagctaacttcacccccaaccacagtccttgctgttggcatttactcaactagtctttaattcctgtttgacaaactttataaggtgctacaagacagatgatttttcaccatctaccataatgtggaacagatattttgtcttctatctcctgcttttgtcagcgtttacgagtcaaacagtatccggacaaagaaagaaaggaccaaaatcaaatttgcttgcaaggaaaagtgatgtccagggctccatttgtttcatagatattgtcttcatcgtggacagctctgaaagttctaaaattgccctctttgataaacagaaagattttgtggatagcttgagtgacaagattttccaattgactcctggtcgctccttggaatatgacatcaaactggcagcccttcagtttagcagctctgtccaaattgatccacctttttcttcctggaaggacctgcagacatttaagcagaaggtcaagtctatgaatttaatagggcaaggtaccttctcttattatgccatttccaatgccactaggctacttaagagagaagggcgtaaggatggtgtgaaagtggttttgctgatgactgatggcatcgaccatccaaagaatccagatgttcaaagtatttctgaagatgccagaatttcaggaatatcatttatcaccattgcactttctacggtagtcaatgaagccaaacttcgtttgatttctggggattcatccagtgaacccactttactgttgagtgatccaacccttgtagataaaattcaagatcgtctggatatcttatttgaaaagaagtgtgaacgcaagatttgtgaatgtgagaagggagatccaggtgatccagggcctcctggtacacatggaaatccaggtatcaaaggtgagcgaggaccaaaaggaaacccgggcaacgctcaaaaaggagaagctggagaaagaggtccagggggaattcctgggtacaagggtgacaagggtgaacgtggggaatgtggtaaaccagggataaaaggtgacaagggatccccagggccatatggaccaaagggacccagaggaattcagggaattactggacctccaggagacccaggcccaaaggggtttcaaggcaataagggtgagccaggtcctcctggtccttatggttctccaggagctcctggaattggacagcaaggtattaagggagaaagaggccaagaaggaagaccgggagctccaggacccattggagttggtgagcctggacagccaggtccccgtggtcctgagggagtaccaggagagaggggcttacccggagaaggatttccaggaccaaagggtgaaaaaggttctgaaggaccaactggcccacagggattacaaggcctgtcaatcaaaggggagaagggggatataggacctgtgggaccccaaggaccaatgggtatccctggaatcgggagtcaaggggaacagggaatccaaggtcctattggtccacctggtccacaagggcccgcaggacagggcttacctggttccaagggagaagtaggccaaatgggacctacaggccctcgaggaccagtgggaattggagtacaaggtccaaagggagagccaggctcaatagggctcccaggacaaccaggagtaccaggagaagatggagctgcagggaagaagggagaagcggggcttccgggagcaagaggcccagaaggaccacctggaaaaggacagcctggccccaagggtgacgaaggcaagaaagggagcaaaggaaatcaaggacagaggggacttccagggcccgaaggaccaaagggtgaaccgggcattatgggcccttttggaatgcctggaacatcaattcctggaccacctgggccaaagggagatagaggaggacctgggatacctggatttaagggagaacctggactttctattcgaggaccaaagggtgtccaaggccctcggggaccagtgggtgctccaggactcaaaggtgatggctatcctggtgtgcctggacctcgtggattaccaggaccccctgggccgatgggtttacgtggagtgggagacactggagcaaagggagagcctggggtcagaggccctccaggtccttctgggcctcggggcgtaggaacccaagggccaaagggtgatactgggcagaaaggcttgcctggccctcctggcccccctggctatggatcacagggaattaaaggggaacaaggaccacaaggcttcccaggcccaaagggcacaatgggccatggcctcccaggccagaagggagagcacggagaacggggcgatgtgggaaagaaaggtgataaaggagaaattggagagcctggatctccaggaaaacagggtttacaaggacccaaaggagacctaggacttacaaaagaagaaattatcaaacttattacagaaatatgtggttgtgggcccaaatgcaaagagactccactagagctggtgtttgtgatcgacagctcagaaagcgtggggccagagaactttcagatcattaaaaattttgtgaagactatggctgaccgggttgctctggaccttgccacggcccgcataggcataatcaactatagccataaggtggagaaggtggctaatttgaagcagttctccagcaaggatgacttcaagttggctgtggacaacatgcagtatctgggggaaggcacatacacagccactgctctgcaagcagccaacgacatgtttgaagatgcaaggccaggtgtaaaaaaagtggccttggtcatcactgatggacagacagattctcgtgataaagagaaactgacagaggtggtgaagaatgccagtgacaccaatgtggagatatttgtgataggggtggtgaagaaaaatgatcccaactttgaaatattccacaaagaaatgaatctaattgctactgacccagagcatgtttaccagtttgatgatttctttaccctgcaagacaccctgaagcaaaaattgtttcaaaaaatttgtgaggattttgattcctatctcgttcaaatttttggttcatcgtcacctcaacctggatttgggatgtcaggggaagaactcagtgaatctactccagagcctcaaaaagaaatttctgagtcattgagtgtcaccagagaccaggatgaagatgataaggctccagagccaacgtgggctgatgatctgcctgccactacctcatctgaggccaccaccacccccaggccactgctcagcacccctgtggatggggcagaggatcctagatgtttggaagccttgaagcctggaaactgtggtgaatatgtggttcgatggtattatgacaaacaggtcaactcttgtgcccgattttggttcagtggctgtaatggctcaggaaatagattcaacagtgaaaaggaatgtcaagaaacctgcattcaaggatgagcaagtaaattggcctgtctctatcaaaagcatagaactccctaatttccacatattcacccaatacaaatacagcactatatttgagtgtatactgagtatttacaacttatacatgtaattgaattctcactacagccctaggatgtacatattattaaccacttatataggtaagaaagctgaggctctgagaagtttagtaacttgtcaactgtcacccaactaaaaagtttcagagctgaggatttagacttagagctgtgtaacttcaatacacagactctatctacttcacaacctgcaatgtgattctgattcctttaattcctgttgtatgtactatgtcagctcaaacccctacccctgtccctgcccatacctccacccactcacctccctaacctccttatgtccctcgcagtagcaagatgtaggtgataggaaggacttcggtgtgagaattagaaatgatgtaaatgtttacgcaggagtgctgggataggagtcgggatggtgagggtagttagatttttgcctcacttgccctgaaagtggtaatagggagaaaccaatctgaattacaattacttaaatgtatcacagactgtcactttgtattcctccaacatgtttggtaacaagtgtttaatgtatgttaaaacaaagaaggtttttatacccttccattaaaatatgtcagtgggcccttccattttatggagtggaatgggaaggcccttgacagccaggaacca

SEQ ID NO: 121629 - DNA, 700 bp, Homo sapiens
  Payload ID: 3847
  Gene Symbol: COL28A1
  Gene Name: collagen, type XXVIII, alpha 1
  ENST ID: ENST00000453441
  CDS Start-End: 1-243
gccactacctcatctgaggccaccaccacccccaggccactgctcagcacccctgtggatggggcagaggatcctagatgtttggaagccttgaagcctggaaactgtggtgaatatgtggttcgatggtattatgacaaacaggtcaactcttgtgcccgattttggttcagtggctgtaatggctcaggaaatagattcaacagtgaaaaggaatgtcaagaaacctgcattcaaggatgagcaagtctaccctcattcaattcaacagtgcaaaaaagagcactcacggaagaaggagatggaagaatagccatcttggcagaaataatgatatgtataatttttttatttaattaaaattgtattatgtaatatttgatactacaaaagataatgcaacatgtttgtcaattttttttattatactttaagttttagggtacatgtgcacaaagtacaggtttgttacatatgtattcatgtgccatgttggtgtgctgcacccattaactcgtcatttaacattaggtatatttcctaatgctatccctccccactcccccgccaccccacaacaggccctggtgtgtgatgttccccttcctgtgtccatgtgttctcattgttcaactcccacctatgagtgagaacatgcggtgtttggttttttgtccttgtgacagtttgctgagaatga

SEQ ID NO: 121630 - DNA, 1755 bp, Homo sapiens
  Payload ID: 3847
  Gene Symbol: COL28A1
  Gene Name: collagen, type XXVIII, alpha 1
  ENST ID: ENST00000444268
  CDS Start-End: 1-204
aaaggaaacccgggcaacgctcaaaaaggagaagctggagaaagaggtccagggggaattcctgggtacaagggtgacaagcaatattctagggaagacagggaagtagagcataataatgaaaaatatgtagcatgcttgctgccaagcccggctctcctacagcagtcctcgctaactcatcatggcacctgttcccactaactcacgatgcaatctcacttcagaacctttctctcacggttctccaggtgaacactactaggtggtcaagggtgaacgtggggaatgtggtaaaccagggataaaaggtgacaagggatccccagggccatatggaccaaagggacccagaggaattcagggaattactggacctccaggagacccaggcccaaaggggtttcaaggcaataagggtgagccaggtcctcctggtccttatggttctccaggagctcctggaattggacagcaaggtattaagggagaaagaggccaagaaggaagaccgggagctccaggacccattggagttggtgagcctggacagccaggtccccgtggtcctgagggagtaccaggagagaggggcttacccggagaaggatttccaggaccaaagggtgaaaaaggttctgaaggaccaactggcccacagggattacaaggcctgtcaatcaaaggggagaagggggatataggacctgtgggaccccaaggaccaatgggtatccctggaatcgggagtcaaggggaacagggaatccaaggtcctattggtccacctggtccacaagggcccgcaggacagggcttacctggttccaagggagaagtaggccaaatgggacctacaggccctcgaggaccagtgggaattggagtacaaggtccaaagggagagccaggctcaatagggctcccaggacaaccaggagtaccaggagaagatggagctgcagggaagaagggagaagcggggcttccgggagcaagaggcccagaaggaccacctggaaaaggacagcctggccccaagggtgacgaaggcaagaaagggagcaaaggaaatcaaggacagaggggacttccagggcccgaaggaccaaagggtgaaccgggcattatgggcccttttggaatgcctggaacatcaattcctggaccacctgggccaaagggagatagaggaggacctgggatacctggatttaagggagaacctggactttctattcgaggaccaaagggtgtccaaggccctcggggaccagtgggtgctccaggactcaaaggtgatggctatcctggtgtgcctggacctcgtggattaccaggaccccctgggccgatgggtttacgtggagtgggagacactggagcaaagggagagcctggggtcagaggccctccaggtccttctgggcctcggggcgtaggaacccaagggccaaagggtgatactgggcagaaaggcttgcctggccctcctggcccccctggctatggatcacagggaattaaagtaagtgaatagggttgtgctggagtcacctctgatttcaccagagtgattgggagaagaggttgtagataacgcaaaaatggctattatgaaatagatttattgtgagcctcgcagttaaatggcatccagtgtttagagacatcatctggaagtgtaaaaatggtatgagtacaatacttcagcaaatgctaaacattatataaattgcttggtgcaaaagtgaa

SEQ ID NO: 121631 - DNA, 678 bp, Homo sapiens
  Payload ID: 3847
  Gene Symbol: COL28A1
  Gene Name: collagen, type XXVIII, alpha 1
  ENST ID: ENST00000435823
  CDS Start-End: 1-393
ggaatgcctggaacatcaattcctggaccacctgggccaaagggagatagaggaggacctgggatacctggatttaagggagaacctggactttctattcgaggaccaaagggtgtccaaggccctcggggaccagtgggtgctccaggactcaaaggtgatggctatcctggtgtgcctggacctcgtggattaccaggaccccctgggccgatgggtttacgtggagtgggagacactggagcaaagactttgaacacttcccatggccttgaagatccttcatgccccgactgcagcttctgtcatttctccctggctgccgacattcagccaaaatggcctgccctacttcagctcattcctgcatcagggactcgccaggatggctgattattaaaagcttagctcaaatgtcacctccccgaccacccatacagaaagcattactaccccaacccctctgtatgttttccatgtagcgtgtatcactttctgagatcatcttcctcatttatttctctgcatattccatgagagtgaaggttttcctggagcaggcttcttgctttgttccctcctaacttcatgtcaccagaactaggtgtaccattcagtaggagctctacaacttgttgaatgaatggaaaatgaataaatgatcaatattaccctaaa

SEQ ID NO: 121632 - DNA, 2323 bp, Homo sapiens
  Payload ID: 3847
  Gene Symbol: COL28A1
  Gene Name: collagen, type XXVIII, alpha 1
  ENST ID: ENST00000430711
  CDS Start-End: 1-429
tttgattcctatctcgttcaaatttttggttcatcgtcacctcaacctggatttgggatgtcaggggaagaactcagtgaatctactccagagcctcaaaaagaaatttctgagtcattgagtgtcaccagagaccaggatgaagatgataaggctccagagccaacgtgggctgatgatctgcctgccactacctcatctgaggccaccaccacccccaggccactgctcagcacccctgtggatggggcagaggatcctagatgtttggaagccttgaagcctggaaactgtggtgaatatgtggttcgatggtattatgacaaacaggtcaactcttgtgcccgattttggttcagtggctgtaatggctcaggaaatagattcaacagtgaaaaggaatgtcaagaaacctgcattcaaggatgagcaagtaaattggcctgtctctatcaaaagcatagaactccctaatttccacatattcacccaatacaaatacagcactatatttgagtgtatactgagtatttacaacttatacatgtaattgaattctcactacagccctaggatgtacatattattaaccacttatataggtaagaaagctgaggctctgagaagtttagtaacttgtcaactgtcacccaactaaaaagtttcagagctgaggatttagacttagagctgtgtaacttcaatacacagactctatctacttcacaacctgcaatgtgattctgattcctttaattcctgttgtatgtactatgtcagctcaaacccctacccctgtccctgcccatacctccacccactcacctccctaacctccttatgtccctcgcagtagcaagatgtaggtgataggaaggacttcggtgtgagaattagaaatgatgtaaatgtttacgcaggagtgctgggataggagtcgggatggtgagggtagttagatttttgcctcacttgccctgaaagtggtaatagggagaaaccaatctgaattacaattacttaaatgtatcacagactgtcactttgtattcctccaacatgtttggtaacaagtgtttaatgtatgttaaaacaaagaaggtttttatacccttccattaaaatatgtcagtgggcccttccattttatggagtggaatgggaaggcccttgacagccaggaaccacttgaagttggcatccactcttgaacagtgtgtattaaagacaggattcacactgaaaagtgagccaccaaattgaaatgcgagtaatggagagtaacggagaattgactctgtcattttataatacttttgcaagatcctgtctgggaagagcattagttctgagctgagttcagacagcacttgcatatttctttcttttttttttttttcccccagacagaatcttgctctgtcatccagcctgggtgacacagcaagactctgtctcaaaacaaaaacaaaaacaaaaaacaaaatactttctccttctatcaggtctaccctcattcaattcaacagtgcaaaaaagagcactcacggaagaaggagatggaagaatagccatcttggcagaaataatgatatgtataatttttttatttaattaaaattgtattatgtaatatttgatactacaaaagataatgcaacatgtttgtcaattttttttattatactttaagttttagggtacatgtgcacaaagtacaggtttgttacatatgtattcatgtgccatgttggtgtgctgcacccattaactcgtcatttaacattaggtatatttcctaatgctatccctccccactcccccgccaccccacaacaggccctggtgtgtgatgttccccttcctgtgtccatgtgttctcattgttcaactcccacctatgagtgagaacatgcggtgtttggttttttgtccttgtgacagtttgctgagaatgatggtttccagcttcatccatgtccctacaaaggacatgaactcatcattttttatggctgcatagtattctgtggtgtatatgtaacatgcttgtcaatttaaaaacatgataagatgaacaccagtgaacacatcacctagagaatgaagcaaacatcaaaaattctattgcagcttcccgtgtggccctccgccatcccagctctctattccatgccagggatatcccattttgaacttcgtatttaccatgtcaatgtgctgttgacatttataggtaattttacatgtaaaactctatatatctctatgtgttgccaaacaataaatatttagccttgcttattttacagttttacaaaaa

SEQ ID NO: 121633 - DNA, 2784 bp, Homo sapiens
  Payload ID: 3848
  Gene Symbol: COLQ
  Gene Name: collagen-like tail subunit (single strand of homotrimer) of asymmetric acetylcholinesterase
  Uniprot ID: Q9Y215
  ENST ID: ENST00000383781
  CDS Start-End: 286-1623
atatcctcccctgggctgaaggcactcttgtcctccaagcctcccctacagcagtgttcatgggcagctggagcagggctgcctacccattgctactcccaggagctcaggactggctccagacccctggcatctggagcagaagcaacatcaaagcagggattggccaactcccacccctaatgccaaacaggccaggcactgggagcactcagaggcgtgacgaatctcagcctgtctccggctagtgttccctggccagtccgctttgggccctgcctcacaatgacgggctcatcattcagcctcgctcatctgctcatcatttcaggactgctctgttactcggcaggctgcttggcccttcccagcctggatcagaagaagcgtggtggccacaaagcatgctgcctgctgacgcctcctccaccaccactgttcccaccaccattcttcagaggtggccgaagtccgcttctctccccagacatgaagaatctcatgctggaactggagacctcgcagtccccgtgcatgcaaggctcgctaggctcccctgggcctcccggcccccagggtccaccggggcttcctggcaagacaggaccaaagggagaaaagggggagcttggccgaccaggaaggaagggtagacctggccccccaggtgttcctggcatgcctgggcccatcggttggccaggccctgaaggacccaggggtgaaaaaggtgacctgggtatgatgggcttgccagggtcaagaggaccaatgggctccaagggctaccctggatccagaggggaaaagggatccagaggtgaaaagggtgacctgggtcccaaaggagaaaagggtttcccaggatttcctggaatgttggggcagaaaggtgaaatgggtccaaaaggtgaacctgggatagcaggacaccgaggacccacaggaagaccaggaaaacgaggcaagcagggacagaaaggggatagtggagttatgggcccaccaggcaagcctgggccttctggtcaacctggccgtccggggcccccaggccccccacctgcaggacaacttataatgggacccaaaggggaaagaggatttcccgggcctccaggaagatgtctttgtggacccactatgaatgtgaataacccttcctacggggaatctgtgtatgggcccagttccccgcgagttcctgtgatttttgtggtcaacaaccaggaggagcttgagaggctgaacacccaaaacgccattgccttccgcagagaccagagatctctgtacttcaaggacagccttggctggctccccatccagctgacccctttctaccctgtggattacactgcagaccagcacggcacctgtggggatgggctcctgcagcctggggaggagtgtgacgacggtaacagcgatgtgggtgacgactgcatccgctgtcaccgtgcctactgtggagatggtcaccggcatgagggtgtggaggactgtgacggctctgactttggctacctgacatgcgagacctatctccctgggtcatatggagacctgcaatgcacccagtactgctacatcgactccacgccctgccgctacttcacctgagggccgtgaggagaaggtgggctgcgccccacagaactggcagcagcttctccactgtcatcaaactggccatgtcctggccccgtctccaccaacctttgtgtgacaaaaacaaggacaaattcctgctactaagacatgctgttaactcagtctgactggaagaatttaggaccactgcatcctgtcttaatccaaggtactggaaaaccttccacatgcccaacctgagacctgttccccatcgctaccatttggccaaacaaccggctacaatgctcttcctcttctggaatgttgctgacccaggccgtggacttggctgagcactgttagacacacacagacctgcaggctgttttagaatgttttgatctctttggggaatctggagtacaggcctctccgcccctgaccaccgaaacgtgcaggcattctcactcacactgggcagcccgctgtcgggtctctctaggcctatgaaccacaaagcagggaagtgggcacgttctctcggggtggctcacagctttgaacctgccaaaggacccctcgactggccacagcccagcccagcctgacgtggatgtggctgcccaggaaaagacttaactgtgaaaaagtactgagaacccacctgacccaggcttgccccaagcagaggctagagaagaggctcctcttctcagtgtttcccaaaggggcggctcttgtggtttcaaaatctctggcaccatcttgacctcttggctctctctgcactttgccccctgtctcaaaaatgtccctcatgtccatttcctgtccaggagactcatgaggactgtgtgacctgcacaagcccacacctgggcaggctgttggtgtctccttggtccttaggcagatactcccctgagtccccgatctagggccagctgcagagggctctctctaggcagagcgttcctggccagagctctacctctttgcctcctgctgacccctgacagcgtcccgtggcatttctttcatgtctgcatattgcatagccttgtcctcctgtgtgcctgagctcctcccttttcaataagattattagtcgtgcatgtctgtgagctgcctttcatcaccatttttcctgagtagggcttagttttattctggaaagacatctccaag

SEQ ID NO: 121634 - DNA, 1482 bp, Homo sapiens
  Payload ID: 3848
  Gene Symbol: COLQ
  Gene Name: collagen-like tail subunit (single strand of homotrimer) of asymmetric acetylcholinesterase
  Uniprot ID: Q9Y215
  ENST ID: ENST00000383786
  CDS Start-End: 112-1377
acacacaaacacacgcgcacgcaaacagcagtgaggaagagaaaagcagagataagcaaggctccgcagcagcctcctttctaacttgaccctcgccagaccctggccagcatggttgtcctgaatccaatgactttgggaatttatcttcagcttttcttcctctctatcgtgtctcagccgactttcatcaacagcgttcttccaatctcagcagcccttcccagcctggatcagaagaagcgtggtggccacaaagcatgctgcctgctgacgcctcctccaccaccactgttcccaccaccattcttcagaggtggccgaagtccgggtccaccggggcttcctggcaagacaggaccaaagggagaaaagggggagcttggccgaccaggaaggaagggtagacctggccccccaggtgttcctggcatgcctgggcccatcggttggccaggccctgaaggacccaggggtgaaaaaggtgacctgggtatgatgggcttgccagggtcaagaggaccaatgggctccaagggctaccctggatccagaggggaaaagggatccagaggtgaaaagggtgacctgggtcccaaaggagaaaagggtttcccaggatttcctggaatgttggggcagaaaggtgaaatgggtccaaaaggtgaacctgggatagcaggacaccgaggacccacaggaagaccaggaaaacgaggcaagcagggacagaaaggggatagtggagttatgggcccaccaggcaagcctgggccttctggtcaacctggccgtccggggcccccaggccccccacctgcaggacaacttataatgggacccaaaggggaaagaggatttcccgggcctccaggaagatgtctttgtggacccactatgaatgtgaataacccttcctacggggaatctgtgtatgggcccagttccccgcgagttcctgtgatttttgtggtcaacaaccaggaggagcttgagaggctgaacacccaaaacgccattgccttccgcagagaccagagatctctgtacttcaaggacagccttggctggctccccatccagctgacccctttctaccctgtggattacactgcagaccagcacggcacctgtggggatgggctcctgcagcctggggaggagtgtgacgacggtaacagcgatgtgggtgacgactgcatccgctgtcaccgtgcctactgtggagatggtcaccggcatgagggtgtggaggactgtgacggctctgactttggctacctgacatgcgagacctatctccctgggtcatatggagacctgcaatgcacccagtactgctacatcgactccacgccctgccgctacttcacctgagggccgtgaggagaaggtgggctgcgccccacagaactggcagcagcttctccactgtcatcaaactggccatgtcctggccccgtctccaccaacctttgtgtg

SEQ ID NO: 121635 - DNA, 3005 bp, Homo sapiens
  Payload ID: 3848
  Gene Symbol: COLQ
  Gene Name: collagen-like tail subunit (single strand of homotrimer) Of asymmetric acetylcholinesterase
  Uniprot ID: Q9Y215
  ENST ID: ENST00000383788
  CDS Start-End: 127-1494
cacacgcacacacacacacacaaacacacgcgcacgcaaacagcagtgaggaagagaaaagcagagataagcaaggctccgcagcagcctcctttctaacttgaccctcgccagaccctggccagcatggttgtcctgaatccaatgactttgggaatttatcttcagcttttcttcctctctatcgtgtctcagccgactttcatcaacagcgttcttccaatctcagcagcccttcccagcctggatcagaagaagcgtggtggccacaaagcatgctgcctgctgacgcctcctccaccaccactgttcccaccaccattcttcagaggtggccgaagtccgcttctctccccagacatgaagaatctcatgctggaactggagacctcgcagtccccgtgcatgcaaggctcgctaggctcccctgggcctcccggcccccagggtccaccggggcttcctggcaagacaggaccaaagggagaaaagggggagcttggccgaccaggaaggaagggtagacctggccccccaggtgttcctggcatgcctgggcccatcggttggccaggccctgaaggacccaggggtgaaaaaggtgacctgggtatgatgggcttgccagggtcaagaggaccaatgggctccaagggctaccctggatccagaggggaaaagggatccagaggtgaaaagggtgacctgggtcccaaaggagaaaagggtttcccaggatttcctggaatgttggggcagaaaggtgaaatgggtccaaaaggtgaacctgggatagcaggacaccgaggacccacaggaagaccaggaaaacgaggcaagcagggacagaaaggggatagtggagttatgggcccaccaggcaagcctgggccttctggtcaacctggccgtccggggcccccaggccccccacctgcaggacaacttataatgggacccaaaggggaaagaggatttcccgggcctccaggaagatgtctttgtggacccactatgaatgtgaataacccttcctacggggaatctgtgtatgggcccagttccccgcgagttcctgtgatttttgtggtcaacaaccaggaggagcttgagaggctgaacacccaaaacgccattgccttccgcagagaccagagatctctgtacttcaaggacagccttggctggctccccatccagctgacccctttctaccctgtggattacactgcagaccagcacggcacctgtggggatgggctcctgcagcctggggaggagtgtgacgacggtaacagcgatgtgggtgacgactgcatccgctgtcaccgtgcctactgtggagatggtcaccggcatgagggtgtggaggactgtgacggctctgactttggctacctgacatgcgagacctatctccctgggtcatatggagacctgcaatgcacccagtactgctacatcgactccacgccctgccgctacttcacctgagggccgtgaggagaaggtgggctgcgccccacagaactggcagcagcttctccactgtcatcaaactggccatgtcctggccccgtctccaccaacctttgtgtgacaaaaacaaggacaaattcctgctactaagacatgctgttaactcagtctgactggaagaatttaggaccactgcatcctgtcttaatccaaggtactggaaaaccttccacatgcccaacctgagacctgttccccatcgctaccatttggccaaacaaccggctacaatgctcttcctcttctggaatgttgctgacccaggccgtggacttggctgagcactgttagacacacacagacctgcaggctgttttagaatgttttgatctctttggggaatctggagtacaggcctctccgcccctgaccaccgaaacgtgcaggcattctcactcacactgggcagcccgctgtcgggtctctctaggcctatgaaccacaaagcagggaagtgggcacgttctctcggggtggctcacagctttgaacctgccaaaggacccctcgactggccacagcccagcccagcctgacgtggatgtggctgcccaggaaaagacttaactgtgaaaaagtactgagaacccacctgacccaggcttgccccaagcagaggctagagaagaggctcctcttctcagtgtttcccaaaggggcggctcttgtggtttcaaaatctctggcaccatcttgacctcttggctctctctgcactttgccccctgtctcaaaaatgtccctcatgtccatttcctgtccaggagactcatgaggactgtgtgacctgcacaagcccacacctgggcaggctgttggtgtctccttggtccttaggcagatactcccctgagtccccgatctagggccagctgcagagggctctctctaggcagagcgttcctggccagagctctacctctttgcctcctgctgacccctgacagcgtcccgtggcatttctttcatgtctgcatattgcatagccttgtcctcctgtgtgcctgagctcctcccttttcaataagattattagtcgtgcatgtctgtgagctgcctttcatcaccatttttcctgagtagggcttagttttattctggaaagacatctccaaggtgaggtccacccccacagcagacctcaagtagaaattgcccaatttttaccagctggagggacacccttgggtttttgtacgaagctatttaatgagcctgtgtcttggggactcagcaggctggagcttggggcctggtggaccatcacctggtgtctgtaggtggacccggtctcccacaggtgacatcaacctgagggtggcgtctttagagacaggcacatgggcagccctgttcccttcgcctctactgcgaggcctggggagatgttgttttcatgctgcttccaccatcacactggggtttctggatgggaaataaaaaaataaaggcagttcatttcccca

SEQ ID NO: 121636 - DNA, 1668 bp, Homo sapiens
  Payload ID: 3848
  Gene Symbol: COLQ
  Gene Name: collagen-like tail subunit (single strand of homotrimer) of asymmetric acetylcholinesterase
  ENST ID: ENST00000603808
  CDS Start-End: 127-1497
cacacgcacacacacacacacaaacacacgcgcacgcaaacagcagtgaggaagagaaaagcagagataagcaaggctccgcagcagcctcctttctaacttgaccctcgccagaccctggccagcatggttgtcctgaatccaatgactttgggaatttatcttcagcttttcttcctctctatcgtgtctcagccgactttcatcaacagcgttcttccaatctcagcagcccttcccagcctggatcagaagaagcgtggtggccacaaagcatgctgcctgctgacgcctcctccaccaccactgttcccaccaccattcttcagaggtggccgaagtccgcttctctccccagacatgaagaatctcatgctggaactggagacctcgcagtccccgtgcatgcaaggctcgctaggctcccctgggcctcccggcccccagggtccaccggggcttcctggcaagacaggaccaaagggagaaaagggggagcttggccgaccaggaaggaagggtagacctggccccccaggtgttcctggcatgcctgggcccatcggttggccaggccctgaaggacccaggggtgaaaaaggtgacctgggtatgatgggcttgccagggtcaagaggaccaatgggctccaagggctaccctggatccagaggggaaaagggatccagaggtgaaaagggtgacctgggtcccaaaggagaaaagggtttcccaggatttcctggaatgttggggcagaaaggtgaaatgggtccaaaaggtgaacctgggatagcaggacaccgaggacccacaggaagaccaggaaaacgaggcaagcagggacagaaaggggatagtggagttatgggcccaccaggcaagcctgggccttctggtcaacctggccgtccggggcccccaggccccccacctgcaggacaacttataatgggacccaaaggggaaagaggatttcccgggcctccaggaagatgtctttgtggacccactatgaatgtgaataacccttcctacggggaatctgtgtatgggcccagttccccgcgagttcctgtgatttttgtggtcaacaaccaggaggagcttgagaggctgaacacccaaaacgccattgccttccgcagagaccagagatctctgtacttcaaggacagccttggctggctccccatccagctgacccctttctaccctgtggattacactgcagaccagcacggcacctgtggggatgggctcctgcagcctggggaggagtgtgacgacggtaacagcgatgtgggtgacgactgcatccgtgactgtcaccgtgcctactgtggagatggtcaccggcatgagggtgtggaggactgtgacggctctgactttggctacctgacatgcgagacctatctccctgggtcatatggagacctgcaatgcacccagtactgctacatcgactccacgccctgccgctacttcacctgagggccgtgaggagaaggtgggctgcgccccacagaactggcagcagcttctccactgtcatcaaactggccatgtcctggccccgtctccaccaacctttgtgtgacaaaaacaaggacaaattcctgctactaagacatgctgttaactcagtctgactggaagaattta

SEQ ID NO: 121637 - DNA, 582 bp, Homo sapiens
  Payload ID: 3848
  Gene Symbol: COLQ
  Gene Name: collagen-like tail subunit (single strand of homotrimer) of asymmetric acetylcholinesterase
  ENST ID: ENST00000605797
  CDS Start-End: 1-582
atttcaggactgctctgttactcggcaggctgcttggcccttcccagcctggatcagaagaagcgtggtggccacaaagcatgctgcctgctgacgcctcctccaccaccactgttcccaccaccattcttcagaggtggccgaagtccgggtccaccggggcttcctggcaagacaggaccaaagggagaaaagggggagcttggccgaccaggaaggaagggtagacctggccccccaggtgttcctggcatgcctgggcccatcggttggccaggccctgaaggacccaggggtgaaaaaggtgacctgggtatgatgggcttgccagggtcaagaggaccaatgggctccaagggctaccctggatccagaggggaaaagggatccagaggtgaaaagggtgacctgggtcccaaaggagaaaagggtttcccaggatttcctggaatgttggggcagaaaggtgaaatgggtccaaaaggtgaacctgggatagcaggacaccgaggacccacaggaagaccaggaaaacgaggcaagcagggacagaaaggggatagtggagttatgggcccacca

SEQ ID NO: 121638 - DNA, 3146 bp, Homo sapiens
  Payload ID: 3849
  Gene Symbol: CRMP1
  Gene Name: collapsin response mediator protein 1
  Uniprot ID: Q14194
  ENST ID: ENST00000324989
  CDS Start-End: 90-2150
gcaccgaggcgcggagcgcggcgcacggcggtgcccagggccgcgggcgggcaggcgggagcgcggtgggtggccggccttggacgggtatggcggaccggcggcgcgcgtggaacaccgaggacgacctgcccgtgtacctggcgcggccgggcagcgcggcgcagaccccgcgccagaagtacggcggcatgttcgccgcggtggagggcgcctacgagaacaagaccatcgacttcgacgcctacagtgtgggccgccgcggctcggcgcgcacgccgcgcagcgctggccggcccgacgcggtcgggctgccagggccgggaggcagcgaggacacggccagcgacgtgagcgagccctcgggctccgcggtcagctctcccggagagcgcgacgagcggccgccgacgctgcgcatccgccgccccgcgccccgcgacctgcccctcggccgggacaatggccagagtgaccgactcctcatcaaaggtggacggatcatcaacgatgaccaatccctttatgctgacgtctacctggaggatggacttatcaaacaaataggagagaacttaatcgttcctggtggagtgaagaccattgaagccaacgggcggatggttattcccggaggtattgatgtcaacacgtacctgcagaagccctcccaggggatgactgcggctgatgacttcttccaagggaccagggcggcactggtgggcgggaccacgatgatcattgaccatgttgttcctgaacctgggtccagcctactgacctctttcgagaagtggcacgaagcagctgacaccaaatcctgctgtgattactccctccacgtggacatcacaagctggtacgatggcgttcgggaggagctggaggtgctggtgcaggacaaaggcgtcaattccttccaagtctacatggcctataaggatgtctaccaaatgtccgacagccagctctatgaagcctttaccttccttaagggcctgggagctgtgatcttggtccatgcagaaaatggagatttgatagctcaggaacaaaagcggatcctggagatgggcatcacgggtcccgagggccatgccctgagcagacctgaagagctggaggccgaggcggtgttccgggccatcaccattgcgggccggatcaactgccctgtgtacatcaccaaggtcatgagcaagagtgcagccgacatcatcgctctggccaggaagaaagggcccctagtttttggagagcccattgccgccagcctggggaccgatggcacccattactggagcaagaactgggccaaggctgcggcgttcgtgacttcccctcccctgagcccggaccctaccacgcccgactacttgacctccctactggcctgtggggacttgcaggtcacaggcagcggccactgtccctacagcactgcccagaaggcggtgggcaaggacaactttaccctgatccccgagggtgtcaacgggatagaggagcggatgacggtcgtctgggacaaggcggtggctactggcaaaatggatgagaaccagtttgtcgctgtcaccagcaccaatgcagccaagatctttaacctgtacccaaggaaagggcggattgccgtgggctcggatgccgacgtggtcatctgggaccccgacaagttgaagaccataacagccaaaagtcacaagtcggcggtggagtacaacatcttcgagggtatggagtgccacggctccccactagtggtcatcagccagggcaagatcgtctttgaagacggaaacatcaacgtcaacaagggcatgggccgcttcattccgcggaaggcgttcccggagcacctgtaccagcgcgtcaaaatcaggaataaggtttttggattgcaaggggtttccaggggcatgtatgacggtcctgtgtacgaggtaccagctacacccaaatatgcaactcccgctccttcagccaaatcttcgccttctaaacaccagcccccacccatcagaaacctccaccagtccaacttcagcttatcaggtgcccagatagatgacaacaatcccaggcgcaccggccaccgcatcgtggcgccccctggtggccgctccaacatcaccagcctcggttgaacgtggatgcgcggaggagctagcctgaaggattctgggaatcatgtccatcccttttcctgtcagtgtttttgaaacccacagttttagttggtgctgatggagggagggggaagtcgaaggatgctctttcccttttctgtttaggaagaagtggtactagtgtggtgtgtttgcttggaaattccttgccccacagttgtgttcatgctgaatccacctcggagcatggtgttttcattcccccttcctagtgaaccacaggttttagcattgtcttgttctgtcccttccacttctaactccactggctccatgattctctgagtggtggttcctttgcaccctgtagatgttctaggatagttgatgcatgttactaaattacgtatgcaagtctgtgagtgcgtctgaggggacatcgccaaggactgactgagacacgatgccgagacctcaagccctgaggggcagtcccaaaacccttacagtgaagatgtttactcattgcccccacctctggtccacactagaaagaagctcgccccacctccacctgtgagatccgtgaattctcggaatggcaggggaagccttgcactaggttgcagagaagcatcctccacatcctgtgtcagaaaccctggtctccgtggcacttgtaactcaccgtgctgtcttctggtctgtgtgtgttcttcaagccagctctaggcttcaggccgagccaggttcacactcagaaagaggtctccccatccccattcggggctgacgatggggggctgatggctgcccctgcgtggcctgagtcctggtccctctgaggcagttgacggggcagtcagatttttaaagttttgtacaaagttttcctttgtaatcactcccatttttacttaacaaccaacttgttgtggctcttatttctgaattcaaagcttgtgaaaaaataaagaaaatgaactgcccactgacctgactagggcactttca

SEQ ID NO: 121639 - DNA, 2911 bp, Homo sapiens
  Payload ID: 3849
  Gene Symbol: CRMP1
  Gene Name: collapsin response mediator protein 1
  Uniprot ID: Q14194
  ENST ID: ENST00000397890
  CDS Start-End: 216-1934
ccgatccgggcggtgctggcagccggagcggcggcgggcgggccgagcagccggggcagccgcgcgtgggcatccacgggcgccgagcctccgtccgtgtctctatccctcccgggcctttgtcagcgcgcccgctgggagcggggccgagagcgccggttccagtcagacagccccgcaggtcagcggccgggccgagggcgccagagggggccatgtcgtaccagggcaagaagagcatcccgcacatcacgagtgaccgactcctcatcaaaggtggacggatcatcaacgatgaccaatccctttatgctgacgtctacctggaggatggacttatcaaacaaataggagagaacttaatcgttcctggtggagtgaagaccattgaagccaacgggcggatggttattcccggaggtattgatgtcaacacgtacctgcagaagccctcccaggggatgactgcggctgatgacttcttccaagggaccagggcggcactggtgggcgggaccacgatgatcattgaccatgttgttcctgaacctgggtccagcctactgacctctttcgagaagtggcacgaagcagctgacaccaaatcctgctgtgattactccctccacgtggacatcacaagctggtacgatggcgttcgggaggagctggaggtgctggtgcaggacaaaggcgtcaattccttccaagtctacatggcctataaggatgtctaccaaatgtccgacagccagctctatgaagcctttaccttccttaagggcctgggagctgtgatcttggtccatgcagaaaatggagatttgatagctcaggaacaaaagcggatcctggagatgggcatcacgggtcccgagggccatgccctgagcagacctgaagagctggaggccgaggcggtgttccgggccatcaccattgcgggccggatcaactgccctgtgtacatcaccaaggtcatgagcaagagtgcagccgacatcatcgctctggccaggaagaaagggcccctagtttttggagagcccattgccgccagcctggggaccgatggcacccattactggagcaagaactgggccaaggctgcggcgttcgtgacttcccctcccctgagcccggaccctaccacgcccgactacttgacctccctactggcctgtggggacttgcaggtcacaggcagcggccactgtccctacagcactgcccagaaggcggtgggcaaggacaactttaccctgatccccgagggtgtcaacgggatagaggagcggatgacggtcgtctgggacaaggcggtggctactggcaaaatggatgagaaccagtttgtcgctgtcaccagcaccaatgcagccaagatctttaacctgtacccaaggaaagggcggattgccgtgggctcggatgccgacgtggtcatctgggaccccgacaagttgaagaccataacagccaaaagtcacaagtcggcggtggagtacaacatcttcgagggtatggagtgccacggctccccactagtggtcatcagccagggcaagatcgtctttgaagacggaaacatcaacgtcaacaagggcatgggccgcttcattccgcggaaggcgttcccggagcacctgtaccagcgcgtcaaaatcaggaataaggtttttggattgcaaggggtttccaggggcatgtatgacggtcctgtgtacgaggtaccagctacacccaaatatgcaactcccgctccttcagccaaatcttcgccttctaaacaccagcccccacccatcagaaacctccaccagtccaacttcagcttatcaggtgcccagatagatgacaacaatcccaggcgcaccggccaccgcatcgtggcgccccctggtggccgctccaacatcaccagcctcggttgaacgtggatgcgcggaggagctagcctgaaggattctgggaatcatgtccatcccttttcctgtcagtgtttttgaaacccacagttttagttggtgctgatggagggagggggaagtcgaaggatgctctttcccttttctgtttaggaagaagtggtactagtgtggtgtgtttgcttggaaattccttgccccacagttgtgttcatgctgaatccacctcggagcatggtgttttcattcccccttcctagtgaaccacaggttttagcattgtcttgttctgtcccttccacttctaactccactggctccatgattctctgagtggtggttcctttgcaccctgtagatgttctaggatagttgatgcatgttactaaattacgtatgcaagtctgtgagtgcgtctgaggggacatcgccaaggactgactgagacacgatgccgagacctcaagccctgaggggcagtcccaaaacccttacagtgaagatgtttactcattgcccccacctctggtccacactagaaagaagctcgccccacctccacctgtgagatccgtgaattctcggaatggcaggggaagccttgcactaggttgcagagaagcatcctccacatcctgtgtcagaaaccctggtctccgtggcacttgtaactcaccgtgctgtcttctggtctgtgtgtgttcttcaagccagctctaggcttcaggccgagccaggttcacactcagaaagaggtctccccatccccattcggggctgacgatggggggctgatggctgcccctgcgtggcctgagtcctggtccctctgaggcagttgacggggcagtcagatttttaaagttttgtacaaagttttcctttgtaatcactcccatttttacttaacaaccaacttgttgtggctcttatttctgaattcaaagcttgtgaaaaaataaagaaaatgaactgcccactga

SEQ ID NO: 121640 - DNA, 2764 bp, Homo sapiens
  Payload ID: 3849
  Gene Symbol: CRMP1
  Gene Name: collapsin response mediator protein 1
  ENST ID: ENST00000512574
  CDS Start-End: 535-2247
ctggtacggggaacctaggacttaacaactccaaggaagggagtgtaggagttggggagggacagtgtccccatctgcaatttccggtcattgacagggattttaggccccgctgagagccagggatgcatgaatgcgtggagggaaatgagttgtaaacagagtgtaggggaacctggcatctccatgctgctttgctgcagctaatatgttttgcacccggggtacatcattttacctctgtaagcctcaatttcctgtctgtaaaatgggaaaattatgcctagtgttcctgggatactgagctggcttctctgtgaagctaaaacctcacctctattttaaggcccaggtgtctctggcctcctgccctggattaggggactggcccctggggtggtgaaggtcagggccccagcccccaaccacagtgctgggggagctgtaccaagcctaggccaccctcgctctggatggcaacttgaaagcagaaaagatgagtagtttcataggacctgtggggttggatttcgcatgcagaaaatgaacaacgaagtggtggacaagagtgaccgactcctcatcaaaggtggacggatcatcaacgatgaccaatccctttatgctgacgtctacctggaggatggacttatcaaacaaataggagagaacttaatcgttcctggtggagtgaagaccattgaagccaacgggcggatggttattcccggaggtattgatgtcaacacgtacctgcagaagccctcccaggggatgactgcggctgatgacttcttccaagggaccagggcggcactggtgggcgggaccacgatgatcattgaccatgttgttcctgaacctgggtccagcctactgacctctttcgagaagtggcacgaagcagctgacaccaaatcctgctgtgattactccctccacgtggacatcacaagctggtacgatggcgttcgggaggagctggaggtgctggtgcaggacaaaggcgtcaattccttccaagtctacatggcctataaggatgtctaccaaatgtccgacagccagctctatgaagcctttaccttccttaagggcctgggagctgtgatcttggtccatgcagaaaatggagatttgatagctcaggaacaaaagcggatcctggagatgggcatcacgggtcccgagggccatgccctgagcagacctgaagagctggaggccgaggcggtgttccgggccatcaccattgcgggccggatcaactgccctgtgtacatcaccaaggtcatgagcaagagtgcagccgacatcatcgctctggccaggaagaaagggcccctagtttttggagagcccattgccgccagcctggggaccgatggcacccattactggagcaagaactgggccaaggctgcggcgttcgtgacttcccctcccctgagcccggaccctaccacgcccgactacttgacctccctactggcctgtggggacttgcaggtcacaggcagcggccactgtccctacagcactgcccagaaggcggtgggcaaggacaactttaccctgatccccgagggtgtcaacgggatagaggagcggatgacggtcgtctgggacaaggcggtggctactggcaaaatggatgagaaccagtttgtcgctgtcaccagcaccaatgcagccaagatctttaacctgtacccaaggaaagggcggattgccgtgggctcggatgccgacgtggtcatctgggaccccgacaagttgaagaccataacagccaaaagtcacaagtcggcggtggagtacaacatcttcgagggtatggagtgccacggctccccactagtggtcatcagccagggcaagatcgtctttgaagacggaaacatcaacgtcaacaagggcatgggccgcttcattccgcggaaggcgttcccggagcacctgtaccagcgcgtcaaaatcaggaataaggtttttggattgcaaggggtttccaggggcatgtatgacggtcctgtgtacgaggtaccagctacacccaaatatgcaactcccgctccttcagccaaatcttcgccttctaaacaccagcccccacccatcagaaacctccaccagtccaacttcagcttatcaggtgcccagatagatgacaacaatcccaggcgcaccggccaccgcatcgtggcgccccctggtggccgctccaacatcaccagcctcggttgaacgtggatgcgcggaggagctagcctgaaggattctgggaatcatgtccatcccttttcctgtcagtgtttttgaaacccacagttttagttggtgctgatggagggagggggaagtcgaaggatgctctttcccttttctgtttaggaagaagtggtactagtgtggtgtgtttgcttggaaattccttgccccacagttgtgttcatgctgaatccacctcggagcatggtgttttcattcccccttcctagtgaaccacaggttttagcattgtcttgttctgtcccttccacttctaactccactggctccatgattctctgagtggtggttcctttgcaccctgtagatgttctaggatagttgatgcatgttactaaattacgtatgcaagtctgtgagtgcgtctgaggggacatcgccaaggactgactgagacacgatgccgagacctcaagccctgaggggcagtcccaaaacccttacagtgaagatgtttactcattgcccccac

SEQ ID NO: 121641 - DNA, 1266 bp, Homo sapiens
  Payload ID: 3850
  Gene Symbol: COLEC10
  Gene Name: collectin sub-family member 10 (C-type lectin)
  Uniprot ID: Q9Y6Z7
  ENST ID: ENST00000332843
  CDS Start-End: 42-875
tttggcatttctgggagacccttttctgaggaaccacagcaatgaatggctttgcatccttgcttcgaagaaaccaatttatcctcctggtactatttcttttgcaaattcagagtctgggtctggatattgatagccgtcctaccgctgaagtctgtgccacacacacaatttcaccaggacccaaaggagatgatggtgaaaaaggagatccaggagaagagggaaagcatggcaaagtgggacgcatggggccgaaaggaattaaaggagaactgggtgatatgggagatcagggcaatattggcaagactgggcccattgggaagaagggtgacaaaggggaaaaaggtttgcttggaatacctggagaaaaaggcaaagcaggtactgtctgtgattgtggaagataccggaaatttgttggacaactggatattagtattgctcggctcaagacatctatgaagtttgtcaagaatgtgatagcagggattagggaaactgaagagaaattctactacatcgtgcaggaagagaagaactacagggaatccctaacccactgcaggattcggggtggaatgctagccatgcccaaggatgaagctgccaacacactcatcgctgactatgttgccaagagtggcttctttcgggtgttcattggcgtgaatgaccttgaaagggagggacagtacatgttcacagacaacactccactgcagaactatagcaactggaatgagggggaacccagcgacccctatggtcatgaggactgtgtggagatgctgagctctggcagatggaatgacacagagtgccatcttaccatgtactttgtctgtgagttcatcaagaagaaaaagtaacttccctcatcctacgtatttgctattttcctgtgaccgtcattacagttattgttatccatcctttttttcctgattgtactacatttgatctgagtcaacatagctagaaaatgctaaactgaggtatggagcctccatcatcatgctcttttgtgatgattttcatattttcacacatggtatattattgacccaataactcgccaggttacatgggtcttgagagagaattttaattactaattgtgcacgagatagttggttgtctatatgtcaaatgagttgttctcttggtatttgctctaccatctctccctagagcactctgtgtctatcccagtggataatttcccagtttactggtgatgattaggaaggttgttgatgg

SEQ ID NO: 121642 - DNA, 1381 bp, Homo sapiens
  Payload ID: 3851
  Gene Symbol: COLEC11
  Gene Name: collectin sub-family member 11
  Uniprot ID: Q9BWP8
  ENST ID: ENST00000236693
  CDS Start-End: 235-1041
cttctccctgcgcctgggactgcggccgcctctctaaatagcagccatgaggcgcctgggggcagtgtcctcgcgggccagcgacgggcaggacgccccgttcgcctagcgcgtgctcaggagttggtgtcctgcctgcgctcaggatgagggggaatctggccctggtgggcgttctaatcagcctggccttcctgtcactgctgccatctggacatcctcagccggctggcgatgacgcctgctctgtgcagatcctcgtccctggcctcaaaggggatgcgggagagaagggagacaaaggcgcccccggacggcctggaagagtcggccccacgggagaaaaagcagtcacagccagtcgtgacagcttctgacatctccaaaaggaagtgcacctcgtcctttgtagaaatgggatcacagggagacatgggggacaaaggacagaaaggcagtgtgggtcgtcatggaaaaattggtcccattggctctaaaggtgagaaaggagattccggtgacataggaccccctggtcctaatggagaaccaggcctcccatgtgagtgcagccagctgcgcaaggccatcggggagatggacaaccaggtctctcagctgaccagcgagctcaagttcatcaagaatgctgtcgccggtgtgcgcgagacggagagcaagatctacctgctggtgaaggaggagaagcgctacgcggacgcccagctgtcctgccagggccgcgggggcacgctgagcatgcccaaggacgaggctgccaatggcctgatggccgcatacctggcgcaagccggcctggcccgtgtcttcatcggcatcaacgacctggagaaggagggcgccttcgtgtactctgaccactcccccatgcggaccttcaacaagtggcgcagcggtgagcccaacaatgcctacgacgaggaggactgcgtggagatggtggcctcgggcggctggaacgacgtggcctgccacaccaccatgtacttcatgtgtgagtttgacaaggagaacatgtgagcctcaggctggggctgcccattgggggccccacatgtccctgcagggttggcagggacagagcccagaccatggtgccagccagggagctgtccctctgtgaagggtggaggctcactgagtagagggctgttgtctaaactgagaaaatggcctatgcttaagaggaaaatgaaagtgttcctggggtgctgtctctgaagaagcagagtttcattacctgtattgtagccccaatgtcattatgtaattattacccagaattgctcttccataaagcttgtgcctttgtccaagctatacaataaaatctttaagtagtgcagtagttaagtccaaa

SEQ ID NO: 121643 - DNA, 1259 bp, Homo sapiens
  Payload ID: 3851
  Gene Symbol: COLEC11
  Gene Name: collectin sub-family member 11
  Uniprot ID: Q9BWP8
  ENST ID: ENST00000349077
  CDS Start-End: 104-919
gccatgaggcgcctgggggcagtgtcctcgcgggccagcgacgggcaggacgccccgttcgcctagcgcgtgctcaggagttggtgtcctgcctgcgctcaggatgagggggaatctggccctggtgggcgttctaatcagcctggccttcctgtcactgctgccatctggacatcctcagccggctggcgatgacgcctgctctgtgcagatcctcgtccctggcctcaaaggggatgcgggagagaagggagacaaaggcgcccccggacggcctggaagagtcggccccacgggagaaaaaggagacatgggggacaaaggacagaaaggcagtgtgggtcgtcatggaaaaattggtcccattggctctaaaggtgagaaaggagattccggtgacataggaccccctggtcctaatggagaaccaggcctcccatgtgagtgcagccagctgcgcaaggccatcggggagatggacaaccaggtctctcagctgaccagcgagctcaagttcatcaagaatgctgtcgccggtgtgcgcgagacggagagcaagatctacctgctggtgaaggaggagaagcgctacgcggacgcccagctgtcctgccagggccgcgggggcacgctgagcatgcccaaggacgaggctgccaatggcctgatggccgcatacctggcgcaagccggcctggcccgtgtcttcatcggcatcaacgacctggagaaggagggcgccttcgtgtactctgaccactcccccatgcggaccttcaacaagtggcgcagcggtgagcccaacaatgcctacgacgaggaggactgcgtggagatggtggcctcgggcggctggaacgacgtggcctgccacaccaccatgtacttcatgtgtgagtttgacaaggagaacatgtgagcctcaggctggggctgcccattgggggccccacatgtccctgcagggttggcagggacagagcccagaccatggtgccagccagggagctgtccctctgtgaagggtggaggctcactgagtagagggctgttgtctaaactgagaaaatggcctatgcttaagaggaaaatgaaagtgttcctggggtgctgtctctgaagaagcagagtttcattacctgtattgtagccccaatgtcattatgtaattattacccagaattgctcttccataaagcttgtgcctttgtccaagctatacaataaaatctttaagtagtgcagtagttaagtccaaa

SEQ ID NO: 121644 - DNA, 1633 bp, Homo sapiens
  Payload ID: 3851
  Gene Symbol: COLEC11
  Gene Name: collectin sub-family member 11
  Uniprot ID: Q9BWP8
  ENST ID: ENST00000382062
  CDS Start-End: 364-1107
aaaaaagaaacaaaattgggatgttcgggttggagagttagcaggggcatctccaggagggtcctgccccccaccccaaagccggcctcagggagttccaggcgttcccacactccccaggcaggacggtggacgcagcgcagacaggaagctccccgagataacgctgcggccgggcggcctgatttgctgggctgtctgatggcccgggccgaggcttctccctgcgcctgggactgcggccgcctctctaaatagcagccatgaggcgcctgggggcagtgtcctcgcgggccagcgacgggcaggacgccccgttcgcctagcgcgtgctcaggagttggtgtcctgcctgcgctcaggatgagggggaatctggccctggtgggcgttctaatcagcctggccttcctgtcactgctgccatctggacatcctcagccggctggcgatgacgcctgctctgtgcagatcctcgtccctggcctcaaaggggatgcgggagagaagggagacaaaggcgcccccggacggcctggaagagtcggccccacgggagaaaaaggtgagaaaggagattccggtgacataggaccccctggtcctaatggagaaccaggcctcccatgtgagtgcagccagctgcgcaaggccatcggggagatggacaaccaggtctctcagctgaccagcgagctcaagttcatcaagaatgctgtcgccggtgtgcgcgagacggagagcaagatctacctgctggtgaaggaggagaagcgctacgcggacgcccagctgtcctgccagggccgcgggggcacgctgagcatgcccaaggacgaggctgccaatggcctgatggccgcatacctggcgcaagccggcctggcccgtgtcttcatcggcatcaacgacctggagaaggagggcgccttcgtgtactctgaccactcccccatgcggaccttcaacaagtggcgcagcggtgagcccaacaatgcctacgacgaggaggactgcgtggagatggtggcctcgggcggctggaacgacgtggcctgccacaccaccatgtacttcatgtgtgagtttgacaaggagaacatgtgagcctcaggctggggctgcccattgggggccccacatgtccctgcagggttggcagggacagagcccagaccatggtgccagccagggagctgtccctctgtgaagggtggaggctcactgagtagagggctgttgtctaaactgagaaaatggcctatgcttaagaggaaaatgaaagtgttcctggggtgctgtctctgaagaagcagagtttcattacctgtattgtagccccaatgtcattatgtaattattacccagaattgctcttccataaagcttgtgcctttgtccaagctatacaataaaatctttaagtagtgcagtagttaagtccaaatagtggcaatggggtcttgaattactaccttttaatttctatatggaaaagaactcactttgaccaacacttctgtaaattacattacaatataggttccttcacactattatccatgtaaaaacaattttgctttgcttcaaacccagatttcaggaaaacaacaacaaaattctccaaacttta

SEQ ID NO: 121645 - DNA, 1134 bp, Homo sapiens
  Payload ID: 3851
  Gene Symbol: COLEC11
  Gene Name: collectin sub-family member 11
  Uniprot ID: Q9BWP8
  ENST ID: ENST00000402794
  CDS Start-End: 141-806
cagaagttttggtgaaagtggctttggccctgactttgtggtagcgtgtgtgggtttgtgagtggaaccttcagctttaggttggaaacggtggctgtggagagctggacttttggctgtggaggtcacgtccctgcccaatgtggtgggtgcctccgagtccctacggttgtcttccctgcgccctgccaggagacatgggggacaaaggacagaaaggcagtgtgggtcgtcatggaaaaattggtcccattggctctaaaggtgagaaaggagattccggtgacataggaccccctggtcctaatggagaaccaggcctcccatgtgagtgcagccagctgcgcaaggccatcggggagatggacaaccaggtctctcagctgaccagcgagctcaagttcatcaagaatgctgtcgccggtgtgcgcgagacggagagcaagatctacctgctggtgaaggaggagaagcgctacgcggacgcccagctgtcctgccagggccgcgggggcacgctgagcatgcccaaggacgaggctgccaatggcctgatggccgcatacctggcgcaagccggcctggcccgtgtcttcatcggcatcaacgacctggagaaggagggcgccttcgtgtactctgaccactcccccatgcggaccttcaacaagtggcgcagcggtgagcccaacaatgcctacgacgaggaggactgcgtggagatggtggcctcgggcggctggaacgacgtggcctgccacaccaccatgtacttcatgtgtgagtttgacaaggagaacatgtgagcctcaggctggggctgcccattgggggccccacatgtccctgcagggttggcagggacagagcccagaccatggtgccagccagggagctgtccctctgtgaagggtggaggctcactgagtagagggctgttgtctaaactgagaaaatggcctatgcttaagaggaaaatgaaagtgttcctggggtgctgtctctgaagaagcagagtttcattacctgtattgtagccccaatgtcattatgtaattattacccagaattgctcttccataaagcttgtgcctttgtccaagctatacaataaaatctttaagtagtgcagta

SEQ ID NO: 121646 - DNA, 1557 bp, Homo sapiens
  Payload ID: 3851
  Gene Symbol: COLEC11
  Gene Name: collectin sub-family member 11
  Uniprot ID: Q9BWP8
  ENST ID: ENST00000403096
  CDS Start-End: 492-1229
tgcggctctttttattgaaacattagagaaaagtagattcaaacccatgatcaaaacagtcaccacgaaagacaaaccctgctcagcccgtgttgtacaaaatgaaaaggtcagccctctcccggggcacagggtccggacagctcggggccaccctgccaggctgtgcagctctggctgggggcttttttccggctgtgttagccctgctgttggaaaccaagtggactgtcctgcagcccagacaagcccagtggcctttgtgcttttaattgtgataaatgtacctgctttagaaaatgtttaattatgttggaagcaacttaaactgttggatgcctacggctctctcagaagttttggtgaaagtggctttggccctgactttgtggtagcgtgtgtgggtttgtgagtggaaccttcagctttaggttggaaacggtggctgtggagagctggacttttggctgtggaggtcacgtccctgcccaatgtggtgggtgcctccgagtccctacggttgtcttccctgcgccctgccaggggatgcgggagagaagggagacaaaggcgcccccggacggcctggaagagtcggccccacgggagaaaaaggagacatgggggacaaaggacagaaaggcagtgtgggtcgtcatggaaaaattggtcccattggctctaaaggtgagaaaggagattccggtgacataggaccccctggtcctaatggagaaccaggcctcccatgtgagtgcagccagctgcgcaaggccatcggggagatggacaaccaggtctctcagctgaccagcgagctcaagttcatcaagaatgctgtcgccggtgtgcgcgagacggagagcaagatctacctgctggtgaaggaggagaagcgctacgcggacgcccagctgtcctgccagggccgcgggggcacgctgagcatgcccaaggacgaggctgccaatggcctgatggccgcatacctggcgcaagccggcctggcccgtgtcttcatcggcatcaacgacctggagaaggagggcgccttcgtgtactctgaccactcccccatgcggaccttcaacaagtggcgcagcggtgagcccaacaatgcctacgacgaggaggactgcgtggagatggtggcctcgggcggctggaacgacgtggcctgccacaccaccatgtacttcatgtgtgagtttgacaaggagaacatgtgagcctcaggctggggctgcccattgggggccccacatgtccctgcagggttggcagggacagagcccagaccatggtgccagccagggagctgtccctctgtgaagggtggaggctcactgagtagagggctgttgtctaaactgagaaaatggcctatgcttaagaggaaaatgaaagtgttcctggggtgctgtctctgaagaagcagagtttcattacctgtattgtagccccaatgtcattatgtaattattacccagaattgctcttccataaagcttgtgcctttgtccaagctatacaataaaatctttaagtagtgcagta

SEQ ID NO: 121647 - DNA, 1134 bp, Homo sapiens
  Payload ID: 3851
  Gene Symbol: COLEC11
  Gene Name: collectin sub-family member 11
  Uniprot ID: Q9BWP8
  ENST ID: ENST00000402922
  CDS Start-End: 141-806
cagaagttttggtgaaagtggctttggccctgactttgtggtagcgtgtgtgggtttgtgagtggaaccttcagctttaggttggaaacggtggctgtggagagctggacttttggctgtggaggtcacgtccctgcccaatgtggtgggtgcctccgagtccctacggttgtcttccctgcgccctgccaggggatgcgggagagaagggagacaaaggcgcccccggacggcctggaagagtcggccccacgggagaaaaaggtgagaaaggagattccggtgacataggaccccctggtcctaatggagaaccaggcctcccatgtgagtgcagccagctgcgcaaggccatcggggagatggacaaccaggtctctcagctgaccagcgagctcaagttcatcaagaatgctgtcgccggtgtgcgcgagacggagagcaagatctacctgctggtgaaggaggagaagcgctacgcggacgcccagctgtcctgccagggccgcgggggcacgctgagcatgcccaaggacgaggctgccaatggcctgatggccgcatacctggcgcaagccggcctggcccgtgtcttcatcggcatcaacgacctggagaaggagggcgccttcgtgtactctgaccactcccccatgcggaccttcaacaagtggcgcagcggtgagcccaacaatgcctacgacgaggaggactgcgtggagatggtggcctcgggcggctggaacgacgtggcctgccacaccaccatgtacttcatgtgtgagtttgacaaggagaacatgtgagcctcaggctggggctgcccattgggggccccacatgtccctgcagggttggcagggacagagcccagaccatggtgccagccagggagctgtccctctgtgaagggtggaggctcactgagtagagggctgttgtctaaactgagaaaatggcctatgcttaagaggaaaatgaaagtgttcctggggtgctgtctctgaagaagcagagtttcattacctgtattgtagccccaatgtcattatgtaattattacccagaattgctcttccataaagcttgtgcctttgtccaagctatacaataaaatctttaagtagtgcagta

SEQ ID NO: 121648 - DNA, 1062 bp, Homo sapiens
  Payload ID: 3851
  Gene Symbol: COLEC11
  Gene Name: collectin sub-family member 11
  Uniprot ID: Q9BWP8
  ENST ID: ENST00000404205
  CDS Start-End: 141-734
cagaagttttggtgaaagtggctttggccctgactttgtggtagcgtgtgtgggtttgtgagtggaaccttcagctttaggttggaaacggtggctgtggagagctggacttttggctgtggaggtcacgtccctgcccaatgtggtgggtgcctccgagtccctacggttgtcttccctgcgccctgccaggtgagaaaggagattccggtgacataggaccccctggtcctaatggagaaccaggcctcccatgtgagtgcagccagctgcgcaaggccatcggggagatggacaaccaggtctctcagctgaccagcgagctcaagttcatcaagaatgctgtcgccggtgtgcgcgagacggagagcaagatctacctgctggtgaaggaggagaagcgctacgcggacgcccagctgtcctgccagggccgcgggggcacgctgagcatgcccaaggacgaggctgccaatggcctgatggccgcatacctggcgcaagccggcctggcccgtgtcttcatcggcatcaacgacctggagaaggagggcgccttcgtgtactctgaccactcccccatgcggaccttcaacaagtggcgcagcggtgagcccaacaatgcctacgacgaggaggactgcgtggagatggtggcctcgggcggctggaacgacgtggcctgccacaccaccatgtacttcatgtgtgagtttgacaaggagaacatgtgagcctcaggctggggctgcccattgggggccccacatgtccctgcagggttggcagggacagagcccagaccatggtgccagccagggagctgtccctctgtgaagggtggaggctcactgagtagagggctgttgtctaaactgagaaaatggcctatgcttaagaggaaaatgaaagtgttcctggggtgctgtctctgaagaagcagagtttcattacctgtattgtagccccaatgtcattatgtaattattacccagaattgctcttccataaagcttgtgcctttgtccaagctatacaataaaatctttaagtagtgcagta

SEQ ID NO: 121649 - DNA, 581 bp, Homo sapiens
  Payload ID: 3851
  Gene Symbol: COLEC11
  Gene Name: collectin sub-family member 11
  ENST ID: ENST00000438814
  CDS Start-End: 212-581
agatttgggagaaggatttcaaatgacttcccttcgagctgcagggctatcttgggcatcttgacctccacacatttctgggagaactcctcgtgcagcaggacatcaggtggcaaaggtgatctgcccacctcagcctcccaaagtgctggaattacaggtgtgagccactgcgcctggtcttgttttccaagttgtaacgcccttcacgatgaagaaacaaagaggagttggtgtcctgcctgcgctcaggatgagggggaatctggccctggtgggcgttctaatcagcctggccttcctgtcactgctgccatctggacatcctcagccggctggcgatgacgcctgctctgtgcagatcctcgtccctggcctcaaaggggatgcgggagagaagggagacaaaggcgcccccggacggcctggaagagtcggccccacgggagaaaaaggagacatgggggacaaaggacagaaaggcagtgtgggtcgtcatggaaaaattggtcccattggctctaaaggtgagaaaggagattccggtgacataggaccccctggtcctaatggagaaccag

SEQ ID NO: 121650 - DNA, 1378 bp, Homo sapiens
  Payload ID: 3851
  Gene Symbol: COLEC11
  Gene Name: collectin sub-family member 11
  ENST ID: ENST00000416132
  CDS Start-End: 42-392
ctagcgcgtgctcaggagttggtgtcctgcctgcgctcaggatgagggggaatctggccctggtgggcgttctaatcagcctggccttcctgtcactgctgccatctggacatcctcagccggctggcgatgacgcctgctctgtgcagatcctcgtccctggcctcaaaggggatgcgggagagaagggagacaaaggcgcccccggacggcctggaagagtcggccccacgggagaaaaaggagacatgggggacaaaggacagaaaggcagtgtgggtcgtcatggaaaaattggtcccattggctctaaaggtgagaaaggagattccggtgacataggaccccctggtcctaatggagaaccagctccttcggcaccgcagagatgaggaggaacggctgcttggaaggtgtgcttgccggtgtgacttggctgagtgtgagtgcgctgagatcagtgtcactgactggccgagcagcatccgctcagggcacctccaggcactcagccaacctgaggggcccggacaaagcctctgggagacagaaggacctggaggcctcccatgtgagtgcagccagctgcgcaaggccatcggggagatggacaaccaggtctctcagctgaccagcgagctcaagttcatcaagaatgctgtcgccggtgtgcgcgagacggagagcaagatctacctgctggtgaaggaggagaagcgctacgcggacgcccagctgtcctgccagggccgcgggggcacgctgagcatgcccaaggacgaggctgccaatggcctgatggccgcatacctggcgcaagccggcctggcccgtgtcttcatcggcatcaacgacctggagaaggagggcgccttcgtgtactctgaccactcccccatgcggaccttcaacaagtggcgcagcggtgagcccaacaatgcctacgacgaggaggactgcgtggagatggtggcctcgggcggctggaacgacgtggcctgccacaccaccatgtacttcatgtgtgagtttgacaaggagaacatgtgagcctcaggctggggctgcccattgggggccccacatgtccctgcagggttggcagggacagagcccagaccatggtgccagccagggagctgtccctctgtgaagggtggaggctcactgagtagagggctgttgtctaaactgagaaaatggcctatgcttaagaggaaaatgaaagtgttcctggggtgctgtctctgaagaagcagagtttcattacctgtattgtagccccaatgtcattatgtaattattacccagaattgctcttccataaagcttgtgcctttgtccaagctatacaataaaatctttaagtagtgcagta

SEQ ID NO: 121651 - DNA, 1595 bp, Homo sapiens
  Payload ID: 3851
  Gene Symbol: COLEC11
  Gene Name: collectin sub-family member 11
  Uniprot ID: Q9BWP8
  ENST ID: ENST00000418971
  CDS Start-End: 212-1069
agatttgggagaaggatttcaaatgacttcccttcgagctgcagggctatcttgggcatcttgacctccacacatttctgggagaactcctcgtgcagcaggacatcaggtggcaaaggtgatctgcccacctcagcctcccaaagtgctggaattacaggtgtgagccactgcgcctggtcttgttttccaagttgtaacgcccttcacgatgaagaaacaaagaggagttggtgtcctgcctgcgctcaggatgagggggaatctggccctggtgggcgttctaatcagcctggccttcctgtcactgctgccatctggacatcctcagccggctggcgatgacgcctgctctgtgcagatcctcgtccctggcctcaaaggggatgcgggagagaagggagacaaaggcgcccccggacggcctggaagagtcggccccacgggagaaaaaggagacatgggggacaaaggacagaaaggcagtgtgggtcgtcatggaaaaattggtcccattggctctaaaggtgagaaaggagattccggtgacataggaccccctggtcctaatggagaaccaggcctcccatgtgagtgcagccagctgcgcaaggccatcggggagatggacaaccaggtctctcagctgaccagcgagctcaagttcatcaagaatgctgtcgccggtgtgcgcgagacggagagcaagatctacctgctggtgaaggaggagaagcgctacgcggacgcccagctgtcctgccagggccgcgggggcacgctgagcatgcccaaggacgaggctgccaatggcctgatggccgcatacctggcgcaagccggcctggcccgtgtcttcatcggcatcaacgacctggagaaggagggcgccttcgtgtactctgaccactcccccatgcggaccttcaacaagtggcgcagcggtgagcccaacaatgcctacgacgaggaggactgcgtggagatggtggcctcgggcggctggaacgacgtggcctgccacaccaccatgtacttcatgtgtgagtttgacaaggagaacatgtgagcctcaggctggggctgcccattgggggccccacatgtccctgcagggttggcagggacagagcccagaccatggtgccagccagggagctgtccctctgtgaagggtggaggctcactgagtagagggctgttgtctaaactgagaaaatggcctatgcttaagaggaaaatgaaagtgttcctggggtgctgtctctgaagaagcagagtttcattacctgtattgtagccccaatgtcattatgtaattattacccagaattgctcttccataaagcttgtgcctttgtccaagctatacaataaaatctttaagtagtgcagtagttaagtccaaatagtggcaatggggtcttgaattactaccttttaatttctatatggaaaagaactcactttgaccaacacttctgtaaattacattacaatataggttccttcacactattatccatgtaaaaacaattttgctttgcttcaaacccagatttcaggaaaacaacaacaaaattctccaaacttta

SEQ ID NO: 121652 - DNA, 5742 bp, Homo sapiens
  Payload ID: 3852
  Gene Symbol: COLEC12
  Gene Name: collectin sub-family member 12
  Uniprot ID: Q5KU26
  ENST ID: ENST00000400256
  CDS Start-End: 209-2437
cgcgcgcggcagccccgaggcagcagagcgcggagccgggagcgcggggagcgcgggccggcggcggcgagggaggacgggggcgcagacggccggcgcgcggcgcggctaccatgggcgtgcggtgagcagccgctcgggacgacttcctcggctgcgcggcgctcgcgcggagctccccggccggcggtgcgtccccacggtcaccatgaaagacgacttcgcagaggaggaggaggtgcaatccttcggttacaagcggtttggtattcaggaaggaacacaatgtaccaaatgtaaaaataactgggcactgaagttttctatcatattattatacattttgtgtgccttgctaacaatcacagtagccattttgggatataaagttgtagagaaaatggacaatgtcacaggtggcatggaaacatctcgccaaacctatgatgacaagctcacagcagtggaaagtgacctgaaaaaattaggtgaccaaactgggaagaaagctatcagcaccaactcagaactctccaccttcagatcagacattctagatctccgtcagcaacttcgtgagattacagaaaaaaccagcaagaacaaggatacgctggagaagttacaggcgagcggggatgctctggtggacaggcagagtcaattgaaagaaactttggagaataactctttcctcatcaccactgtaaacaaaaccctccaggcgtataatggctatgtcacgaatctgcagcaagataccagcgtgctccagggcaatctgcagaaccaaatgtattctcataatgtggtcatcatgaacctcaacaacctgaacctgacccaggtgcagcagaggaacctcatcacgaatctgcagcggtctgtggatgacacaagccaggctatccagcgaatcaagaacgactttcaaaatctgcagcaggtttttcttcaagccaagaaggacacggattggctgaaggagaaagtgcagagcttgcagacgctggctgccaacaactctgcgttggccaaagccaacaacgacaccctggaggatatgaacagccagctcaactcattcacaggtcagatggagaacatcaccactatctctcaagccaacgagcagaacctgaaagacctgcaggacttacacaaagatgcagagaatagaacagccatcaagttcaaccaactggaggaacgcttccagctctttgagacggatattgtgaacatcattagcaatatcagttacacagcccaccacctgcggacgctgaccagcaatctaaatgaagtcaggaccacttgcacagatacccttaccaaacacacagatgatctgacctccttgaataataccctggccaacatccgtttggattctgtttctctcaggatgcaacaagatttgatgaggtcgaggttagacactgaagtagccaacttatcagtgattatggaagaaatgaagctagtagactccaagcatggtcagctcatcaagaattttacaatactacaaggtccaccgggccccaggggtccaagaggtgacagaggatcccagggaccccctggcccaactggcaacaagggacagaaaggagagaagggggagcctggaccacctggccctgcgggtgagagaggcccaattggaccagctggtccccccggagagcgtggcggcaaaggatctaaaggctcccagggccccaaaggctcccgtggttcccctgggaagcccggccctcagggctccagtggggacccaggccccccgggcccaccaggcaaagagggactccccggccctcagggccctcctggcttccagggacttcagggcaccgttggggagcctggggtgcctggacctcggggactgccaggcttgcctggggtaccaggcatgccaggccccaagggcccccccggccctcctggcccatcaggagcggtggtgcccctggccctgcagaatgagccaaccccagcaccggaggacaatggctgcccgcctcactggaagaacttcacagacaaatgctactatttttcagttgagaaagaaatttttgaggatgcaaagcttttctgtgaagacaagtcttcacatcttgttttcataaacactagagaggaacagcaatggataaaaaaacagatggtagggagagagagccactggatcggcctcacagactcagagcgtgaaaatgaatggaagtggctggatgggacatctccagactacaaaaattggaaagctggacagccggataactggggtcatggccatgggccaggagaagactgtgctgggttgatttatgctgggcagtggaacgatttccaatgtgaagacgtcaataacttcatttgcgaaaaagacagggagacagtactgtcatctgcattataacggactgtgatgggatcacatgagcaaattttcagctctcaaaggcaaaggacactcctttctaattgcatcaccttctcatcagattgaaaaaaaaaaagcactgaaaaccaattactgaaaaaaaattgacagctagtgttttttaccatccgtcattacccaaagacttgggaactaaaatgttccccagggtgatatgctgattttcattgtgcacatggactgaatcacatagattctcctccgtcagtaaccgtgcgattatacaaattatgtcttccaaagtatggaacactccaatcagaaaaaggttatcattggtcgttgagttatgggaagaacttaagcatatactgtgtaaacagtgccatacatttctaaaatcccaagtgtaggaaaaatatgcagacatacagatatataggccaactattagtaataatatgaaatatacttaaagagcttttaaaactttgtatttttgtacaaaatatttgtcttttacaatttttttcctttttttttttttgtcattttaccgacataatacatggagccaaagaaaacaataatggtactaataaaaactcctagggtttcctgtcagatttaattctacccagtggcaaagaattttttcaattgtggctttaaaaaaataattaaatatacatgtgtatatatatatatatatatatatttttttttttttttttttttaatgtttcatttcctcagaggaaccaatcacttggaatgtctagaaatatccttgcagattttgccagtgtcaatcaagcctgcacacatgcacagtgaagcgggctgtgcctgccttgagcccatcaccagccaacattcttgacgtgtgcctgaccagacacagaagaaatgggcaactcaagacgtgcttccacttcattttggtggagtcgggaggtgtgggggatggagaggcatctgttgggaagggcactgaatctggcctatctggaaggccctgtgtcatggctgagctatgactgtacttggcatcagatccctacagagccaacattaactgtcaggaacgtatggcgtcacatcagccaaaggcagagatgctagaaagatgggaaccggctacgtgttacctggaaagtttgttttcttaagtcatattccaaaaacataactccaaggcatacgcatgataaaatgcaagaataaacttttggccactttgtggaactcttaaaagaacctttccagccgggcgcagtggctcatgcctgtaatcccagcactttgggaggccgaggcaggcagatgacttgaggtcaggagttcgagaccagcctggccaacgtggcaaaaccccatctctactaaaaataagaaaattagccgggtgtagtggcacatgcctgtaatcccagctactcaggaggctgaggcaggagaatcgcttgagcccaggaggcagagattgcagtgagccaagatcgcaccactgcactccagcctcggtgacagagcaagactccatctcaaaaaaaaaaaaaaaaaaaaaacctttcctctgagcccatcttcctttcgctccttgactttccttgacttgctgttggaaagtctaatatgaaaagggctgaaactaggcattaaatataactgatgctcaaaggtaagatttccatccaacagattccttctccctcccaagggtcttcccaggcagtgctgctacttatcccaaataaaatggtaaaagaataaagacagccgggcgcggtggctcacgcctgtaatcccagcactttgggaggccgaggcggacggatcacaaggtcaggagatcgagaccatcctggctaacacggtgaaaccccgtctctactaaaaatacaaaaaaaaaattagccgggcgcggtggcgggcgcctgtagtcccagctactcgggaggctgaggcaggagaatggcgtgaacccaggaagcggagcttgcagtgagccgagatcgcgccactgcactccagcctgggcgacagagcgagactcatctcaaaaagaaaaaaaaaaaagaataaagacagagtttgactttcccacctgcgaacaagtggactgtactgctttgcccacagtctccattccccattcatgctgttttcacagcccagtaatggccaactgctcagcacctgtgtgccctgctgtcaggcaggtgggacccacagtcctctgggcctaaactgctgaagcctgcaccacaaggcgggcacggcattccaacacctcttcaggctcaacagcctttagaggctacactgagtcctctttttcatgctcttcctggttttcaagtgtcaattaaaatttgtcttcagaagaaacttgaaaataagtatctgatgccgtcatcaggatagactagtattagctttcgcagctgaagttattgctctcccagccctaataataacttaccaagtgcttattatttatcaggcactggtccaagtccttcaatcagattgtctcacctgatcctcccaacagccctaggaagcaggtcttactacactccccatttcacagggactggggcttggggaggtgatgcggtttcctgggtcactccattactgagtagtgagacaggattcagacgcaagctttgaaaatgttctaattttctttagaaggaagggcccttcttaatagcacactgaataaaatcaaatgaataatcacacattacaagatgcctcctatacgtctctatatttagctacttacataccaggtttcttttttgtttgtttttgtttttaagacagagtctcgctctgtcacccaggctggagtgcggtggcgcgatctcggctcactgcaatctctgcctcccaggttcaagcgactctcccgcctcagcctctgcagtagcttagggactacaggtgcgtgccaccatgccaggctaatttttgtgtttttagtagagacacggtttcgccattttggccaggctggtctcaaactcctgacctcaggtgatccacccgccttggcctcccaaagtgctgggattacaggtgtgagccaccgtgcccggcctacacaccagctttctattcacctacacacaactgatgctcttttggagtggagagttttagtaaaatatgatggggtcttcaggcacctgagttgctacttactactatgagaagatagaaaatgttttttcctctaaacagcttttgaaagaatgaatgcacaacaaggcaaaaaataaaaactttcttttccttttcta

SEQ ID NO: 121653 - DNA, 4210 bp, Homo sapiens
  Payload ID: 3853
  Gene Symbol: CSF1
  Gene Name: colony stimulating factor 1 (macrophage)
  Uniprot ID: P09603
  ENST ID: ENST00000329608
  CDS Start-End: 392-2056
gtgactaggaagacgcgcgagcggggctggccggccggcgggtgggggaggggaggcgggggaaggcggctgagtgggcctctggagtgtgtgtgtctgtgtcagtgtgtgtgtgtgtgtgtgtatgtgtgtgtctggcgcctggccagggtgatttcccataaaccacatgccccccagtcctctcttaaaaggctgtgccgagggctggccagtgaggctcggcccggggaaagtgaaagtttgcctgggtcctctcggcgccagagccgctctccgcatcccaggacagcggtgcggccctcggccggggcgcccactccgcagcagccagcgagcgagcgagcgagcgagggcggccgacgcgcccggccgggacccagctgcccgtatgaccgcgccgggcgccgccgggcgctgccctcccacgacatggctgggctccctgctgttgttggtctgtctcctggcgagcaggagtatcaccgaggaggtgtcggagtactgtagccacatgattgggagtggacacctgcagtctctgcagcggctgattgacagtcagatggagacctcgtgccaaattacatttgagtttgtagaccaggaacagttgaaagatccagtgtgctaccttaagaaggcatttctcctggtacaagacataatggaggacaccatgcgcttcagagataacacccccaatgccatcgccattgtgcagctgcaggaactctctttgaggctgaagagctgcttcaccaaggattatgaagagcatgacaaggcctgcgtccgaactttctatgagacacctctccagttgctggagaaggtcaagaatgtctttaatgaaacaaagaatctccttgacaaggactggaatattttcagcaagaactgcaacaacagctttgctgaatgctccagccaagatgtggtgaccaagcctgattgcaactgcctgtaccccaaagccatccctagcagtgacccggcctctgtctcccctcatcagcccctcgccccctccatggcccctgtggctggcttgacctgggaggactctgagggaactgagggcagctccctcttgcctggtgagcagcccctgcacacagtggatccaggcagtgccaagcagcggccacccaggagcacctgccagagctttgagccgccagagaccccagttgtcaaggacagcaccatcggtggctcaccacagcctcgcccctctgtcggggccttcaaccccgggatggaggatattcttgactctgcaatgggcactaattgggtcccagaagaagcctctggagaggccagtgagattcccgtaccccaagggacagagctttccccctccaggccaggagggggcagcatgcagacagagcccgccagacccagcaacttcctctcagcatcttctccactccctgcatcagcaaagggccaacagccggcagatgtaactggtaccgccttgcccagggtgggccccgtgaggcccactggccaggactggaatcacaccccccagaagacagaccatccatctgccctgctcagagaccccccggagccaggctctcccaggatctcatcactgcgcccccagggcctcagcaacccctccaccctctctgctcagccacagctttccagaagccactcctcgggcagcgtgctgccccttggggagctggagggcaggaggagcaccagggatcggaggagccccgcagagccagaaggaggaccagcaagtgaaggggcagccaggcccctgccccgttttaactccgttcctttgactgacacaggccatgagaggcagtccgagggatccttcagcccgcagctccaggagtctgtcttccacctgctggtgcccagtgtcatcctggtcttgctggccgtcggaggcctcttgttctacaggtggaggcggcggagccatcaagagcctcagagagcggattctcccttggagcaaccagagggcagccccctgactcaggatgacagacaggtggaactgccagtgtagagggaattctaagctggacgcacagaacagtctctccgtgggaggagacattatggggcgtccaccaccacccctccctggccatcctcctggaatgtggtctgccctccaccagagctcctgcctgccaggactggaccagagcagccaggctggggcccctctgtctcaacccgcagacccttgactgaatgagagaggccagaggatgctccccatgctgccactatttattgtgagccctggaggctcccatgtgcttgaggaaggctggtgagcccggctcaggaccctcttccctcaggggctgcaccctcctctcactcccttccatgccggaacccaggccagggacccaccggcctgtggtttgtgggaaagcagggtggacgctgaggagtgaaagaaccctgcacccagagggcctgcctggtgccaaggtatcccagcctggacaggcatggacctgtctccagagagaggagcctgaagttcgtggggcgggacagcgtcggcctgatttcccgtaaaggtgtgcagcctgagagacgggaagaggaggcctctggacctgctggtctgcactgacagcctgaagggtctacaccctcggctcacctaagtgccctgtgctggttgccaggcgcagaggggaggccagccctgccctcaggacctgcctgacctgccagtgatgccaagagggggatcaagcactggcctctgcccctcctccttccagcacctgccagagcttctccaggaggccaagcagaggctcccctcatgaaggaagccattgcactgtgaacactgtacctgcctgctgaacagcctgcccccgtccatccatgagccagcatccgtccgtcctccactctccagcctctccccagcctcctgcactgagctggcctcaccagtcgactgagggagcccctcagccctgaccttctcctgacctggcctttgactccccggagtggagtggggtgggagaacctcctgggccgccagccagagccggtctttaggctgtgttgttcgcccaggtttctgcatcttgcactttgacattcccaagagggaagggactagtgggagagagcaagggaggggagggcacagacagagaggctacagggcgagctctgactgaagatgggcctttgaaatataggtatgcacctgaggttgggggagggtctgcactcccaaaccccagcgcagtgtcctttccctgctgccgacaggaacctggggctgaacaggttatccctgtcaggagccctggactgggctgcatctcagccccacctgcatggtatccagctcccatccacttctcacccttctttcctcctgaccttggtcagcagtgatgacctccaactctcacccaccccctctaccatcacctctaaccaggcaagccagggtgggagagcaatcaggagagccaggcctcagcttccaatgcctggagggcctccactttgtggccagcctgtggtggtggctctgaggcctaggcaacgagcgacagggctgccagttgcccctgggttcctttgtgctgctgtgtgcctcctctcctgccgccctttgtcctccgctaagagaccctgccctacctggccgctgggccccgtgactttcccttcctgcccaggaaagtgagggtcggctggccccaccttccctgtcctgatgccgacagcttagggaagggcagtgaacttgcatatggggcttagccttctagtcacagcctctatatttgatgctagaaaacacatatttttaaatggaagaaaaataaaaaggcattcccccttcatccccctaccttaaacatataatattttaaaggtcaaaaaagcaatccaacccactgcagaagctctttttgagcacttggtggcatcagagcaggaggagccccagagccacctctggtgtccccccaggctacctgctcaggaaccccttctgttctctgagaagtcaagagaggacattggctcacgcactgtgagattttgtttttatacttggaagtggtgaattattttatataaagtcatttaaatatctatttaaaagataggaagctgcttatatatttaataataaaagaagtgcacaagctgc

SEQ ID NO: 121654 - DNA, 597 bp, Homo sapiens
  Payload ID: 3853
  Gene Symbol: CSF1
  Gene Name: colony stimulating factor 1 (macrophage)
  ENST ID: ENST00000357302
  CDS Start-End: 240-597
cttggaagtgcagcgcagaagacagaggtcctctcttaaaaggctgtgccgagggctggccagtgaggctcggcccggggaaagtgaaagtttgcctgggtcctctcggcgccagagccgctctccgcatcccaggacagcggtgcggccctcggccggggcgcccactccgcagcagccagcgagcgagcgagcgagcgagggcggccgacgcgcccggccgggacccagctgcccgtatgaccgcgccgggcgccgccgggcgctgccctcccacgacatggctgggctccctgctgttgttggtctgtctcctggcgagcaggagtatcaccgaggaggtgtcggagtactgtagccacatgattgggagtggacacctgcagtctctgcagcggctgattgacagtcagatggagacctcgtgccaaattacatttgagtttgtagaccaggaacagttgaaagatccagtgtgctaccttaagaaggcatttctcctggtacaagacataatggaggacaccatgcgcttcagagataacacccccaatgccatcgccattgtgcagctgcaggaactctctttgaggctga

SEQ ID NO: 121655 - DNA, 1364 bp, Homo sapiens
  Payload ID: 3853
  Gene Symbol: CSF1
  Gene Name: colony stimulating factor 1 (macrophage)
  Uniprot ID: P09603
  ENST ID: ENST00000369801
  CDS Start-End: 39-1355
gggcggccgacgcgcccggccgggacccagctgcccgtatgaccgcgccgggcgccgccgggcgctgccctcccacgacatggctgggctccctgctgttgttggtctgtctcctggcgagcaggagtatcaccgaggaggtgtcggagtactgtagccacatgattgggagtggacacctgcagtctctgcagcggctgattgacagtcagatggagacctcgtgccaaattacatttgagtttgtagaccaggaacagttgaaagatccagtgtgctaccttaagaaggcatttctcctggtacaagacataatggaggacaccatgcgcttcagagataacacccccaatgccatcgccattgtgcagctgcaggaactctctttgaggctgaagagctgcttcaccaaggattatgaagagcatgacaaggcctgcgtccgaactttctatgagacacctctccagttgctggagaaggtcaagaatgtctttaatgaaacaaagaatctccttgacaaggactggaatattttcagcaagaactgcaacaacagctttgctgaatgctccagccaagatgtggtgaccaagcctgattgcaactgcctgtaccccaaagccatccctagcagtgacccggcctctgtctcccctcatcagcccctcgccccctccatggcccctgtggctggcttgacctgggaggactctgagggaactgagggcagctccctcttgcctggtgagcagcccctgcacacagtggatccaggcagtgccaagcagcggccacccaggagcacctgccagagctttgagccgccagagaccccagttgtcaaggacagcaccatcggtggctcaccacagcctcgcccctctgtcggggccttcaaccccgggatggaggatattcttgactctgcaatgggcactaattgggtcccagaagaagcctctggagaggccagtgagattcccgtaccccaagggacagagctttccccctccaggccaggagggggcagcatgcagacagagcccgccagacccagcaacttcctctcagcatcttctccactccctgcatcagcaaagggccaacagccggcagatgtaactggccatgagaggcagtccgagggatccttcagcccgcagctccaggagtctgtcttccacctgctggtgcccagtgtcatcctggtcttgctggccgtcggaggcctcttgttctacaggtggaggcggcggagccatcaagagcctcagagagcggattctcccttggagcaaccagagggcagccccctgactcaggatgacagacaggtggaactgccagtgtagagggaattc

SEQ ID NO: 121656 - DNA, 2484 bp, Homo sapiens
  Payload ID: 3853
  Gene Symbol: CSF1
  Gene Name: colony stimulating factor 1 (macrophage)
  Uniprot ID: P09603
  ENST ID: ENST00000369802
  CDS Start-End: 126-1790
gagccgctctccgcatcccaggacagcggtgcggccctcggccggggcgcccactccgcagcagccagcgagcgagcgagcgagcgagggcggccgacgcgcccggccgggacccagctgcccgtatgaccgcgccgggcgccgccgggcgctgccctcccacgacatggctgggctccctgctgttgttggtctgtctcctggcgagcaggagtatcaccgaggaggtgtcggagtactgtagccacatgattgggagtggacacctgcagtctctgcagcggctgattgacagtcagatggagacctcgtgccaaattacatttgagtttgtagaccaggaacagttgaaagatccagtgtgctaccttaagaaggcatttctcctggtacaagacataatggaggacaccatgcgcttcagagataacacccccaatgccatcgccattgtgcagctgcaggaactctctttgaggctgaagagctgcttcaccaaggattatgaagagcatgacaaggcctgcgtccgaactttctatgagacacctctccagttgctggagaaggtcaagaatgtctttaatgaaacaaagaatctccttgacaaggactggaatattttcagcaagaactgcaacaacagctttgctgaatgctccagccaagatgtggtgaccaagcctgattgcaactgcctgtaccccaaagccatccctagcagtgacccggcctctgtctcccctcatcagcccctcgccccctccatggcccctgtggctggcttgacctgggaggactctgagggaactgagggcagctccctcttgcctggtgagcagcccctgcacacagtggatccaggcagtgccaagcagcggccacccaggagcacctgccagagctttgagccgccagagaccccagttgtcaaggacagcaccatcggtggctcaccacagcctcgcccctctgtcggggccttcaaccccgggatggaggatattcttgactctgcaatgggcactaattgggtcccagaagaagcctctggagaggccagtgagattcccgtaccccaagggacagagctttccccctccaggccaggagggggcagcatgcagacagagcccgccagacccagcaacttcctctcagcatcttctccactccctgcatcagcaaagggccaacagccggcagatgtaactggtaccgccttgcccagggtgggccccgtgaggcccactggccaggactggaatcacaccccccagaagacagaccatccatctgccctgctcagagaccccccggagccaggctctcccaggatctcatcactgcgcccccagggcctcagcaacccctccaccctctctgctcagccacagctttccagaagccactcctcgggcagcgtgctgccccttggggagctggagggcaggaggagcaccagggatcggaggagccccgcagagccagaaggaggaccagcaagtgaaggggcagccaggcccctgccccgttttaactccgttcctttgactgacacaggccatgagaggcagtccgagggatccttcagcccgcagctccaggagtctgtcttccacctgctggtgcccagtgtcatcctggtcttgctggccgtcggaggcctcttgttctacaggtggaggcggcggagccatcaagagcctcagagagcggattctcccttggagcaaccagagggcagccccctgactcaggatgacagacaggtggaactgccagtgtagagggaattctaagacccctcaccatcctggacacactcgtttgtcaatgtccctctgaaaatgtgacgcccagccccggacacagtactccagatgttgtctgaccagctcagagagagtacagtgggactgttaccttccttgatatggacagtattcttctatttgtgcagattaagattgcattagtttttttcttaacaactgcatcatactgttgtcatatgttgagcctgtggtctattaaaacccctagttccatttcccataaacttctgtcaagccagaccatctctaccctgtacttggacaacttaacttttttaaccaaagtgcagtttatgttcacctttgttaaagccaccttgttggtttctgcccatcacctgaacctactgaagttgtgtgaaatcctaattctgtcatctccgtagccctcccagttgtgcctcctgcacattgatgagtgcctgctgttgtctttgcccatgttgttgatgtagctgtgaccctattgttcctcacccctgccccccgccaaccccagctggcccacctcttccccctcccacccaagcccacagccagcccatcaggaagccttcctggcttctccacaaccttctgactgctcttttcagtcatgctcctcctgctcttttgtatttggctaatagtatatcaatttgcactt

SEQ ID NO: 121657 - DNA, 1083 bp, Homo sapiens
  Payload ID: 3853
  Gene Symbol: CSF1
  Gene Name: colony stimulating factor 1 (macrophage)
  Uniprot ID: P09603
  ENST ID: ENST00000420111
  CDS Start-End: 117-887
tccgcatcccaggacagcggtgcggccctcggccggggcgcccactccgcagcagccagcgagcgagcgagcgagcgagggcggccgacgcgcccggccgggacccagctgcccgtatgaccgcgccgggcgccgccgggcgctgccctcccacgacatggctgggctccctgctgttgttggtctgtctcctggcgagcaggagtatcaccgaggaggtgtcggagtactgtagccacatgattgggagtggacacctgcagtctctgcagcggctgattgacagtcagatggagacctcgtgccaaattacatttgagtttgtagaccaggaacagttgaaagatccagtgtgctaccttaagaaggcatttctcctggtacaagacataatggaggacaccatgcgcttcagagataacacccccaatgccatcgccattgtgcagctgcaggaactctctttgaggctgaagagctgcttcaccaaggattatgaagagcatgacaaggcctgcgtccgaactttctatgagacacctctccagttgctggagaaggtcaagaatgtctttaatgaaacaaagaatctccttgacaaggactggaatattttcagcaagaactgcaacaacagctttgctgaatgctccagccaaggccatgagaggcagtccgagggatccttcagcccgcagctccaggagtctgtcttccacctgctggtgcccagtgtcatcctggtcttgctggccgtcggaggcctcttgttctacaggtggaggcggcggagccatcaagagcctcagagagcggattctcccttggagcaaccagagggcagccccctgactcaggatgacagacaggtggaactgccagtgtagagggaattctaagctggacgcacagaacagtctctccgtgggaggagacattatggggcgtccaccaccacccctccctggccatcctcctggaatgtggtctgccctccaccagagctcctgcctgccaggactggaccagagcagccaggctggggcccctctgtctcaacccgcagacccttgactgaatgag

SEQ ID NO: 121658 - DNA, 551 bp, Homo sapiens
  Payload ID: 3853
  Gene Symbol: CSF1
  Gene Name: colony stimulating factor 1 (macrophage)
  ENST ID: ENST00000525659
  CDS Start-End: 212-551
gaatcagcctggagagcgcggaaggaaagggtcggtccgcagagggcgcggggaaggcagggtggggacgcggtggagcccgcgctcgtttgctgaaggcttggaagtgcagcgcagaagacagaggacatggctgggctccctgctgttgttggtctgtctcctggcgagcaggagtatcaccgaggaggtgtcggagtactgtagccacatgattgggagtggacacctgcagtctctgcagcggctgattgacagtcagatggagacctcgtgccaaattacatttgagtttgtagaccaggaacagttgaaagatccagtgtgctaccttaagaaggcatttctcctggtacaagacataatggaggacaccatgcgcttcagagataacacccccaatgccatcgccattgtgcagctgcaggaactctctttgaggctgaagagctgcttcaccaaggattatgaagagcatgacaaggcctgcgtccgaactttctatgagacacctctccagttgctggagaaggtcaagaatgtctttaatg

SEQ ID NO: 121659 - DNA, 1009 bp, Homo sapiens
  Payload ID: 3853
  Gene Symbol: CSF1
  Gene Name: colony stimulating factor 1 (macrophage)
  ENST ID: ENST00000488198
  CDS Start-End: 155-1009
gaaagtttgcctgggtcctctcggcgccagagccgctctccgcatcccaggacagcggtgcggccctcggccggggcgcccactccgcagcagccagcgagcgagcgagcgagcgagggcggccgacgcgcccggccgggacccagctgcccgtatgaccgcgccgggcgccgccgggcgctgccctcccacgattgacagtcagatggagacctcgtgccaaattacatttgagtttgtagaccaggaacagttgaaagatccagtgtgctaccttaagaaggcatttctcctggtacaagacataatggaggacaccatgcgcttcagagataacacccccaatgccatcgccattgtgcagctgcaggaactctctttgaggctgaagagctgcttcaccaaggattatgaagagcatgacaaggcctgcgtccgaactttctatgagacacctctccagttgctggagaaggtcaagaatgtctttaatgaaacaaagaatctccttgacaaggactggaatattttcagcaagaactgcaacaacagctttgctgaatgctccagccaagatgtggtgaccaagcctgattgcaactgcctgtaccccaaagccatccctagcagtgacccggcctctgtctcccctcatcagcccctcgccccctccatggcccctgtggctggcttgacctgggaggactctgagggaactgagggcagctccctcttgcctggtgagcagcccctgcacacagtggatccaggcagtgccaagcagcggccacccaggagcacctgccagagctttgagccgccagagaccccagttgtcaaggacagcaccatcggtggctcaccacagcctcgcccctctgtcggggccttcaaccccgggatggaggatattcttgactctgcaatgggcactaattgggtcccagaagaagcctctggagaggccagtgagattcccgtaccccaagggacagagctttccccctcc

SEQ ID NO: 121660 - DNA, 577 bp, Homo sapiens
  Payload ID: 3853
  Gene Symbol: CSF1
  Gene Name: colony stimulating factor 1 (macrophage)
  ENST ID: ENST00000527192
  CDS Start-End: 127-577
gaatgggacttgaagctggccgggctgcttgggggctgcagaggaagaagggggctgccggcaaacctgctgactcaggctccacgagggagcaagtaacactggactcctttcggcactccgagaatggggtgggggcgtcttcaaaggatttccctcccttcccagtgcttgtccctgctctcgacatggctgggctccctgctgttgttggtctgtctcctggcgagcaggagtatcaccgaggaggtgtcggagtactgtagccacatgattgggagtggacacctgcagtctctgcagcggctgattgacagtcagatggagacctcgtgccaaattacatttgagtttgtagaccaggaacagttgaaagatccagtgtgctaccttaagaaggcatttctcctggtacaagacataatggaggacaccatgcgcttcagagataacacccccaatgccatcgccattgtgcagctgcaggaactctctttgaggctgaagagctgcttcaccaaggattatgaagagcatgacaaggcctgcgtccgaactttctatgagacacctctcc

SEQ ID NO: 121661 - DNA, 3989 bp, Homo sapiens
  Payload ID: 3854
  Gene Symbol: CSF1R
  Gene Name: colony stimulating factor 1 receptor
  Uniprot ID: P07333
  ENST ID: ENST00000286301
  CDS Start-End: 293-3211
gaagggcagacagagtgtccaaaagcgtgagagcacgaagtgaggagaaggtggagaagagagaagaggaagaggaagaggaagagaggaagcggagggaactgcggccaggctaaaaggggaagaagaggatcagcccaaggaggaggaagaggaaaacaagacaaacagccagtgcagaggagaggaacgtgtgtccagtgtcccgatccctgcggagctagtagctgagagctctgtgccctgggcaccttgcagccctgcacctgcctgccacttccccaccgaggccatgggcccaggagttctgctgctcctgctggtggccacagcttggcatggtcagggaatcccagtgatagagcccagtgtccctgagctggtcgtgaagccaggagcaacggtgaccttgcgatgtgtgggcaatggcagcgtggaatgggatggccccccatcacctcactggaccctgtactctgatggctccagcagcatcctcagcaccaacaacgctaccttccaaaacacggggacctatcgctgcactgagcctggagaccccctgggaggcagcgccgccatccacctctatgtcaaagaccctgcccggccctggaacgtgctagcacaggaggtggtcgtgttcgaggaccaggacgcactactgccctgtctgctcacagacccggtgctggaagcaggcgtctcgctggtgcgtgtgcgtggccggcccctcatgcgccacaccaactactccttctcgccctggcatggcttcaccatccacagggccaagttcattcagagccaggactatcaatgcagtgccctgatgggtggcaggaaggtgatgtccatcagcatccggctgaaagtgcagaaagtcatcccagggcccccagccttgacactggtgcctgcagagctggtgcggattcgaggggaggctgcccagatcgtgtgctcagccagcagcgttgatgttaactttgatgtcttcctccaacacaacaacaccaagctcgcaatccctcaacaatctgactttcataataaccgttaccaaaaagtcctgaccctcaacctcgatcaagtagatttccaacatgccggcaactactcctgcgtggccagcaacgtgcagggcaagcactccacctccatgttcttccgggtggtagagagtgcctacttgaacttgagctctgagcagaacctcatccaggaggtgaccgtgggggaggggctcaacctcaaagtcatggtggaggcctacccaggcctgcaaggttttaactggacctacctgggacccttttctgaccaccagcctgagcccaagcttgctaatgctaccaccaaggacacatacaggcacaccttcaccctctctctgccccgcctgaagccctctgaggctggccgctactccttcctggccagaaacccaggaggctggagagctctgacgtttgagctcacccttcgataccccccagaggtaagcgtcatatggacattcatcaacggctctggcacccttttgtgtgctgcctctgggtacccccagcccaacgtgacatggctgcagtgcagtggccacactgataggtgtgatgaggcccaagtgctgcaggtctgggatgacccataccctgaggtcctgagccaggagcccttccacaaggtgacggtgcagagcctgctgactgttgagaccttagagcacaaccaaacctacgagtgcagggcccacaacagcgtggggagtggctcctgggccttcatacccatctctgcaggagcccacacgcatcccccggatgagttcctcttcacaccagtggtggtcgcctgcatgtccatcatggccttgctgctgctgctgctcctgctgctattgtacaagtataagcagaagcccaagtaccaggtccgctggaagatcatcgagagctatgagggcaacagttatactttcatcgaccccacgcagctgccttacaacgagaagtgggagttcccccggaacaacctgcagtttggtaagaccctcggagctggagcctttgggaaggtggtggaggccacggcctttggtctgggcaaggaggatgctgtcctgaaggtggctgtgaagatgctgaagtccacggcccatgctgatgagaaggaggccctcatgtccgagctgaagatcatgagccacctgggccagcacgagaacatcgtcaaccttctgggagcctgtacccatggaggccctgtactggtcatcacggagtactgttgctatggcgacctgctcaactttctgcgaaggaaggctgaggccatgctgggacccagcctgagccccggccaggaccccgagggaggcgtcgactataagaacatccacctcgagaagaaatatgtccgcagggacagtggcttctccagccagggtgtggacacctatgtggagatgaggcctgtctccacttcttcaaatgactccttctctgagcaagacctggacaaggaggatggacggcccctggagctccgggacctgcttcacttctccagccaagtagcccagggcatggccttcctcgcttccaagaattgcatccaccgggacgtggcagcgcgtaacgtgctgttgaccaatggtcatgtggccaagattggggacttcgggctggctagggacatcatgaatgactccaactacattgtcaagggcaatgcccgcctgcctgtgaagtggatggccccagagagcatctttgactgtgtctacacggttcagagcgacgtctggtcctatggcatcctcctctgggagatcttctcacttgggctgaatccctaccctggcatcctggtgaacagcaagttctataaactggtgaaggatggataccaaatggcccagcctgcatttgccccaaagaatatatacagcatcatgcaggcctgctgggccttggagcccacccacagacccaccttccagcagatctgctccttccttcaggagcaggcccaagaggacaggagagagcgggactataccaatctgccgagcagcagcagaagcggtggcagcggcagcagcagcagtgagctggaggaggagagctctagtgagcacctgacctgctgcgagcaaggggatatcgcccagcccttgctgcagcccaacaactatcagttctgctgaggagttgacgacagggagtaccactctcccctcccacaaacttcaactcctccatggatggggcgacacggggagaacatacaaactctgccttcggtcatttcactcaacagctcggcccagctctgaaacttgggaaggtgagggattcaggggaggtcagaggatcccacttcctgagcatgggccatcactgccagtcaggggctgggggctgagccctcacccccccctcccctactgttctcatggtgttggcctcgtgtttgctatgccaactagtagaaccttctttcctaatccccttatcttcatggaaatggactgactttatgcctatgaagtccccaggagctacactgatactgagaaaaccaggctctttggggctagacagactggcagagagtgagatctccctctctgagaggagcagcagatgctcacagaccacactcagctcaggccccttggagcaggatggctcctctaagaatctcacaggacctcttagtctctgccctatacgccgccttcactccacagcctcacccctcccacccccatactggtactgctgtaatgagccaagtggcagctaaaagttgggggtgttctgcccagtcccgtcattctgggctagaaggcaggggaccttggcatgtggctggccacaccaagcaggaagcacaaactcccccaagctgactcatcctaactaacagtcacgccgtgggatgtctctgtccacattaaactaacagcattaatgcagtca

SEQ ID NO: 121662 - DNA, 655 bp, Homo sapiens
  Payload ID: 3854
  Gene Symbol: CSF1R
  Gene Name: colony stimulating factor 1 receptor
  ENST ID: ENST00000511344
  CDS Start-End: 508-655
gaagggcagacagagtgtccaaaagcgtgagagcacgaagtgaggagaaggtggagaagagagaagaggaagaggaagaggaagagaggaagcggagggaactgcggccagggtcagggaatcccagtgatagagcccagtgtccctgagctggtcgtgaagccaggagcaacggtgaccttgcgatgtgtgggcaatggcagcgtggaatgggatggccccccatcacctcactggaccctgtactctgatggctccagcagcatcctcagcaccaacaacgctaccttccaaaacacggggacctatcgctgcactgagcctggagaccccctgggaggcagcgccgccatccacctctatgtcaaagaccctgcccggccctggaacgtgctagcacaggaggtggtcgtgttcgaggaccaggacgcactactgccctgtctgctcacagacccggtgctggaagcaggcgtctcgctggtgcgtgtgcgtggccggcccctcatgcgccacaccaactactccttctcgccctggcatggcttcaccatccacagggccaagttcattcagagccaggactatcaatgcagtgccctgatgggtggcaggaaggtgatgtccatcagcatccggctgaaagtgcagaaag

SEQ ID NO: 121663 - DNA, 3697 bp, Homo sapiens
  Payload ID: 3854
  Gene Symbol: CSF1R
  Gene Name: colony stimulating factor 1 receptor
  ENST ID: ENST00000504875
  CDS Start-End: 164-2179
ggatcagcccaaggaggaggaagaggaaaacaagacaaacagccagtgcagaggagaggaacgtgtgtccagtgtcccgatccctgcggagctagtagctgagagctctgtgccctgggcaccttgcagccctgcacctgcctgccacttccccaccgaggccatgggcccaggagttctgctgctcctgctggtggccacagcttggcatggtcagggaatcccagtgatagagcccagtgtccctgagctggtcgtgaagccaggagcaacggtgaccttgcgatgtgtgggcaatggcagcgtggaatgggatggccccccatcacctcactggaccctgtactctgatggctccagcagcatcctcagcaccaacaacgctaccttccaaaacacggggacctatcgctgcactgagcctggagaccccctgggaggcagcgccgccatccacctctatgtcaaagaccctgcccggccctggaacgtgctagcacaggaggtggtcgtgttcgaggaccaggacgcactactgccctgtctgctcacagacccggtgctggaagcaggcgtctcgctggtgcgtgtgcgtggccggcccctcatgcgccacaccaactactccttctcgccctggcatggcttcaccatccacagggccaagttcattcagagccaggactatcaatgcagtgccctgatgggtggcaggaaggtgatgtccatcagcatccggctgaaagtgcagaaagtcatcccagggcccccagccttgacactggtgcctgcagagctggtgcggattcgaggggaggctgcccagatcgtgtgctcagccagcagcgttgatgttaactttgatgtcttcctccaacacaacaacaccaagctcgcaatccctcaacaatctgactttcataataaccgttaccaaaaagtcctgaccctcaacctcgatcaagtagatttccaacatgccggcaactactcctgcgtggccagcaacgtgcagggcaagcactccacctccatgttcttccgggtggtagagagtgcctacttgaacttgagctctgagcagaacctcatccaggaggtgaccgtgggggaggggctcaacctcaaagtcatggtggaggcctacccaggcctgcaaggttttaactggacctacctgggacccttttctgaccaccagcctgagcccaagcttgctaatgctaccaccaaggacacatacaggcacaccttcaccctctctctgccccgcctgaagccctctgaggctggccgctactccttcctggccagaaacccaggaggctggagagctctgacgtttgagctcacccttcgataccccccagaggtaagcgtcatatggacattcatcaacggctctggcacccttttgtgtgctgcctctgggtacccccagcccaacgtgacatggctgcagtgcagtggccacactgataggtgtgatgaggcccaagtgctgcaggtctgggatgacccataccctgaggtcctgagccaggagcccttccacaaggtgacggtgcagagcctgctgactgttgagaccttagagcacaaccaaacctacgagtgcagggcccacaacagcgtggggagtggctcctgggccttcatacccatctctgcaggagcccacacgcatcccccggatgagttcctcttcacaccagtggtggtcgcctgcatgtccatcatggccttgctgctgctgctgctcctgctgctattgtacaagtataagcagaagcccaagtaccaggtccgctggaagatcatcgagagctatgagggcaacagttatactttcatcgaccccacgcagctgccttacaacgagaagtgggagttcccccggaacaacctgcagtttggtaagaccctcggagctggagcctttgggaaggtggtggaggccacggcctttggtctgggcaaggaggatgctgtcctgaaggtggctgtgaagatgctgaagtccacggcccatgctgatgagaaggaggccctcatgtccgagctgaagatcatgagccacctgggccagcacgagaacatcgtcaaccttctgggagcctgtacccatggagggacagtggcttctccagccagggtgtggacacctatgtggagatgaggcctgtctccacttcttcaaatgactccttctctgagcaagacctggacaaggaggatggacggcccctggagctccgggacctgcttcacttctccagccaagtagcccagggcatggccttcctcgcttccaagaattgcatccaccgggacgtggcagcgcgtaacgtgctgttgaccaatggtcatgtggccaagattggggacttcgggctggctagggacatcatgaatgactccaactacattgtcaagggcaatgcccgcctgcctgtgaagtggatggccccagagagcatctttgactgtgtctacacggttcagagcgacgtctggtcctatggcatcctcctctgggagatcttctcacttgggctgaatccctaccctggcatcctggtgaacagcaagttctataaactggtgaaggatggataccaaatggcccagcctgcatttgccccaaagaatatatacagcatcatgcaggcctgctgggccttggagcccacccacagacccaccttccagcagatctgctccttccttcaggagcaggcccaagaggacaggagagagcgggactataccaatctgccgagcagcagcagaagcggtggcagcggcagcagcagcagtgagctggaggaggagagctctagtgagcacctgacctgctgcgagcaaggggatatcgcccagcccttgctgcagcccaacaactatcagttctgctgaggagttgacgacagggagtaccactctcccctcccacaaacttcaactcctccatggatggggcgacacggggagaacatacaaactctgccttcggtcatttcactcaacagctcggcccagctctgaaacttgggaaggtgagggattcaggggaggtcagaggatcccacttcctgagcatgggccatcactgccagtcaggggctgggggctgagccctcacccccccctcccctactgttctcatggtgttggcctcgtgtttgctatgccaactagtagaaccttctttcctaatccccttatcttcatggaaatggactgactttatgcctatgaagtccccaggagctacactgatactgagaaaaccaggctctttggggctagacagactggcagagagtgagatctccctctctgagaggagcagcagatgctcacagaccacactcagctcaggccccttggagcaggatggctcctctaagaatctcacaggacctcttagtctctgccctatacgccgccttcactccacagcctcacccctcccacccccatactggtactgctgtaatgagccaagtggcagctaaaagttgggggtgttctgcccagtcccgtcattctgggctagaaggcaggggaccttggcatgtggctggccacaccaagcaggaagcacaaactcccccaagctgactcatcctaactaacagtcacgccgtgggatgtctctgtccacattaaactaacagcattaatgcagtca

SEQ ID NO: 121664 - DNA, 723 bp, Homo sapiens
  Payload ID: 3854
  Gene Symbol: CSF1R
  Gene Name: colony stimulating factor 1 receptor
  ENST ID: ENST00000515068
  CDS Start-End: 1-195
gcagggagcccatgggcccttggacagaggccctttggtgcccagggacttaagggacctgtgtgcgtggcagccacggcccatgctgatgagaaggaggccctcatgtccgagctgaagatcatgagccacctgggccagcacgagaacatcgtcaaccttctgggagcctgtacccatggaggcatctcttgaggactgttggaagtgcaccacctcaggcccatccacccaggcctgctgattcaaaatctgcattgcagagattcccggggtgatttatctgcacatgagttgcagcggacagtggcttctccagccagggtgtggacacctatgtggagatgaggcctgtctccacttcttcaaatgactccttctctgagcaagacctggacaaggaggatggacggcccctggagctccgggacctgcttcacttctccagccaagtagcccagggcatggccttcctcgcttccaagaattgcatccaccgggacgtggcagcgcgtaacgtgctgttgaccaatggtcatgtggccaagattggggacttcgggctggctagggacatcatgaatgactccaactacattgtcaagggcaatgcccgcctgcctgtgaagtggatggccccagagagcatctttgactgtgtctacacggttcagagcgacgtctggtcctatggcatcctcctctgggagatcttctcacttg

SEQ ID NO: 121665 - DNA, 921 bp, Homo sapiens
  Payload ID: 3854
  Gene Symbol: CSF1R
  Gene Name: colony stimulating factor 1 receptor
  Uniprot ID: P07333
  ENST ID: ENST00000543093
  CDS Start-End: 1-921
atgggcccaggagttctgctgctcctgctggtggccacagcttggcatggtcagggaatcccagtgatagagcccagtgtccctgagctggtcgtgaagccaggagcaacggtgaccttgcgatgtgtgggcaatggcagcgtggaatgggatggccccccatcacctcactggaccctgtactctgatggctccagcagcatcctcagcaccaacaacgctaccttccaaaacacggggacctatcgctgcactgagcctggagaccccctgggaggcagcgccgccatccacctctatgtcaaagaccctgcccggccctggaacgtgctagcacaggaggtggtcgtgttcgaggaccaggacgcactactgccctgtctgctcacagacccggtgctggaagcaggcgtctcgctggtgcgtgtgcgtggccggcccctcatgcgccacaccaactactccttctcgccctggcatggcttcaccatccacagggccaagttcattcagagccaggactatcaatgcagtgccctgatgggtggcaggaaggtgatgtccatcagcatccggctgaaagtgcagaaagtcatcccagggcccccagccttgacactggtgcctgcagagctggtgcggattcgaggggaggctgcccagatcgtgtgctcagccagcagcgttgatgttaactttgatgtcttcctccaacacaacaacaccaagctcgcaatccctcaacaatctgactttcataataaccgttaccaaaaagtcctgaccctcaacctcgatcaagtagatttccaacatgccggcaactactcctgcgtggccagcaacgtgcagggcaagcactccacctccatgttcttccgggtggtaggcacaccttcaccctctctctgccccgcctga

SEQ ID NO: 121666 - DNA, 787 bp, Homo sapiens
  Payload ID: 3855
  Gene Symbol: CSF2
  Gene Name: colony stimulating factor 2 (granulocyte-macrophage)
  Uniprot ID: P04141
  ENST ID: ENST00000296871
  CDS Start-End: 35-469
gtacacagagagaaaggctaaagttctctggaggatgtggctgcagagcctgctgctcttgggcactgtggcctgcagcatctctgcacccgcccgctcgcccagccccagcacgcagccctgggagcatgtgaatgccatccaggaggcccggcgtctcctgaacctgagtagagacactgctgctgagatgaatgaaacagtagaagtcatctcagaaatgtttgacctccaggagccgacctgcctacagacccgcctggagctgtacaagcagggcctgcggggcagcctcaccaagctcaagggccccttgaccatgatggccagccactacaagcagcactgccctccaaccccggaaacttcctgtgcaacccagattatcacctttgaaagtttcaaagagaacctgaaggactttctgcttgtcatcccctttgactgctgggagccagtccaggagtgagaccggccagatgaggctggccaagccggggagctgctctctcatgaaacaagagctagaaactcaggatggtcatcttggagggaccaaggggtgggccacagccatggtgggagtggcctggacctgccctgggccacactgaccctgatacaggcatggcagaagaatgggaatattttatactgacagaaatcagtaatatttatatatttatatttttaaaatatttatttatttatttatttaagttcatattccatatttattcaagatgttttaccgtaataattattattaaaaatatgcttctacttg

SEQ ID NO: 121667 - DNA, 1628 bp, Homo sapiens
  Payload ID: 3856
  Gene Symbol: CSF2RA
  Gene Name: colony stimulating factor 2 receptor, alpha, low-affinity (granulocyte-macrophage)
  Uniprot ID: P15509
  ENST ID: ENST00000355432
  CDS Start-End: 150-1283
agcaggtggaaggagaggaagcggatgccgtggggtttacagcaggaaaatccgtggagacagcagatccgagaagcggcgatgtttgcgtagaaccctgtacgtgcttccttcggcctgtcgctcttcccttctctctgaccagcaccatgcttctcctggtgacaagccttctgctctgtgagttaccacacccagcattcctcctgatcccagagaaatcggatctgcgaacagtggcaccagcctctagtctcaatgtgaggtttgactccaggacgatgaatttaagctgggactgccaagaaaacacaaccttcagcaagtgtttcttaactgacaagaagaacagagtcgtggaacccaggctcagtaacaacgaatgttcgtgcacatttcgtgaaatttgtctgcatgaaggagtcacatttgaggttcacgtgaatactagtcaaagaggatttcaacagaaactgctttatccaaattcaggaagggagggtaccgctgctcagaatttctcctgtttcatctacaatgcggatttaatgaactgtacctgggcgaggggtccgacggccccccgtgacgtccagtattttttgtacatacgaaactcaaagagaaggagggagatccggtgtccttattacatacaagactcaggaacccatgtgggatgtcacctggataacctgtcaggattaacgtctcgcaattactttctggttaacggaaccagccgagaaattggcatccaattctttgattcacttttggacacaaagaaaatagaacgattcaaccctcccagcaatgtcaccgtacgttgcaacacgacgcactgcctcgtacggtggaaacagcccaggacctatcagaagctgtcgtacctggactttcagtaccagctggacgtccacagaaagaatacccagcctggcacggaaaacctactgattaatgtttctggtgatttggaaaatagatacaactttccaagctctgagcccagagcaaaacacagtgtgaagatcagagctgcagacgtccgcatcttgaattggagctcctggagtgaagccattgaatttgatcatctgggaggaattcaccccagaggaagggaaaggctaccgcgaagaggtcttgaccgtgaaggaaattacctgagacccagagggtgtaggaatggcatggacatctccgcctccgcgacacgggggaactgttttcttgatgatgctgtgaacctttatatcattttctatgtttttatttaaaaacatgacatttggggccaggcgcggtggctcacgcctgtaatcccagcactttgggaggccaaggcaggcggatcacctgaggtcaggagttcaagaccagcctgcccaacatggtgaaaccccatctggactaaaaatgcagaaatttacccaggcacggcggcggacgcccatcatcccagctacttgggaggctgaggcaggagaattgcttgaacccgtgaggcggaggttgtagtgagccaagatcgcaccattgcacaccaacctgcgtgacagagcaagattgcatctcaaaacaaacaataataataaataataaaaacctgatatttggctggg

SEQ ID NO: 121668 - DNA, 1410 bp, Homo sapiens
  Payload ID: 3856
  Gene Symbol: CSF2RA
  Gene Name: colony stimulating factor 2 receptor, alpha, low-affinity (granulocyte-macrophage)
  Uniprot ID: P15509
  ENST ID: ENST00000355805
  CDS Start-End: 150-851
agcaggtggaaggagaggaagcggatgccgtggggtttacagcaggaaaatccgtggagacagcagatccgagaagcggcgatgtttgcgtagaaccctgtacgtgcttccttcggcctgtcgctcttcccttctctctgaccagcaccatgcttctcctggtgacaagccttctgctctgtgagttaccacacccagcattcctcctgatcccagagaaatcggatctgcgaacagtggcaccagcctctagtctcaatgtgaggtttgactccaggacgatgaatttaagctgggactgccaagaaaacacaaccttcagcaagtgtttcttaactgacaagaagaacagagtcgtggaacccaggctcagtaacaacgaatgttcgtgcacatttcgtgaaatttgtctgcatgaaggagtcacatttgaggttcacgtgaatactagtcaaagaggatttcaacagaaactgctttatccaaattcaggaagggagggtaccgctgctcagaatttctcctgtttcatctacaatgcggatttaatgaactgtacctgggcgaggggtccgacggccccccgtgacgtccagtattttttgtacatacgaaactcaaagagaaggagggagatccggtgtccttattacatacaagactcaggaacccatgtgggatgtcacctggataacctgtcaggattaacgtctcgcaattactttctggttaacggaaccagccgagaaattggcatccaattctttgattcacttttggacacaaagaaaataggttccttaggatacagcggctgttcccgccagttccacagatcaaagacaaactgaatgataaccatgaggtggaagacgagatcatctgggaggaattcaccccagaggaagggaaaggctaccgcgaagaggtcttgaccgtgaaggaaattacctgagacccagagggtgtaggaatggcatggacatctccgcctccgcgacacgggggaactgttttcttgatgatgctgtgaacctttatatcattttctatgtttttatttaaaaacatgacatttggggccaggcgcggtggctcacgcctgtaatcccagcactttgggaggccaaggcaggcggatcacctgaggtcaggagttcaagaccagcctgcccaacatggtgaaaccccatctggactaaaaatgcagaaatttacccaggcacggcggcggacgcccatcatcccagctacttgggaggctgaggcaggagaattgcttgaacccgtgaggcggaggttgtagtgagccaagatcgcaccattgcacaccaacctgcgtgacagagcaagattgcatctcaaaacaaacaataataataaataataaaaacctgatatttggctggg

SEQ ID NO: 121669 - DNA, 1283 bp, Homo sapiens
  Payload ID: 3856
  Gene Symbol: CSF2RA
  Gene Name: colony stimulating factor 2 receptor, alpha, low-affinity (granulocyte-macrophage)
  Uniprot ID: P15509
  ENST ID: ENST00000381500
  CDS Start-End: 19-1020
ttctctctgaccagcaccatgcttctcctggtgacaagccttctgctctgtgagttaccacacccagcattcctcctgatcccagagaaatcggatctgcgaacagtggcaccagcctctagtctcaatgtgaggtttgactccaggacgatgaatttaagctgggactgccaagaaaacacaaccttcagcaagtgtttcttaactgacaagaagaacagagtcgtggaacccaggctcagtaacaacgaatgttcgtgcacatttcgtgaaatttgtctgcatgaaggagtcacatttgaggttcacgtgaatactagtcaaagaggatttcaacagaaactgctttatccaaattcaggaagggagggtaccgctgctcagaatttctcctgtttcatctacaatgcggatttaatgaactgtacctgggcgaggggtccgacggccccccgtgacgtccagtattttttgtacatacgaaactcaaagagaaggagggagatccggtgtccttattacatacaagactcaggaacccatgtgggatgtcacctggataacctgtcaggattaacgtctcgcaattactttctggttaacggaaccagccgagaaattggcatccaattctttgattcacttttggacacaaagaaaatagaacgattcaaccctcccagcaatgtcaccgtacgttgcaacacgacgcactgcctcgtacggtggaaacagcccaggacctatcagaagctgtcgtacctggactttcagtaccagctggacgtccacagaaagaatacccagcctggcacggaaaacctactgattaatgtttctggtgatttggaaaatagatacaactttccaagctctgagcccagagcaaaacacagtgtgaagatcagagctgcagacgtccgcatcttgaattggagctcctggagtgaagccattgaatttggttccttaggatacagcggctgttcccgccagttccacagatcaaagacaaactgaatgataaccatgaggtggaagacgagatcatctgggaggaattcaccccagaggaagggaaaggctaccgcgaagaggtcttgaccgtgaaggaaattacctgagacccagagggtgtaggaatggcatggacatctccgcctccgcgacacgggggaactgttttcttgatgatgctgtgaacctttatatcattttctatgtttttatttaaaaacatgacatttggggccaggcgcggtggctcacgcctgtaatcccag

SEQ ID NO: 121670 - DNA, 1601 bp, Homo sapiens
  Payload ID: 3856
  Gene Symbol: CSF2RA
  Gene Name: colony stimulating factor 2 receptor, alpha, low-affinity (granulocyte-macrophage)
  Uniprot ID: P15509
  ENST ID: ENST00000381509
  CDS Start-End: 163-1395
ccgagagaagaaaagcaggtggaaggagaggaagcggatgccgtggggtttacagcaggaaaatccgtggagacagcagatccgagaagcggcgatgtttgcgtagaaccctgtacgtgcttccttcggcctgtcgctcttcccttctctctgaccagcaccatgcttctcctggtgacaagccttctgctctgtgagttaccacacccagcattcctcctgatcccagagaaatcggatctgcgaacagtggcaccagcctctagtctcaatgtgaggtttgactccaggacgatgaatttaagctgggactgccaagaaaacacaaccttcagcaagtgtttcttaactgacaagaagaacagagtcgtggaacccaggctcagtaacaacgaatgttcgtgcacatttcgtgaaatttgtctgcatgaaggagtcacatttgaggttcacgtgaatactagtcaaagaggatttcaacagaaactgctttatccaaattcaggaagggagggtaccgctgctcagaatttctcctgtttcatctacaatgcggatttaatgaactgtacctgggcgaggggtccgacggccccccgtgacgtccagtattttttgtacatacgaaactcaaagagaaggagggagatccggtgtccttattacatacaagactcaggaacccatgtgggatgtcacctggataacctgtcaggattaacgtctcgcaattactttctggttaacggaaccagccgagaaattggcatccaattctttgattcacttttggacacaaagaaaatagaacgattcaaccctcccagcaatgtcaccgtacgttgcaacacgacgcactgcctcgtacggtggaaacagcccaggacctatcagaagctgtcgtacctggactttcagtaccagctggacgtccacagaaagaatacccagcctggcacggaaaacctactgattaatgtttctggtgatttggaaaatagatacaactttccaagctctgagcccagagcaaaacacagtgtgaagatcagagctgcagacgtccgcatcttgaattggagctcctggagtgaagccattgaatttggttctgacgacgggaacctcggctctgtgtacatttatgtgctcctaatcgtgggaacccttgtctgtggcatcgtcctcggcttcctctttaaaaggttccttaggatacagcggctgttcccgccagttccacagatcaaagacaaactgaatgataaccatgaggtggaagacgagatgggaccgcagcgtcaccaccggtgtggctggaatctgtatcccactcctgggccttctcccgggtcggggtcttctccaaggttggggtcagagtcatctctgtgagctccatcaggagaaactgaggcagggtggtggtcaagaaaaggaggagaagacggtagagagggccaggcacggtggctcatgcctgtcatcccagcactttgggaggttgaggcatgtggatcatctgaggtcagaggttcgagaccagcctggccaacgtggtgaaaccccatctctgctaaaaatacaaaaaattagctggg

SEQ ID NO: 121671 - DNA, 2291 bp, Homo sapiens
  Payload ID: 3856
  Gene Symbol: CSF2RA
  Gene Name: colony stimulating factor 2 receptor, alpha, low-affinity (granulocyte-macrophage)
  Uniprot ID: P15509
  ENST ID: ENST00000381524
  CDS Start-End: 187-1389
ggagctactcagaagcgggagtctccgagagaagaaaagcaggtggaaggagaggaagcggatgccgtggggtttacagcaggaaaatccgtggagacagcagatccgagaagcggcgatgtttgcgtagaaccctgtacgtgcttccttcggcctgtcgctcttcccttctctctgaccagcaccatgcttctcctggtgacaagccttctgctctgtgagttaccacacccagcattcctcctgatcccagagaaatcggatctgcgaacagtggcaccagcctctagtctcaatgtgaggtttgactccaggacgatgaatttaagctgggactgccaagaaaacacaaccttcagcaagtgtttcttaactgacaagaagaacagagtcgtggaacccaggctcagtaacaacgaatgttcgtgcacatttcgtgaaatttgtctgcatgaaggagtcacatttgaggttcacgtgaatactagtcaaagaggatttcaacagaaactgctttatccaaattcaggaagggagggtaccgctgctcagaatttctcctgtttcatctacaatgcggatttaatgaactgtacctgggcgaggggtccgacggccccccgtgacgtccagtattttttgtacatacgaaactcaaagagaaggagggagatccggtgtccttattacatacaagactcaggaacccatgtgggatgtcacctggataacctgtcaggattaacgtctcgcaattactttctggttaacggaaccagccgagaaattggcatccaattctttgattcacttttggacacaaagaaaatagaacgattcaaccctcccagcaatgtcaccgtacgttgcaacacgacgcactgcctcgtacggtggaaacagcccaggacctatcagaagctgtcgtacctggactttcagtaccagctggacgtccacagaaagaatacccagcctggcacggaaaacctactgattaatgtttctggtgatttggaaaatagatacaactttccaagctctgagcccagagcaaaacacagtgtgaagatcagagctgcagacgtccgcatcttgaattggagctcctggagtgaagccattgaatttggttctgacgacgggaacctcggctctgtgtacatttatgtgctcctaatcgtgggaacccttgtctgtggcatcgtcctcggcttcctctttaaaaggttccttaggatacagcggctgttcccgccagttccacagatcaaagacaaactgaatgataaccatgaggtggaagacgagatcatctgggaggaattcaccccagaggaagggaaaggctaccgcgaagaggtcttgaccgtgaaggaaattacctgagacccagagggtgtaggaatggcatggacatctccgcctccgcgacacgggggaactgttttcttgatgatgctgtgaacctttatatcattttctatgtttttatttaaaaacatgacatttggggccaggcgcggtggctcacgcctgtaatcccagcactttgggaggccaaggcaggcggatcacctgaggtcaggagttcaagaccagcctgcccaacatggtgaaaccccatctggactaaaaatgcagaaatttacccaggcacggcggcggacgcccatcatcccagctacttgggaggctgaggcaggagaattgcttgaacccgtgaggcggaggttgtagtgagccaagatcgcaccattgcacaccaacctgcgtgacagagcaagattgcatctcaaaacaaacaataataataaataataaaaacctgatatttggctgggcgccgtggctcatgcctgtaatcctaacactttggaggattgctggagacaggagtttaagaccagtctgggcaacatagcaagaccctgtctctacaaaaaaggcaaaaattagctgggcgtggtggcttgtgcctgtagtgccagctatctgggaggctgaggcgggaggatcacttgagttcaagctgacagtaagctatgattgcaccgttgcactccagcctgggtaacaaactaagaccccatctctctgtctcaaaaaaagtgatacttcgcaaagatgcttagactccaagaagcttttgcatctctttccaacccaactactgaggtactgtgtagcctcctccttgaataactaacctggtgagctgagattgcgccattgcaatccagcctgggcaacaagagcaaaactccatcacatttaaaaaaaaaaaaaaa

SEQ ID NO: 121672 - DNA, 1816 bp, Homo sapiens
  Payload ID: 3856
  Gene Symbol: CSF2RA
  Gene Name: colony stimulating factor 2 receptor, alpha, low-affinity (granulocyte-macrophage)
  Uniprot ID: P15509
  ENST ID: ENST00000381529
  CDS Start-End: 171-1373
ctctgaagggagctactcagaagcgggagtctccgagagaagaaaagcaggtggaaggagaggaagcggatgccgtggggtttacagcaggaaaatccgtggagacagcagatccgagaagcggcgatgtttgcgtagaaccctctcttcccttctctctgaccagcaccatgcttctcctggtgacaagccttctgctctgtgagttaccacacccagcattcctcctgatcccagagaaatcggatctgcgaacagtggcaccagcctctagtctcaatgtgaggtttgactccaggacgatgaatttaagctgggactgccaagaaaacacaaccttcagcaagtgtttcttaactgacaagaagaacagagtcgtggaacccaggctcagtaacaacgaatgttcgtgcacatttcgtgaaatttgtctgcatgaaggagtcacatttgaggttcacgtgaatactagtcaaagaggatttcaacagaaactgctttatccaaattcaggaagggagggtaccgctgctcagaatttctcctgtttcatctacaatgcggatttaatgaactgtacctgggcgaggggtccgacggccccccgtgacgtccagtattttttgtacatacgaaactcaaagagaaggagggagatccggtgtccttattacatacaagactcaggaacccatgtgggatgtcacctggataacctgtcaggattaacgtctcgcaattactttctggttaacggaaccagccgagaaattggcatccaattctttgattcacttttggacacaaagaaaatagaacgattcaaccctcccagcaatgtcaccgtacgttgcaacacgacgcactgcctcgtacggtggaaacagcccaggacctatcagaagctgtcgtacctggactttcagtaccagctggacgtccacagaaagaatacccagcctggcacggaaaacctactgattaatgtttctggtgatttggaaaatagatacaactttccaagctctgagcccagagcaaaacacagtgtgaagatcagagctgcagacgtccgcatcttgaattggagctcctggagtgaagccattgaatttggttctgacgacgggaacctcggctctgtgtacatttatgtgctcctaatcgtgggaacccttgtctgtggcatcgtcctcggcttcctctttaaaaggttccttaggatacagcggctgttcccgccagttccacagatcaaagacaaactgaatgataaccatgaggtggaagacgagatcatctgggaggaattcaccccagaggaagggaaaggctaccgcgaagaggtcttgaccgtgaaggaaattacctgagacccagagggtgtaggaatggcatggacatctccgcctccgcgacacgggggaactgttttcttgatgatgctgtgaacctttatatcattttctatgtttttatttaaaaacatgacatttggggccaggcgcggtggctcacgcctgtaatcccagcactttgggaggccaaggcaggcggatcacctgaggtcaggagttcaagaccagcctgcccaacatggtgaaaccccatctggactaaaaatgcagaaatttacccaggcacggcggcggacgcccatcatcccagctacttgggaggctgaggcaggagaattgcttgaacccgtgaggcggaggttgtagtgagccaagatcgcaccattgcacaccaacctgcgtgacagagcaagattgcatctcaaaacaaacaataataataaataataaaaacctga

SEQ ID NO: 121673 - DNA, 1955 bp, Homo sapiens
  Payload ID: 3856
  Gene Symbol: CSF2RA
  Gene Name: colony stimulating factor 2 receptor, alpha, low-affinity (granulocyte-macrophage)
  Uniprot ID: P15509
  ENST ID: ENST00000417535
  CDS Start-End: 195-1499
ctctgaagggagctactcagaagcgggagtctccgagagaagaaaagcaggtggaaggagaggaagcggatgccgtggggtttacagcaggaaaatccgtggagacagcagatccgagaagcggcgatgtttgcgtagaaccctgtacgtgcttccttcggcctgtcgctcttcccttctctctgaccagcaccatgcttctcctggtgacaagccttctgctctgtgagttaccacacccagcattcctcctgatcccagagaaatcggatctgcgaacagtggcaccagcctctagtctcaatgtgaggtttgactccaggacgatgaatttaagctgggactgccaagaaaacacaaccttcagcaagtgtttcttaactgacaagaagaacagagtcgtggaacccaggctcagtaacaacgaatgttcgtgcacatttcgtgaaatttgtctgcatgaaggagtcacatttgaggttcacgtgaatactagtcaaagaggatttcaacagaaactgctttatccaaattcaggaagggagggtaccgctgctcagaatttctcctgtttcatctacaatgcggatttaatgaactgtacctgggcgaggggtccgacggccccccgtgacgtccagtattttttgtacatacgaaactcaaagagaaggagggagatccggtgtccttattacatacaagactcaggaacccatgtgggatgtcacctggataacctgtcaggattaacgtctcgcaattactttctggttaacggaaccagccgagaaattggcatccaattctttgattcacttttggacacaaagaaaatagaacgattcaaccctcccagcaatgtcaccgtacgttgcaacacgacgcactgcctcgtacggtggaaacagcccaggacctatcagaagctgtcgtacctggactttcagtaccagctggacgtccacagaaagaatacccagcctggcacggaaaacctactgattaatgtttctggtgatttggaaaatagatacaactttccaagctctgagcccagagcaaaacacagtgtgaagatcagagctgcagacgtccgcatcttgaattggagctcctggagtgaagccattgaatttgggtctcactctgtcacccaggctggagtgcaatggcacaatctcggctcactgcaacctccgtctcccaggctcaagcgattctcctgcctcagactcccaggttctgacgacgggaacctcggctctgtgtacatttatgtgctcctaatcgtgggaacccttgtctgtggcatcgtcctcggcttcctctttaaaaggttccttaggatacagcggctgttcccgccagttccacagatcaaagacaaactgaatgataaccatgaggtggaagacgagatcatctgggaggaattcaccccagaggaagggaaaggctaccgcgaagaggtcttgaccgtgaaggaaattacctgagacccagagggtgtaggaatggcatggacatctccgcctccgcgacacgggggaactgttttcttgatgatgctgtgaacctttatatcattttctatgtttttatttaaaaacatgacatttggggccaggcgcggtggctcacgcctgtaatcccagcactttgggaggccaaggcaggcggatcacctgaggtcaggagttcaagaccagcctgcccaacatggtgaaaccccatctggactaaaaatgcagaaatttacccaggcacggcggcggacgcccatcatcccagctacttgggaggctgaggcaggagaattgcttgaacccgtgaggcggaggttgtagtgagccaagatcgcaccattgcacaccaacctgcgtgacagagcaagattgcatctcaaaacaaacaataataataaataataaaaacctgatatttggctgggc

SEQ ID NO: 121674 - DNA, 856 bp, Homo sapiens
  Payload ID: 3856
  Gene Symbol: CSF2RA
  Gene Name: colony stimulating factor 2 receptor, alpha, low-affinity (granulocyte-macrophage)
  ENST ID: ENST00000419094
  CDS Start-End: 293-856
ctccgagagaagaaaagcaggtggaaggagaggaagcggatgccgtggggtttacagcaggaaaatccgtggagacagcagatccgagaagcggcgatgtttgcgtagaaccctgtcagctgagccatgacccatgaaccatggaagcttgactctagattgaccatcttgagatgccaaagatgtccacgtcctaatcccatgtgggagacagaataatggccctgcagaccttcccagctggccatgacccctcatttgaccagctcttcccttctctctgaccagcaccatgcttctcctggtgacaagccttctgctctgtgagttaccacacccagcattcctcctgatcccagagaaatcggatctgcgaacagtggcaccagcctctagtctcaatgtgaggtttgactccaggacgatgaatttaagctgggactgccaagaaaacacaaccttcagcaagtgtttcttaactgacaagaagaacagagtcgtggaacccaggctcagtaacaacgaatgttcgtgcacatttcgtgaaatttgtctgcatgaaggagtcacatttgaggttcacgtgaatactagtcaaagaggatttcaacagaaactgctttatccaaattcaggaagggagggtaccgctgctcagaatttctcctgtttcatctacaatgcggatttaatgaactgtacctgggcgaggggtccgacggccccccgtgacgtccagtattttttgtacatacgaaactcaaagagaaggagggagatccggtgtccttattacatacaagactcaggaacccatgtgggatgtcacctggataacctgtcaggattaacgtct

SEQ ID NO: 121675 - DNA, 802 bp, Homo sapiens
  Payload ID: 3856
  Gene Symbol: CSF2RA
  Gene Name: colony stimulating factor 2 receptor, alpha, low-affinity (granulocyte-macrophage)
  ENST ID: ENST00000412290
  CDS Start-End: 89-802
agaagcgggagtctccgagagaagaaaagcaggtggaaggagaggaagcggatgccgtggggctcttcccttctctctgaccagcaccatgcttctcctggtgacaagccttctgctctgtgagttaccacacccagcattcctcctgatcccagagaaatcggatctgcgaacagtggcaccagcctctagtctcaatgtgaggtttgactccaggacgatgaatttaagctgggactgccaagaaaacacaaccttcagcaagtgtttcttaactgacaagaagaacagagtcgtggaacccaggctcagtaacaacgaatgttcgtgcacatttcgtgaaatttgtctgcatgaaggagtcacatttgaggttcacgtgaatactagtcaaagaggatttcaacagaaactgctttatccaaattcaggaagggagggtaccgctgctcagaatttctcctgtttcatctacaatgcggatttaatgaactgtacctgggcgaggggtccgacggccccccgtgacgtccagtattttttgtacatacgaaactcaaagagaaggagggagatccggtgtccttattacatacaagactcaggaacccatgtgggatgtcacctggataacctgtcaggattaacgtctcgcaattactttctggttaacggaaccagccgagaaattggcatccaattctttgattcacttttggacacaaagaaaatagaacgattcaaccctcccagcaatgtcaccgtacgttgcaacacgacgcactgcctcgtacggtggaaa

SEQ ID NO: 121676 - DNA, 1981 bp, Homo sapiens
  Payload ID: 3856
  Gene Symbol: CSF2RA
  Gene Name: colony stimulating factor 2 receptor, alpha, low-affinity (granulocyte-macrophage)
  Uniprot ID: P15509
  ENST ID: ENST00000432318
  CDS Start-End: 323-1525
ctctgaagggagctactcagaagcgggagtctccgagagaagaaaagcaggtggaaggagaggaagcggatgccgtggggtttacagcaggaaaatccgtggagacagcagatccgagaagcggcgatgtttgcgtagaaccctgtcagctgagccatgacccatgaaccatggaagcttgactctagattgaccatcttgagatgccaaagatgtccacgtcctaatcccatgtgggagacagaataatggccctgcagaccttcccagctggccatgacccctcatttgaccagctcttcccttctctctgaccagcaccatgcttctcctggtgacaagccttctgctctgtgagttaccacacccagcattcctcctgatcccagagaaatcggatctgcgaacagtggcaccagcctctagtctcaatgtgaggtttgactccaggacgatgaatttaagctgggactgccaagaaaacacaaccttcagcaagtgtttcttaactgacaagaagaacagagtcgtggaacccaggctcagtaacaacgaatgttcgtgcacatttcgtgaaatttgtctgcatgaaggagtcacatttgaggttcacgtgaatactagtcaaagaggatttcaacagaaactgctttatccaaattcaggaagggagggtaccgctgctcagaatttctcctgtttcatctacaatgcggatttaatgaactgtacctgggcgaggggtccgacggccccccgtgacgtccagtattttttgtacatacgaaactcaaagagaaggagggagatccggtgtccttattacatacaagactcaggaacccatgtgggatgtcacctggataacctgtcaggattaacgtctcgcaattactttctggttaacggaaccagccgagaaattggcatccaattctttgattcacttttggacacaaagaaaatagaacgattcaaccctcccagcaatgtcaccgtacgttgcaacacgacgcactgcctcgtacggtggaaacagcccaggacctatcagaagctgtcgtacctggactttcagtaccagctggacgtccacagaaagaatacccagcctggcacggaaaacctactgattaatgtttctggtgatttggaaaatagatacaactttccaagctctgagcccagagcaaaacacagtgtgaagatcagagctgcagacgtccgcatcttgaattggagctcctggagtgaagccattgaatttggttctgacgacgggaacctcggctctgtgtacatttatgtgctcctaatcgtgggaacccttgtctgtggcatcgtcctcggcttcctctttaaaaggttccttaggatacagcggctgttcccgccagttccacagatcaaagacaaactgaatgataaccatgaggtggaagacgagatcatctgggaggaattcaccccagaggaagggaaaggctaccgcgaagaggtcttgaccgtgaaggaaattacctgagacccagagggtgtaggaatggcatggacatctccgcctccgcgacacgggggaactgttttcttgatgatgctgtgaacctttatatcattttctatgtttttatttaaaaacatgacatttggggccaggcgcggtggctcacgcctgtaatcccagcactttgggaggccaaggcaggcggatcacctgaggtcaggagttcaagaccagcctgcccaacatggtgaaaccccatctggactaaaaatgcagaaatttacccaggcacggcggcggacgcccatcatcccagctacttgggaggctgaggcaggagaattgcttgaacccgtgaggcggaggttgtagtgagccaagatcgcaccattgcacaccaacctgcgtgacagagcaagattgcatctcaaaacaaacaataataataaataataaaaacctgatatttggctgggc

SEQ ID NO: 121677 - DNA, 1671 bp, Homo sapiens
  Payload ID: 3856
  Gene Symbol: CSF2RA
  Gene Name: colony stimulating factor 2 receptor, alpha, low-affinity (granulocyte-macrophage)
  ENST ID: ENST00000486791
  CDS Start-End: 150-1007
agcaggtggaaggagaggaagcggatgccgtggggtttacagcaggaaaatccgtggagacagcagatccgagaagcggcgatgtttgcgtagaaccctgtacgtgcttccttcggcctgtcgctcttcccttctctctgaccagcaccatgcttctcctggtgacaagccttctgctctgtgagttaccacacccagcattcctcctgatcccagagaaatcggatctgcgaacagtggcaccagcctctagtctcaatgtgaggtttgactccaggacgatgaatttaagctgggactgccaagaaaacacaaccttcagcaagtgtttcttaactgacaagaagaacagagtcgtggaacccaggctcagtaacaacgaatgttcgtgcacatttcgtgaaatttgtctgcatgaaggagtcacatttgaggttcacgtgaatactagtcaaagaggatttcaacagaaactgctttatccaaattcaggaagggagggtaccgctgctcagaatttctcctgtttcatctacaatgcggatttaatgaactgtacctgggcgaggggtccgacggccccccgtgacgtccagtattttttgtacatacgaaactcaaagagaaggagggagatccggtgtccttattacatacaagactcaggaacccatgtgggatgtcacctggataacctgtcaggattaacgtctcgcaattactttctggttaacggaaccagccgagaaattggcatccaattctttgattcacttttggacacaaagaaaatagaacgattcaaccctcccagcaatgtcaccgtacgttgcaacacgacgcactgcctcgtacggtggaaacagcccaggacctatcagaagctgtcgtacctggactttcagtaccagctggacgtccacagaaagaatacccagcctggcacggaaaacctactggttctgacgacgggaacctcggctctgtgtacatttatgtgctcctaatcgtgggaacccttgtctgtggcatcgtcctcggcttcctctttaaaaggttccttaggatacagcggctgttcccgccagttccacagatcaaagacaaactgaatgataaccatgaggtggaagacgagatcatctgggaggaattcaccccagaggaagggaaaggctaccgcgaagaggtcttgaccgtgaaggaaattacctgagacccagagggtgtaggaatggcatggacatctccgcctccgcgacacgggggaactgttttcttgatgatgctgtgaacctttatatcattttctatgtttttatttaaaaacatgacatttggggccaggcgcggtggctcacgcctgtaatcccagcactttgggaggccaaggcaggcggatcacctgaggtcaggagttcaagaccagcctgcccaacatggtgaaaccccatctggactaaaaatgcagaaatttacccaggcacggcggcggacgcccatcatcccagctacttgggaggctgaggcaggagaattgcttgaacccgtgaggcggaggttgtagtgagccaagatcgcaccattgcacaccaacctgcgtgacagagcaagattgcatctcaaaacaaacaataataataaataataaaaacctgatatttggctggg

SEQ ID NO: 121678 - DNA, 1622 bp, Homo sapiens
  Payload ID: 3856
  Gene Symbol: CSF2RA
  Gene Name: colony stimulating factor 2 receptor, alpha, low-affinity (granulocyte-macrophage)
  Uniprot ID: P15509
  ENST ID: ENST00000501036
  CDS Start-End: 363-1166
ctctgaagggagctactcagaagcgggagtctccgagagaagaaaagcaggtggaaggagaggaagcggatgccgtggggctcttcccttctctctgaccagcaccatgcttctcctggtgacaagccttctgctctgtgagttaccacacccagcattcctcctgatcccagagaaatcggctcagtaacaacgaatgttcgtgcacatttcgtgaaatttgtctgcatgaaggagtcacatttgaggttcacgtgaatactagtcaaagaggatttcaacagaaactgctttatccaaattcaggaagggagggtaccgctgctcagaatttctcctgtttcatctacaatgcggatttaatgaactgtacctgggcgaggggtccgacggccccccgtgacgtccagtattttttgtacatacgaaactcaaagagaaggagggagatccggtgtccttattacatacaagactcaggaacccatgtgggatgtcacctggataacctgtcaggattaacgtctcgcaattactttctggttaacggaaccagccgagaaattggcatccaattctttgattcacttttggacacaaagaaaatagaacgattcaaccctcccagcaatgtcaccgtacgttgcaacacgacgcactgcctcgtacggtggaaacagcccaggacctatcagaagctgtcgtacctggactttcagtaccagctggacgtccacagaaagaatacccagcctggcacggaaaacctactgattaatgtttctggtgatttggaaaatagatacaactttccaagctctgagcccagagcaaaacacagtgtgaagatcagagctgcagacgtccgcatcttgaattggagctcctggagtgaagccattgaatttggttctgacgacgggaacctcggctctgtgtacatttatgtgctcctaatcgtgggaacccttgtctgtggcatcgtcctcggcttcctctttaaaaggttccttaggatacagcggctgttcccgccagttccacagatcaaagacaaactgaatgataaccatgaggtggaagacgagatcatctgggaggaattcaccccagaggaagggaaaggctaccgcgaagaggtcttgaccgtgaaggaaattacctgagacccagagggtgtaggaatggcatggacatctccgcctccgcgacacgggggaactgttttcttgatgatgctgtgaacctttatatcattttctatgtttttatttaaaaacatgacatttggggccaggcgcggtggctcacgcctgtaatcccagcactttgggaggccaaggcaggcggatcacctgaggtcaggagttcaagaccagcctgcccaacatggtgaaaccccatctggactaaaaatgcagaaatttacccaggcacggcggcggacgcccatcatcccagctacttgggaggctgaggcaggagaattgcttgaacccgtgaggcggaggttgtagtgagccaagatcgcaccattgcacaccaacctgcgtgacagagcaagattgcatctcaaaacaaacaataataataaataataaaaacctgatatttggctgggc

SEQ ID NO: 121679 - DNA, 489 bp, Homo sapiens
  Payload ID: 3856
  Gene Symbol: CSF2RA
  Gene Name: colony stimulating factor 2 receptor, alpha, low-affinity (granulocyte-macrophage)
  ENST ID: ENST00000494969
  CDS Start-End: 163-435
ccgagagaagaaaagcaggtggaaggagaggaagcggatgccgtggggtttacagcaggaaaatccgtggagacagcagatccgagaagcggcgatgtttgcgtagaaccctgtacgtgcttccttcggcctgtcgctcttcccttctctctgaccagcaccatgcttctcctggtgacaagccttctgctctgtgagttaccacacccagcattcctcctgatcccagagaaatcggatctgcgaacagtggcaccagcctctagtctcaatgtgaggtttgactccaggacgatgaatttaagctgggactgccaagaaaacacaaccttcagcaagtgtttcttaactgacaagaagaacagagtcgtggaacccaggatggagtttccctcttgttgcccagatcgcaccattgcacaccaacctgcgtgacagagcaagattgcatctcaaaacaaacaataataataaataataaaaacctga

SEQ ID NO: 121680 - DNA, 4087 bp, Homo sapiens
  Payload ID: 3857
  Gene Symbol: CSF2RB
  Gene Name: colony stimulating factor 2 receptor, beta, low-affinity (granulocyte-macrophage)
  ENST ID: ENST00000262825
  CDS Start-End: 218-2887
gcctagaggctccagaagaagactggtctctcccaccacacagaggcctggaggaggcagaggccaggagggagaggtcccaagagcctgtgaaatgggtctggcctggctcccagctgggcaggaacacaggacttcaggacactaaggaccctgtcatgcccatggccagcacccaccagtgctggtgcctgcctgtccagagctgaccagggagatggtgctggcccaggggctgctctccatggccctgctggccctgtgctgggagcgcagcctggcaggggcagaagaaaccatcccgctgcagaccctgcgctgctacaacgactacaccagccacatcacctgcaggtgggcagacacccaggatgcccagcggctcgtcaacgtgaccctcattcgccgggtgaatgaggacctcctggagccagtgtcctgtgacctcagtgatgacatgccctggtcagcctgcccccatccccgctgcgtgcccaggagatgtgtcattccctgccagagttttgtcgtcactgacgttgactacttctcattccaaccagacaggcctctgggcacccggctcaccgtcactctgacccagcatgtccagcctcctgagcccagggacctgcagatcagcaccgaccaggaccacttcctgctgacctggagtgtggcccttgggagtccccagagccactggttgtccccaggggatctggagtttgaggtggtctacaagcggcttcaggactcttgggaggacgcagccatcctcctctccaacacctcccaggccaccctggggccagagcacctcatgcccagcagcacctacgtggcccgagtacggacccgcctggccccaggttctcggctctcaggacgtcccagcaagtggagcccagaggtttgctgggactcccagccaggggatgaggcccagccccagaacctggagtgcttctttgacggggccgccgtgctcagctgctcctgggaggtgaggaaggaggtggccagctcggtctcctttggcctattctacaagcccagcccagatgcaggggaggaagagtgctccccagtgctgagggaggggctcggcagcctccacaccaggcaccactgccagattcccgtgcccgaccccgcgacccacggccaatacatcgtctctgttcagccaaggagggcagagaaacacataaagagctcagtgaacatccagatggcccctccatccctcaacgtgaccaaggatggagacagctacagcctgcgctgggaaacaatgaaaatgcgatacgaacacatagaccacacatttgagatccagtacaggaaagacacggccacgtggaaggacagcaagaccgagaccctccagaacgcccacagcatggccctgccagccctggagccctccaccaggtactgggccagggtgagggtcaggacctcccgcaccggctacaacgggatctggagcgagtggagtgaggcgcgctcctgggacaccgagtcggtgctgcctatgtgggtgctggccctcatcgtgatcttcctcaccatcgctgtgctcctggccctccgcttctgtggcatctacgggtacaggctgcgcagaaagtgggaggagaagatccccaaccccagcaagagccacctgttccagaacgggagcgcagagctttggcccccaggcagcatgtcggccttcactagcgggagtcccccacaccaggggccgtggggcagccgcttccctgagctggagggggtgttccctgtaggattcggggacagcgaggtgtcacctctcaccatagaggaccccaagcatgtctgtgatccaccatctgggcctgacacgactccagctgcctcagatctacccacagagcagccccccagcccccagccaggcccgcctgccgcctcccacacacctgagaaacaggcttccagctttgacttcaatgggccctacctggggccgccccacagccgctccctacctgacatcctgggccagccggagcccccacaggagggtgggagccagaagtccccacctccagggtccctggagtacctgtgtctgcctgctggggggcaggtgcaactggtccctctggcccaggcgatgggaccaggacaggccgtggaagtggagagaaggccgagccagggggctgcagggagtccctccctggagtccgggggaggccctgcccctcctgctcttgggccaagggtgggaggacaggaccaaaaggacagccctgtggctatacccatgagctctggggacactgaggaccctggagtggcctctggttatgtctcctctgcagacctggtattcaccccaaactcaggggcctcgtctgtctccctagttccctctctgggcctcccctcagaccagacccccagcttatgtcctgggctggccagtggaccccctggagccccaggccctgtgaagtcagggtttgagggctatgtggagctccctccaattgagggccggtcccccaggtcaccaaggaacaatcctgtcccccctgaggccaaaagccctgtcctgaacccaggggaacgcccggcagatgtgtccccaacatccccacagcccgagggcctccttgtcctgcagcaagtgggcgactattgcttcctccccggcctggggcccggccctctctcgctccggagtaaaccttcttccccgggacccggtcctgagatcaagaacctagaccaggcttttcaagtcaagaagcccccaggccaggctgtgccccaggtgcccgtcattcagctcttcaaagccctagttgtctcagtgatgtctgtgggacctccagtcccttgagaccccacgtcatgtagagaagttaacggcccaagtggtgggcaggctggcgggacctggggaacatcaggagaggagtccagagcccacgtctactgcggaaaagtcaggggaaactgccaaacaaaggaaaatgccccaaaggcatatatgctttagggcctttggtccaaatggcccgggtggccactcttccagatagaccaggcaactctccctcccaccggccacagatgaggggctgctgatctatgcctgggcctgcaccagggattatggttcttttaaatctttgcctttcagatacaggaaaaataatggcattaaattgctttaatttgcattattttagttatccagtttgcacatatttttataggtatcttaggcatcgattggtattttttaactgggccaagcccattaaggtctttcttctgttgggtgctatcattttctgattaagtctttttgactattgacatacagtctttcacagatggtggagtgtttttcccccaaatctgttgtttgtcttataatgttgtatatgaggttttatggtgtatgaatatgaatgcttctgtaatgtcaaacagatccctagtaaactccttcttcacttttactgtcagatttacaaaggtcctcccattgcaaagcagtgtttgtcctaatttatatattgtttttctagttcattttgtgtttccaacttttcatgtaaaattttaattatttttgaatgtgtggatgtgagactgaggtgccttttggtactgaaattctttttccatgtacctgaagtgttacttttgtgatataggaaatccttgtatatatactttattggtccctaggcttcctattttgttaccttgctttctctatggcatccaccattttgattgttctacttttatgatatgttttcataagtggttaagcaagtattctcgttacttttgctcttaaatccctattcattacagcaatgttggtggtcaaagaaaatgataaacaacttgaatgttcaatggtcctgaaatacataacaacattttagtacattgtaaagtagaatcctctgttcataatgaacaagatgaaccaatgtggattagaaagaagtccgagatattaattccaaaatatccagacattgttaaagggaaaaaattgcaataaaatatttgtaac

SEQ ID NO: 121681 - DNA, 4863 bp, Homo sapiens
  Payload ID: 3857
  Gene Symbol: CSF2RB
  Gene Name: colony stimulating factor 2 receptor, beta, low-affinity (granulocyte-macrophage)
  Uniprot ID: P32927
  ENST ID: ENST00000403662
  CDS Start-End: 223-2916
actctgcctagaggctccagaagaagactggtctctcccaccacacagaggcctggaggaggcagaggccaggagggagaggtcccaagagcctgtgaaatgggtctggcctggctcccagctgggcaggaacacaggacttcaggacactaaggaccctgtcatgcccatggccagcacccaccagtgctggtgcctgcctgtccagagctgaccagggagatggtgctggcccaggggctgctctccatggccctgctggccctgtgctgggagcgcagcctggcaggggcagaagaaaccatcccgctgcagaccctgcgctgctacaacgactacaccagccacatcacctgcaggtgggcagacacccaggatgcccagcggctcgtcaacgtgaccctcattcgccgggtgaatgaggacctcctggagccagtgtcctgtgacctcagtgatgacatgccctggtcagcctgcccccatccccgctgcgtgcccaggagatgtgtcattccctgccagagttttgtcgtcactgacgttgactacttctcattccaaccagacaggcctctgggcacccggctcaccgtcactctgacccagcatgtccagcctcctgagcccagggacctgcagatcagcaccgaccaggaccacttcctgctgacctggagtgtggcccttgggagtccccagagccactggttgtccccaggggatctggagtttgaggtggtctacaagcggcttcaggactcttgggaggacgcagccatcctcctctccaacacctcccaggccaccctggggccagagcacctcatgcccagcagcacctacgtggcccgagtacggacccgcctggccccaggttctcggctctcaggacgtcccagcaagtggagcccagaggtttgctgggactcccagccaggggatgaggcccagccccagaacctggagtgcttctttgacggggccgccgtgctcagctgctcctgggaggtgaggaaggaggtggccagctcggtctcctttggcctattctacaagcccagcccagatgcaggggaggaagagtgctccccagtgctgagggaggggctcggcagcctccacaccaggcaccactgccagattcccgtgcccgaccccgcgacccacggccaatacatcgtctctgttcagccaaggagggcagagaaacacataaagagctcagtgaacatccagatggcccctccatccctcaacgtgaccaaggatggagacagctacagcctgcgctgggaaacaatgaaaatgcgatacgaacacatagaccacacatttgagatccagtacaggaaagacacggccacgtggaaggacagcaagaccgagaccctccagaacgcccacagcatggccctgccagccctggagccctccaccaggtactgggccagggtgagggtcaggacctcccgcaccggctacaacgggatctggagcgagtggagtgaggcgcgctcctgggacaccgagtcggtgctgcctatgtgggtgctggccctcatcgtgatcttcctcaccatcgctgtgctcctggccctccgcttctgtggcatctacgggtacaggctgcgcagaaagtgggaggagaagatccccaaccccagcaagagccacctgttccagaacgggagcgcagagctttggcccccaggcagcatgtcggccttcactagcgggagtcccccacaccaggggccgtggggcagccgcttccctgagctggagggggtgttccctgtaggattcggggacagcgaggtgtcacctctcaccatagaggaccccaagcatgtctgtgatccaccatctgggcctgacacgactccagctgcctcagatctacccacagagcagccccccagcccccagccaggcccgcctgccgcctcccacacacctgagaaacaggcttccagctttgacttcaatgggccctacctggggccgccccacagccgctccctacctgacatcctgggccagccggagcccccacaggagggtgggagccagaagtccccacctccagggtccctggagtacctgtgtctgcctgctggggggcaggtgcaactggtccctctggcccaggcgatgggaccaggacaggccgtggaagtggagagaaggccgagccagggggctgcagggagtccctccctggagtccgggggaggccctgcccctcctgctcttgggccaagggtgggaggacaggaccaaaaggacagccctgtggctatacccatgagctctggggacactgaggaccctggagtggcctctggttatgtctcctctgcagacctggtattcaccccaaactcaggggcctcgtctgtctccctagttccctctctgggcctcccctcagaccagacccccagcttatgtcctgggctggccagtggaccccctggagccccaggccctgtgaagtcagggtttgagggctatgtggagctccctccaattgagggccggtcccccaggtcaccaaggaacaatcctgtcccccctgaggccaaaagccctgtcctgaacccaggggaacgcccggcagatgtgtccccaacatccccacagcccgagggcctccttgtcctgcagcaagtgggcgactattgcttcctccccggcctggggcccggccctctctcgctccggagtaaaccttcttccccgggacccggtcctgagatcaagaacctagaccaggcttttcaagtcaagaagcccccaggccaggctgtgccccaggtgcccgtcattcagctcttcaaagccctgaagcagcaggactacctgtctctgcccccttgggaggtcaacaagcctggggaggtgtgttgagacccccaggcctagacaggcaaggggatggagagggcttgccttccctcccgcctgaccttcctcagtcatttctgcaaagccaaggggcagcctcctgtcaaggtagctagaggcctgggaaaggagatagccttgctccggcccccttgaccttcagcaaatcacttctctccctgcgctcacacagacacacacacacacacgtacatgcacacatttttcctgtcaggttaacttatttgtaggttctgcattattagaactttctagatatactcattccatctccccctcatttttttaatcaggtttccttgcttttgccatttttcttccttcttttttcactgatttattatgagagtggggctgaggtctgagctgagccttatcagactgagatgcggctggttgtgttgaggacttgtgtgggctgcctgtccccggcagtcgctgatgcacatgacatgattctcatctgggtgcagaggtgggaggcaccaggtgggcacccgtgggggttagggcttggaagagtggcacaggactgggcacgctcagtgaggctcagggaattcagactagcctcgattgtcactccgagaaatgggcatggtattgggggtcgggggggcggtgcaagggacgcacatgagagactgtttgggagcttctggggagccctgctagttgtctcagtgatgtctgtgggacctccagtcccttgagaccccacgtcatgtagagaagttaacggcccaagtggtgggcaggctggcgggacctggggaacatcaggagaggagtccagagcccacgtctactgcggaaaagtcaggggaaactgccaaacaaaggaaaatgccccaaaggcatatatgctttagggcctttggtccaaatggcccgggtggccactcttccagatagaccaggcaactctccctcccaccggccacagatgaggggctgctgatctatgcctgggcctgcaccagggattatggttcttttaaatctttgcctttcagatacaggaaaaataatggcattaaattgctttaatttgcattattttagttatccagtttgcacatatttttataggtatcttaggcatcgattggtattttttaactgggccaagcccattaaggtctttcttctgttgggtgctatcattttctgattaagtctttttgactattgacatacagtctttcacagatggtggagtgtttttcccccaaatctgttgtttgtcttataatgttgtatatgaggttttatggtgtatgaatatgaatgcttctgtaatgtcaaacagatccctagtaaactccttcttcacttttactgtcagatttacaaaggtcctcccattgcaaagcagtgtttgtcctaatttatatattgtttttctagttcattttgtgtttccaacttttcatgtaaaattttaattatttttgaatgtgtggatgtgagactgaggtgccttttggtactgaaattctttttccatgtacctgaagtgttacttttgtgatataggaaatccttgtatatatactttattggtccctaggcttcctattttgttaccttgctttctctatggcatccaccattttgattgttctacttttatgatatgttttcataagtggttaagcaagtattctcgttacttttgctcttaaatccctattcattacagcaatgttggtggtcaaagaaaatgataaacaacttgaatgttcaatggtcctgaaatacataacaacattttagtacattgtaaagtagaatcctctgttcataatgaacaagatgaaccaatgtggattagaaagaagtccgagatattaattccaaaatatccagacattgttaaagggaaaaaattgcaataaaatatttgtaacataaaacaaagtgaaa

SEQ ID NO: 121682 - DNA, 2895 bp, Homo sapiens
  Payload ID: 3857
  Gene Symbol: CSF2RB
  Gene Name: colony stimulating factor 2 receptor, beta, low-affinity (granulocyte-macrophage)
  Uniprot ID: P32927
  ENST ID: ENST00000406230
  CDS Start-End: 75-2786
actaaggaccctgtcatgcccatggccagcacccaccagtgctggtgcctgcctgtccagagctgaccagggagatggtgctggcccaggggctgctctccatggccctgctggccctgtgctgggagcgcagcctggcaggggcagaagaaaccatcccgctgcagaccctgcgctgctacaacgactacaccagccacatcacctgcaggtgggcagacacccaggatgcccagcggctcgtcaacgtgaccctcattcgccgggtgaatgaggacctcctggagccagtgtcctgtgacctcagtgatgacatgccctggtcagcctgcccccatccccgctgcgtgcccaggagatgtgtcattccctgccagagttttgtcgtcactgacgttgactacttctcattccaaccagacaggcctctgggcacccggctcaccgtcactctgacccagcatgtccagcctcctgagcccagggacctgcagatcagcaccgaccaggaccacttcctgctgacctggagtgtggcccttgggagtccccagagccactggttgtccccaggggatctggagtttgaggtggtctacaagcggcttcaggactcttgggaggacgcagccatcctcctctccaacacctcccaggccaccctggggccagagcacctcatgcccagcagcacctacgtggcccgagtacggacccgcctggccccaggttctcggctctcaggacgtcccagcaagtggagcccagaggtttgctgggactcccagccaggggatgaggcccagccccagaacctggagtgcttctttgacggggccgccgtgctcagctgctcctgggaggtgaggaaggaggtggccagctcggtctcctttggcctattctacaagcccagcccagatgcaggctctgctgtgctcctcagggaggaagagtgctccccagtgctgagggaggggctcggcagcctccacaccaggcaccactgccagattcccgtgcccgaccccgcgacccacggccaatacatcgtctctgttcagccaaggagggcagagaaacacataaagagctcagtgaacatccagatggcccctccatccctcaacgtgaccaaggatggagacagctacagcctgcgctgggaaacaatgaaaatgcgatacgaacacatagaccacacatttgagatccagtacaggaaagacacggccacgtggaaggacagcaagaccgagaccctccagaacgcccacagcatggccctgccagccctggagccctccaccaggtactgggccagggtgagggtcaggacctcccgcaccggctacaacgggatctggagcgagtggagtgaggcgcgctcctgggacaccgagtcggtgctgcctatgtgggtgctggccctcatcgtgatcttcctcaccatcgctgtgctcctggccctccgcttctgtggcatctacgggtacaggctgcgcagaaagtgggaggagaagatccccaaccccagcaagagccacctgttccagaacgggagcgcagagctttggcccccaggcagcatgtcggccttcactagcgggagtcccccacaccaggggccgtggggcagccgcttccctgagctggagggggtgttccctgtaggattcggggacagcgaggtgtcacctctcaccatagaggaccccaagcatgtctgtgatccaccatctgggcctgacacgactccagctgcctcagatctacccacagagcagccccccagcccccagccaggcccgcctgccgcctcccacacacctgagaaacaggcttccagctttgacttcaatgggccctacctggggccgccccacagccgctccctacctgacatcctgggccagccggagcccccacaggagggtgggagccagaagtccccacctccagggtccctggagtacctgtgtctgcctgctggggggcaggtgcaactggtccctctggcccaggcgatgggaccaggacaggccgtggaagtggagagaaggccgagccagggggctgcagggagtccctccctggagtccgggggaggccctgcccctcctgctcttgggccaagggtgggaggacaggaccaaaaggacagccctgtggctatacccatgagctctggggacactgaggaccctggagtggcctctggttatgtctcctctgcagacctggtattcaccccaaactcaggggcctcgtctgtctccctagttccctctctgggcctcccctcagaccagacccccagcttatgtcctgggctggccagtggaccccctggagccccaggccctgtgaagtcagggtttgagggctatgtggagctccctccaattgagggccggtcccccaggtcaccaaggaacaatcctgtcccccctgaggccaaaagccctgtcctgaacccaggggaacgcccggcagatgtgtccccaacatccccacagcccgagggcctccttgtcctgcagcaagtgggcgactattgcttcctccccggcctggggcccggccctctctcgctccggagtaaaccttcttccccgggacccggtcctgagatcaagaacctagaccaggcttttcaagtcaagaagcccccaggccaggctgtgccccaggtgcccgtcattcagctcttcaaagccctgaagcagcaggactacctgtctctgcccccttgggaggtcaacaagcctggggaggtgtgttgagacccccaggcctagacaggcaaggggatggagagggcttgccttccctcccgcctgaccttcctcagtcatttctgcaaagccaaggggcagcctcctgtcaaggtag

SEQ ID NO: 121683 - DNA, 969 bp, Homo sapiens
  Payload ID: 3857
  Gene Symbol: CSF2RB
  Gene Name: colony stimulating factor 2 receptor, beta, low-affinity (granulocyte-macrophage)
  ENST ID: ENST00000421539
  CDS Start-End: 284-969
ggttcccacctccgggactttgctcctgcagggccttggctggggttctctccctgcttcagccgctagcaccctccttgtgcctgaagcccgcactgggatgctcctgggctcttgagaaaccatcccgctgcagaccctgcgctgctacaacgactacaccagccacatcacctgcaggtgggcagacacccaggatgcccagcggctcgtcaacgtgaccctcattcgccgggtgaatgaggacctcctggagccagtgtcctgtgacctcagtgatgacatgccctggtcagcctgcccccatccccgctgcgtgcccaggagatgtgtcattccctgccagagttttgtcgtcactgacgttgactacttctcattccaaccagacaggcctctgggcacccggctcaccgtcactctgacccagcatgtccagcctcctgagcccagggacctgcagatcagcaccgaccaggaccacttcctgctgacctggagtgtggcccttgggagtccccagagccactggttgtccccaggggatctggagtttgaggtggtctacaagcggcttcaggactcttgggaggacgcagccatcctcctctccaacacctcccaggccaccctggggccagagcacctcatgcccagcagcacctacgtggcccgagtacggacccgcctggccccaggttctcggctctcaggacgtcccagcaagtggagcccagaggtttgctgggactcccagccaggggatgaggcccagccccagaacctggagtgcttctttgacggggccgccgtgctcagctgctcctgggaggtgaggaaggaggtggccagctcggtctcctttggcctattctacaagcccagcccagatgcaggggaggaagagtgctccccagtgctgagggaggggctcggcagcctccacaccaggcaccactgccagattcc

SEQ ID NO: 121684 - DNA, 1509 bp, Homo sapiens
  Payload ID: 3858
  Gene Symbol: CSF3
  Gene Name: colony stimulating factor 3 (granulocyte)
  Uniprot ID: P09919
  ENST ID: ENST00000225474
  CDS Start-End: 32-655
cggagcctgcagcccagccccacccagacccatggctggacctgccacccagagccccatgaagctgatggccctgcagctgctgctgtggcacagtgcactctggacagtgcaggaagccacccccctgggccctgccagctccctgccccagagcttcctgctcaagtgcttagagcaagtgaggaagatccagggcgatggcgcagcgctccaggagaagctggtgagtgagtgtgccacctacaagctgtgccaccccgaggagctggtgctgctcggacactctctgggcatcccctgggctcccctgagcagctgccccagccaggccctgcagctggcaggctgcttgagccaactccatagcggccttttcctctaccaggggctcctgcaggccctggaagggatctcccccgagttgggtcccaccttggacacactgcagctggacgtcgccgactttgccaccaccatctggcagcagatggaagaactgggaatggcccctgccctgcagcccacccagggtgccatgccggccttcgcctctgctttccagcgccgggcaggaggggtcctggttgcctcccatctgcagagcttcctggaggtgtcgtaccgcgttctacgccaccttgcccagccctgagccaagccctccccatcccatgtatttatctctatttaatatttatgtctatttaagcctcatatttaaagacagggaagagcagaacggagccccaggcctctgtgtccttccctgcatttctgagtttcattctcctgcctgtagcagtgagaaaaagctcctgtcctcccatcccctggactgggaggtagataggtaaataccaagtatttattactatgactgctccccagccctggctctgcaatgggcactgggatgagccgctgtgagcccctggtcctgagggtccccacctgggacccttgagagtatcaggtctcccacgtgggagacaagaaatccctgtttaatatttaaacagcagtgttccccatctgggtccttgcacccctcactctggcctcagccgactgcacagcggcccctgcatccccttggctgtgaggcccctggacaagcagaggtggccagagctgggaggcatggccctggggtcccacgaatttgctggggaatctcgtttttcttcttaagacttttgggacatggtttgactcccgaacatcaccgacgcgtctcctgtttttctgggtggcctcgggacacctgccctgcccccacgagggtcaggactgtgactctttttagggccaggcaggtgcctggacatttgccttgctggacggggactggggatgtgggagggagcagacaggaggaatcatgtcaggcctgtgtgtgaaaggaagctccactgtcaccctccacctcttcaccccccactcaccagtgtcccctccactgtcacattgtaactgaacttcaggataataaagtgtttgcctcca

SEQ ID NO: 121685 - DNA, 1673 bp, Homo sapiens
  Payload ID: 3858
  Gene Symbol: CSF3
  Gene Name: colony stimulating factor 3 (granulocyte)
  ENST ID: ENST00000331769
  CDS Start-End: 217-819
agcctgcagcccagccccacccagacccatggctggacctgccacccagagccccatgaagctgatgggtgagtgtcttggcccaggatgggagagccgcctgccctggcatgggagggaggctggtgtgacagaggggctggggatccccgttctgggaatggggattaaaggcacccagtgtccccgagagggcctcaggtggtagggaacagcatgtctcctgagcccgctctgtccccagccctgcagctgctgctgtggcacagtgcactctggacagtgcaggaagccacccccctgggccctgccagctccctgccccagagcttcctgctcaagtgcttagagcaagtgaggaagatccagggcgatggcgcagcgctccaggagaagctgtgtgccacctacaagctgtgccaccccgaggagctggtgctgctcggacactctctgggcatcccctgggctcccctgagcagctgccccagccaggccctgcagctggcaggctgcttgagccaactccatagcggccttttcctctaccaggggctcctgcaggccctggaagggatctcccccgagttgggtcccaccttggacacactgcagctggacgtcgccgactttgccaccaccatctggcagcagatggaagaactgggaatggcccctgccctgcagcccacccagggtgccatgccggccttcgcctctgctttccagcgccgggcaggaggggtcctggttgcctcccatctgcagagcttcctggaggtgtcgtaccgcgttctacgccaccttgcccagccctgagccaagccctccccatcccatgtatttatctctatttaatatttatgtctatttaagcctcatatttaaagacagggaagagcagaacggagccccaggcctctgtgtccttccctgcatttctgagtttcattctcctgcctgtagcagtgagaaaaagctcctgtcctcccatcccctggactgggaggtagataggtaaataccaagtatttattactatgactgctccccagccctggctctgcaatgggcactgggatgagccgctgtgagcccctggtcctgagggtccccacctgggacccttgagagtatcaggtctcccacgtgggagacaagaaatccctgtttaatatttaaacagcagtgttccccatctgggtccttgcacccctcactctggcctcagccgactgcacagcggcccctgcatccccttggctgtgaggcccctggacaagcagaggtggccagagctgggaggcatggccctggggtcccacgaatttgctggggaatctcgtttttcttcttaagacttttgggacatggtttgactcccgaacatcaccgacgcgtctcctgtttttctgggtggcctcgggacacctgccctgcccccacgagggtcaggactgtgactctttttagggccaggcaggtgcctggacatttgccttgctggacggggactggggatgtgggagggagcagacaggaggaatcatgtcaggcctgtgtgtgaaaggaagctccactgtcaccctccacctcttcaccccccactcaccagtgtcccctccactgtcacattgtaactgaacttcaggataataaagtgtttgcctcca

SEQ ID NO: 121686 - DNA, 622 bp, Homo sapiens
  Payload ID: 3858
  Gene Symbol: CSF3
  Gene Name: colony stimulating factor 3 (granulocyte)
  Uniprot ID: P09919
  ENST ID: ENST00000394148
  CDS Start-End: 9-524
ccagacccatggctggacctgccacccagagccccatgaagctgatggccctgcagctgctgctgtggcacagtgcactctggacagtgcaggaagccacccccctgggccctgccagctccctgccccagagcttcctgctcaagtgcttagagcaagtgaggaagatccagggcgatggcgcagcgctccaggagaagctggtgagtgaggcaggctgcttgagccaactccatagcggccttttcctctaccaggggctcctgcaggccctggaagggatctcccccgagttgggtcccaccttggacacactgcagctggacgtcgccgactttgccaccaccatctggcagcagatggaagaactgggaatggcccctgccctgcagcccacccagggtgccatgccggccttcgcctctgctttccagcgccgggcaggaggggtcctggttgcctcccatctgcagagcttcctggaggtgtcgtaccgcgttctacgccaccttgcccagccctgagccaagccctccccatcccatgtatttatctctatttaatatttatgtctatttaagcctcatatttaaagacagggaagagcagaacggagccccag

SEQ ID NO: 121687 - DNA, 1583 bp, Homo sapiens
  Payload ID: 3858
  Gene Symbol: CSF3
  Gene Name: colony stimulating factor 3 (granulocyte)
  Uniprot ID: P09919
  ENST ID: ENST00000394149
  CDS Start-End: 115-729
agtcgtggccccaggtaatttcctcccaggcctccatggggttatgtataaaggcccccctagagctgggccccaaaacagcccggagcctgcagcccagccccacccagacccatggctggacctgccacccagagccccatgaagctgatggccctgcagctgctgctgtggcacagtgcactctggacagtgcaggaagccacccccctgggccctgccagctccctgccccagagcttcctgctcaagtgcttagagcaagtgaggaagatccagggcgatggcgcagcgctccaggagaagctgtgtgccacctacaagctgtgccaccccgaggagctggtgctgctcggacactctctgggcatcccctgggctcccctgagcagctgccccagccaggccctgcagctggcaggctgcttgagccaactccatagcggccttttcctctaccaggggctcctgcaggccctggaagggatctcccccgagttgggtcccaccttggacacactgcagctggacgtcgccgactttgccaccaccatctggcagcagatggaagaactgggaatggcccctgccctgcagcccacccagggtgccatgccggccttcgcctctgctttccagcgccgggcaggaggggtcctggttgcctcccatctgcagagcttcctggaggtgtcgtaccgcgttctacgccaccttgcccagccctgagccaagccctccccatcccatgtatttatctctatttaatatttatgtctatttaagcctcatatttaaagacagggaagagcagaacggagccccaggcctctgtgtccttccctgcatttctgagtttcattctcctgcctgtagcagtgagaaaaagctcctgtcctcccatcccctggactgggaggtagataggtaaataccaagtatttattactatgactgctccccagccctggctctgcaatgggcactgggatgagccgctgtgagcccctggtcctgagggtccccacctgggacccttgagagtatcaggtctcccacgtgggagacaagaaatccctgtttaatatttaaacagcagtgttccccatctgggtccttgcacccctcactctggcctcagccgactgcacagcggcccctgcatccccttggctgtgaggcccctggacaagcagaggtggccagagctgggaggcatggccctggggtcccacgaatttgctggggaatctcgtttttcttcttaagacttttgggacatggtttgactcccgaacatcaccgacgcgtctcctgtttttctgggtggcctcgggacacctgccctgcccccacgagggtcaggactgtgactctttttagggccaggcaggtgcctggacatttgccttgctggacggggactggggatgtgggagggagcagacaggaggaatcatgtcaggcctgtgtgtgaaaggaagctccactgtcaccctccacctcttcaccccccactcaccagtgtcccctccactgtcacattgtaactgaacttcaggataataaagtgtttgcctcca

SEQ ID NO: 121688 - DNA, 1360 bp, Homo sapiens
  Payload ID: 3858
  Gene Symbol: CSF3
  Gene Name: colony stimulating factor 3 (granulocyte)
  ENST ID: ENST00000577675
  CDS Start-End: 177-671
gccacccagagccccatgaagctgatgggtgagtgtcttggcccaggatgggagagccgcctgccctggcatgggagggaggctggtgtgacagaggggctggggatccccgttctgggaatggggattaaaggcacccagtgtccccgagagggcctcaggtggtagggaacagcatgtctcctgagcccgctctgtccccagccctgcagctgctgctgtggcacagtgcactctggacagtgcaggaagccacccccctgggccctgccagctccctgccccagagcttcctgctcaagtgcttagagcaagtgaggaagatccagggcgatggcgcagcgctccaggagaagctggcaggctgcttgagccaactccatagcggccttttcctctaccaggggctcctgcaggccctggaagggatctcccccgagttgggtcccaccttggacacactgcagctggacgtcgccgactttgccaccaccatctggcagcagatggaagaactgggaatggcccctgccctgcagcccacccagggtgccatgccggccttcgcctctgctttccagcgccgggcaggaggggtcctggttgcctcccatctgcagagcttcctggaggtgtcgtaccgcgttctacgccaccttgcccagccctgagccaagccctccccatcccatgtatttatctctatttaatatttatgtctatttaagcctcatatttaaagacagggaagagcagaacggagccccaggcctctgtgtccttccctgcatttctgagtttcattctcctgcctgtagcagtgagaaaaagctcctgtcctcccatcccctggactgggaggtagataggtaaataccaagtatttattactatgactgctccccagccctggctctgcaatgggcactgggatgagccgctgtgagcccctggtcctgagggtccccacctgggacccttgagagtatcaggtctcccacgtgggagacaagaaatccctgtttaatatttaaacagcagtgttccccatctgggtccttgcacccctcactctggcctcagccgactgcacagcggcccctgcatccccttggctgtgaggcccctggacaagcagaggtggccagagctgggaggcatggccctggggtcccacgaatttgctggggaatctcgtttttcttcttaagacttttgggacatggtttgactcccgaacatcaccgacgcgtctcctgtttttctgggtggcctcgggacacctgccctgcccccacgagggtcaggactgtgactctttttagggccaggcaggtgcctggacatttgccttgctgga

SEQ ID NO: 121689 - DNA, 1288 bp, Homo sapiens
  Payload ID: 3858
  Gene Symbol: CSF3
  Gene Name: colony stimulating factor 3 (granulocyte)
  ENST ID: ENST00000579852
  CDS Start-End: 30-203
gagcctgcagcccagccccacccagacccatggctggacctgccacccagagccccatgaagctgatggtgtgccacctacaagctgtgccaccccgaggagctggtgctgctcggacactctctgggcatcccctgggctcccctgagcagctgccccagccaggccctgcagctggcaggctgcttgagccaactccatagcggccttttcctctaccaggggctcctgcaggccctggaagggatctcccccgagttgggtcccaccttggacacactgcagctggacgtcgccgactttgccaccaccatctggcagcagatggaagaactgggaatggcccctgccctgcagcccacccagggtgccatgccggccttcgcctctgctttccagcgccgggcaggaggggtcctggttgcctcccatctgcagagcttcctggaggtgtcgtaccgcgttctacgccaccttgcccagccctgagccaagccctccccatcccatgtatttatctctatttaatatttatgtctatttaagcctcatatttaaagacagggaagagcagaacggagccccaggcctctgtgtccttccctgcatttctgagtttcattctcctgcctgtagcagtgagaaaaagctcctgtcctcccatcccctggactgggaggtagataggtaaataccaagtatttattactatgactgctccccagccctggctctgcaatgggcactgggatgagccgctgtgagcccctggtcctgagggtccccacctgggacccttgagagtatcaggtctcccacgtgggagacaagaaatccctgtttaatatttaaacagcagtgttccccatctgggtccttgcacccctcactctggcctcagccgactgcacagcggcccctgcatccccttggctgtgaggcccctggacaagcagaggtggccagagctgggaggcatggccctggggtcccacgaatttgctggggaatctcgtttttcttcttaagacttttgggacatggtttgactcccgaacatcaccgacgcgtctcctgtttttctgggtggcctcgggacacctgccctgcccccacgagggtcaggactgtgactctttttagggccaggcaggtgcctggacatttgccttgctggacggggactggggatgtgggagggagcagacaggaggaatcatgtcaggcctgtgtgtgaaaggaagctccactgtcaccctccacctcttcaccccccactcaccagtgt

SEQ ID NO: 121690 - DNA, 579 bp, Homo sapiens
  Payload ID: 3858
  Gene Symbol: CSF3
  Gene Name: colony stimulating factor 3 (granulocyte)
  ENST ID: ENST00000583218
  CDS Start-End: 115-579
agtcgtggccccaggtaatttcctcccaggcctccatggggttatgtataaaggcccccctagagctgggccccaaaacagcccggagcctgcagcccagccccacccagacccatggctggacctgccacccagagccccatgaagctgatggccctgcagctgctgctgtggcacagtgcactctggacagtgcaggaagccacccccctgggccctgccagctccctgccccagagcttcctgctcaagtgcttagagcaagtgaggaagatccagggcgatggcgcagcgctccaggagaagctggcaggctgcttgagccaactccatagcggccttttcctctaccaggggctcctgcaggccctggaagggatctcccccgagttgggtcccaccttggacacactgcagctggacgtcgccgactttgccaccaccatctggcagcagatggaagaactgggaatggcccctgccctgcagcccacccagggtgccatgccggccttcgcctctgctttccagcgccgggcaggaggggtcctggttgcctcccatctgcagagcttcctg

SEQ ID NO: 121691 - DNA, 2375 bp, Homo sapiens
  Payload ID: 3859
  Gene Symbol: CSF3R
  Gene Name: colony stimulating factor 3 receptor (granulocyte)
  Uniprot ID: Q99062
  ENST ID: ENST00000331941
  CDS Start-End: 24-2375
caggtgaacatcaagttggtgctatggcaaggctgggaaactgcagcctgacttgggctgccctgatcatcctgctgctccccggaagtctggaggagtgcgggcacatcagtgtctcagcccccatcgtccacctgggggatcccatcacagcctcctgcatcatcaagcagaactgcagccatctggacccggagccacagattctgtggagactgggagcagagcttcagcccgggggcaggcagcagcgtctgtctgatgggacccaggaatctatcatcaccctgccccacctcaaccacactcaggcctttctctcctgctgcctgaactggggcaacagcctgcagatcctggaccaggttgagctgcgcgcaggctaccctccagccataccccacaacctctcctgcctcatgaacctcacaaccagcagcctcatctgccagtgggagccaggacctgagacccacctacccaccagcttcactctgaagagtttcaagagccggggcaactgtcagacccaaggggactccatcctggactgcgtgcccaaggacgggcagagccactgctgcatcccacgcaaacacctgctgttgtaccagaatatgggcatctgggtgcaggcagagaatgcgctggggaccagcatgtccccacaactgtgtcttgatcccatggatgttgtgaaactggagccccccatgctgcggaccatggaccccagccctgaagcggcccctccccaggcaggctgcctacagctgtgctgggagccatggcagccaggcctgcacataaatcagaagtgtgagctgcgccacaagccgcagcgtggagaagccagctgggcactggtgggccccctccccttggaggcccttcagtatgagctctgcgggctcctcccagccacggcctacaccctgcagatacgctgcatccgctggcccctgcctggccactggagcgactggagccccagcctggagctgagaactaccgaacgggcccccactgtcagactggacacatggtggcggcagaggcagctggaccccaggacagtgcagctgttctggaagccagtgcccctggaggaagacagcggacggatccaaggttatgtggtttcttggagaccctcaggccaggctggggccatcctgcccctctgcaacaccacagagctcagctgcaccttccacctgccttcagaagcccaggaggtggcccttgtggcctataactcagccgggacctctcgtcccactccggtggtcttctcagaaagcagaggcccagctctgaccagactccatgccatggcccgagaccctcacagcctctgggtaggctgggagccccccaatccatggcctcagggctatgtgattgagtggggcctgggcccccccagcgcgagcaatagcaacaagacctggaggatggaacagaatgggagagccacggggtttctgctgaaggagaacatcaggccctttcagctctatgagatcatcgtgactcccttgtaccaggacaccatgggaccctcccagcatgtctatgcctactctcaagaaatggctccctcccatgccccagagctgcatctaaagcacattggcaagacctgggcacagctggagtgggtgcctgagccccctgagctggggaagagcccccttacccactacaccatcttctggaccaacgctcagaaccagtccttctccgccatcctgaatgcctcctcccgtggctttgtcctccatggcctggagcccgccagtctgtatcacatccacctcatggctgccagccaggctggggccaccaacagtacagtcctcaccctgatgaccttgaccccagaggggtcggagctacacatcatcctgggcctgttcggcctcctgctgttgctcacctgcctctgtggaactgcctggctctgttgcagccccaacaggaagaatcccctctggccaagtgtcccagacccagctcacagcagcctgggctcctgggtgcccacaatcatggaggaggatgccttccagctgcccggccttggcacgccacccatcaccaagctcacagtgctggaggaggatgaaaagaagccggtgccctgggagtcccataacagctcagagacctgtggcctccccactctggtccagacctatgtgctccagggggacccaagagcagtttccacccagccccaatcccagtctggcaccagcgatcaggctgggcctcccaggcgatctgcatactttaaggaccagatcatgctccatccagccccacccaatggccttttgtgcttgtttcctataacttcagtattgtaa

SEQ ID NO: 121692 - DNA, 2847 bp, Homo sapiens
  Payload ID: 3859
  Gene Symbol: CSF3R
  Gene Name: colony stimulating factor 3 receptor (granulocyte)
  Uniprot ID: Q99062
  ENST ID: ENST00000361632
  CDS Start-End: 24-2534
caggtgaacatcaagttggtgctatggcaaggctgggaaactgcagcctgacttgggctgccctgatcatcctgctgctccccggaagtctggaggagtgcgggcacatcagtgtctcagcccccatcgtccacctgggggatcccatcacagcctcctgcatcatcaagcagaactgcagccatctggacccggagccacagattctgtggagactgggagcagagcttcagcccgggggcaggcagcagcgtctgtctgatgggacccaggaatctatcatcaccctgccccacctcaaccacactcaggcctttctctcctgctgcctgaactggggcaacagcctgcagatcctggaccaggttgagctgcgcgcaggctaccctccagccataccccacaacctctcctgcctcatgaacctcacaaccagcagcctcatctgccagtgggagccaggacctgagacccacctacccaccagcttcactctgaagagtttcaagagccggggcaactgtcagacccaaggggactccatcctggactgcgtgcccaaggacgggcagagccactgctgcatcccacgcaaacacctgctgttgtaccagaatatgggcatctgggtgcaggcagagaatgcgctggggaccagcatgtccccacaactgtgtcttgatcccatggatgttgtgaaactggagccccccatgctgcggaccatggaccccagccctgaagcggcccctccccaggcaggctgcctacagctgtgctgggagccatggcagccaggcctgcacataaatcagaagtgtgagctgcgccacaagccgcagcgtggagaagccagctgggcactggtgggccccctccccttggaggcccttcagtatgagctctgcgggctcctcccagccacggcctacaccctgcagatacgctgcatccgctggcccctgcctggccactggagcgactggagccccagcctggagctgagaactaccgaacgggcccccactgtcagactggacacatggtggcggcagaggcagctggaccccaggacagtgcagctgttctggaagccagtgcccctggaggaagacagcggacggatccaaggttatgtggtttcttggagaccctcaggccaggctggggccatcctgcccctctgcaacaccacagagctcagctgcaccttccacctgccttcagaagcccaggaggtggcccttgtggcctataactcagccgggacctctcgtcccactccggtggtcttctcagaaagcagaggcccagctctgaccagactccatgccatggcccgagaccctcacagcctctgggtaggctgggagccccccaatccatggcctcagggctatgtgattgagtggggcctgggcccccccagcgcgagcaatagcaacaagacctggaggatggaacagaatgggagagccacggggtttctgctgaaggagaacatcaggccctttcagctctatgagatcatcgtgactcccttgtaccaggacaccatgggaccctcccagcatgtctatgcctactctcaagaaatggctccctcccatgccccagagctgcatctaaagcacattggcaagacctgggcacagctggagtgggtgcctgagccccctgagctggggaagagcccccttacccactacaccatcttctggaccaacgctcagaaccagtccttctccgccatcctgaatgcctcctcccgtggctttgtcctccatggcctggagcccgccagtctgtatcacatccacctcatggctgccagccaggctggggccaccaacagtacagtcctcaccctgatgaccttgaccccagaggggtcggagctacacatcatcctgggcctgttcggcctcctgctgttgctcacctgcctctgtggaactgcctggctctgttgcagccccaacaggaagaatcccctctggccaagtgtcccagacccagctcacagcagcctgggctcctgggtgcccacaatcatggaggaggatgccttccagctgcccggccttggcacgccacccatcaccaagctcacagtgctggaggaggatgaaaagaagccggtgccctgggagtcccataacagctcagagacctgtggcctccccactctggtccagacctatgtgctccagggggacccaagagcagtttccacccagccccaatcccagtctggcaccagcgatcaggtcctttatgggcagctgctgggcagccccacaagcccagggccagggcactatctccgctgtgactccactcagcccctcttggcgggcctcacccccagccccaagtcctatgagaacctctggttccaggccagccccttggggaccctggtaaccccagccccaagccaggaggacgactgtgtctttgggccactgctcaacttccccctcctgcaggggatccgggtccatgggatggaggcgctggggagcttctagggcttcctggggttcccttcttgggcctgcctcttaaaggcctgagctagctggagaagaggggagggtccataagcccatgactaaaaactaccccagcccaggctctcaccatctccagtcaccagcatctccctctcctcccaatctccataggctgggcctcccaggcgatctgcatactttaaggaccagatcatgctccatccagccccacccaatggccttttgtgcttgtttcctataacttcagtattgtaaactagtttttggtttgcagtttttgttgttgtttatagacactcttgggtgt

SEQ ID NO: 121693 - DNA, 3454 bp, Homo sapiens
  Payload ID: 3859
  Gene Symbol: CSF3R
  Gene Name: colony stimulating factor 3 receptor (granulocyte)
  Uniprot ID: Q99062
  ENST ID: ENST00000373103
  CDS Start-End: 549-3140
gaaaagaggcttagggccgggtgagccttccagccagggcctgcctccaagtgatgctcccccagggcagggggcataaggatggcacccagccaggtgggagcctgggccctgcccagcctcaaagctttgagctcaggaaatccggaggcaggggagggggacatcgttgccacattccccagccctttaagacccccaaggcaggaaggctgcccgggcctcaccagcttccctcacaggctccttcctgggaggaaggggctgcctgtgccctcgaaggcgcaagggagggcaggagggaggctcggaaggtgttgcaatccccagcccccgggcctgtcagaggctgagccattaacgacagagctcggggagagaagctggactgcagctggtttcaggaacttctcttgacgagaagagagaccaaggaggccaagcaggggctgggccagaggtgccaacatggggaaactgaggctcggctcggaaaggtgaagtaacttgtccaagatcacaaagctggtgaacatcaagttggtgctatggcaaggctgggaaactgcagcctgacttgggctgccctgatcatcctgctgctccccggaagtctggaggagtgcgggcacatcagtgtctcagcccccatcgtccacctgggggatcccatcacagcctcctgcatcatcaagcagaactgcagccatctggacccggagccacagattctgtggagactgggagcagagcttcagcccgggggcaggcagcagcgtctgtctgatgggacccaggaatctatcatcaccctgccccacctcaaccacactcaggcctttctctcctgctgcctgaactggggcaacagcctgcagatcctggaccaggttgagctgcgcgcaggctaccctccagccataccccacaacctctcctgcctcatgaacctcacaaccagcagcctcatctgccagtgggagccaggacctgagacccacctacccaccagcttcactctgaagagtttcaagagccggggcaactgtcagacccaaggggactccatcctggactgcgtgcccaaggacgggcagagccactgctgcatcccacgcaaacacctgctgttgtaccagaatatgggcatctgggtgcaggcagagaatgcgctggggaccagcatgtccccacaactgtgtcttgatcccatggatgttgtgaaactggagccccccatgctgcggaccatggaccccagccctgaagcggcccctccccaggcaggctgcctacagctgtgctgggagccatggcagccaggcctgcacataaatcagaagtgtgagctgcgccacaagccgcagcgtggagaagccagctgggcactggtgggccccctccccttggaggcccttcagtatgagctctgcgggctcctcccagccacggcctacaccctgcagatacgctgcatccgctggcccctgcctggccactggagcgactggagccccagcctggagctgagaactaccgaacgggcccccactgtcagactggacacatggtggcggcagaggcagctggaccccaggacagtgcagctgttctggaagccagtgcccctggaggaagacagcggacggatccaaggttatgtggtttcttggagaccctcaggccaggctggggccatcctgcccctctgcaacaccacagagctcagctgcaccttccacctgccttcagaagcccaggaggtggcccttgtggcctataactcagccgggacctctcgtcccactccggtggtcttctcagaaagcagaggcccagctctgaccagactccatgccatggcccgagaccctcacagcctctgggtaggctgggagccccccaatccatggcctcagggctatgtgattgagtggggcctgggcccccccagcgcgagcaatagcaacaagacctggaggatggaacagaatgggagagccacggggtttctgctgaaggagaacatcaggccctttcagctctatgagatcatcgtgactcccttgtaccaggacaccatgggaccctcccagcatgtctatgcctactctcaagaaatggctccctcccatgccccagagctgcatctaaagcacattggcaagacctgggcacagctggagtgggtgcctgagccccctgagctggggaagagcccccttacccactacaccatcttctggaccaacgctcagaaccagtccttctccgccatcctgaatgcctcctcccgtggctttgtcctccatggcctggagcccgccagtctgtatcacatccacctcatggctgccagccaggctggggccaccaacagtacagtcctcaccctgatgaccttgaccccagaggggtcggagctacacatcatcctgggcctgttcggcctcctgctgttgctcacctgcctctgtggaactgcctggctctgttgcagccccaacaggaagaatcccctctggccaagtgtcccagacccagctcacagcagcctgggctcctgggtgcccacaatcatggaggagctgcccggacccagacagggacagtggctggggcagacatctgaaatgagccgtgctctcaccccacatccttgtgtgcaggatgccttccagctgcccggccttggcacgccacccatcaccaagctcacagtgctggaggaggatgaaaagaagccggtgccctgggagtcccataacagctcagagacctgtggcctccccactctggtccagacctatgtgctccagggggacccaagagcagtttccacccagccccaatcccagtctggcaccagcgatcaggtcctttatgggcagctgctgggcagccccacaagcccagggccagggcactatctccgctgtgactccactcagcccctcttggcgggcctcacccccagccccaagtcctatgagaacctctggttccaggccagccccttggggaccctggtaaccccagccccaagccaggaggacgactgtgtctttgggccactgctcaacttccccctcctgcaggggatccgggtccatgggatggaggcgctggggagcttctagggcttcctggggttcccttcttgggcctgcctcttaaaggcctgagctagctggagaagaggggagggtccataagcccatgactaaaaactaccccagcccaggctctcaccatctccagtcaccagcatctccctctcctcccaatctccataggctgggcctcccaggcgatctgcatactttaaggaccagatcatgctccatccagccccacccaatggccttttgtgcttgtttcctataacttcagtattgtaaactagtttttggtttgcagtttttgttgttgtttatagacactcttgggtgta

SEQ ID NO: 121694 - DNA, 2953 bp, Homo sapiens
  Payload ID: 3859
  Gene Symbol: CSF3R
  Gene Name: colony stimulating factor 3 receptor (granulocyte)
  Uniprot ID: Q99062
  ENST ID: ENST00000373104
  CDS Start-End: 549-2900
gaaaagaggcttagggccgggtgagccttccagccagggcctgcctccaagtgatgctcccccagggcagggggcataaggatggcacccagccaggtgggagcctgggccctgcccagcctcaaagctttgagctcaggaaatccggaggcaggggagggggacatcgttgccacattccccagccctttaagacccccaaggcaggaaggctgcccgggcctcaccagcttccctcacaggctccttcctgggaggaaggggctgcctgtgccctcgaaggcgcaagggagggcaggagggaggctcggaaggtgttgcaatccccagcccccgggcctgtcagaggctgagccattaacgacagagctcggggagagaagctggactgcagctggtttcaggaacttctcttgacgagaagagagaccaaggaggccaagcaggggctgggccagaggtgccaacatggggaaactgaggctcggctcggaaaggtgaagtaacttgtccaagatcacaaagctggtgaacatcaagttggtgctatggcaaggctgggaaactgcagcctgacttgggctgccctgatcatcctgctgctccccggaagtctggaggagtgcgggcacatcagtgtctcagcccccatcgtccacctgggggatcccatcacagcctcctgcatcatcaagcagaactgcagccatctggacccggagccacagattctgtggagactgggagcagagcttcagcccgggggcaggcagcagcgtctgtctgatgggacccaggaatctatcatcaccctgccccacctcaaccacactcaggcctttctctcctgctgcctgaactggggcaacagcctgcagatcctggaccaggttgagctgcgcgcaggctaccctccagccataccccacaacctctcctgcctcatgaacctcacaaccagcagcctcatctgccagtgggagccaggacctgagacccacctacccaccagcttcactctgaagagtttcaagagccggggcaactgtcagacccaaggggactccatcctggactgcgtgcccaaggacgggcagagccactgctgcatcccacgcaaacacctgctgttgtaccagaatatgggcatctgggtgcaggcagagaatgcgctggggaccagcatgtccccacaactgtgtcttgatcccatggatgttgtgaaactggagccccccatgctgcggaccatggaccccagccctgaagcggcccctccccaggcaggctgcctacagctgtgctgggagccatggcagccaggcctgcacataaatcagaagtgtgagctgcgccacaagccgcagcgtggagaagccagctgggcactggtgggccccctccccttggaggcccttcagtatgagctctgcgggctcctcccagccacggcctacaccctgcagatacgctgcatccgctggcccctgcctggccactggagcgactggagccccagcctggagctgagaactaccgaacgggcccccactgtcagactggacacatggtggcggcagaggcagctggaccccaggacagtgcagctgttctggaagccagtgcccctggaggaagacagcggacggatccaaggttatgtggtttcttggagaccctcaggccaggctggggccatcctgcccctctgcaacaccacagagctcagctgcaccttccacctgccttcagaagcccaggaggtggcccttgtggcctataactcagccgggacctctcgtcccactccggtggtcttctcagaaagcagaggcccagctctgaccagactccatgccatggcccgagaccctcacagcctctgggtaggctgggagccccccaatccatggcctcagggctatgtgattgagtggggcctgggcccccccagcgcgagcaatagcaacaagacctggaggatggaacagaatgggagagccacggggtttctgctgaaggagaacatcaggccctttcagctctatgagatcatcgtgactcccttgtaccaggacaccatgggaccctcccagcatgtctatgcctactctcaagaaatggctccctcccatgccccagagctgcatctaaagcacattggcaagacctgggcacagctggagtgggtgcctgagccccctgagctggggaagagcccccttacccactacaccatcttctggaccaacgctcagaaccagtccttctccgccatcctgaatgcctcctcccgtggctttgtcctccatggcctggagcccgccagtctgtatcacatccacctcatggctgccagccaggctggggccaccaacagtacagtcctcaccctgatgaccttgaccccagaggggtcggagctacacatcatcctgggcctgttcggcctcctgctgttgctcacctgcctctgtggaactgcctggctctgttgcagccccaacaggaagaatcccctctggccaagtgtcccagacccagctcacagcagcctgggctcctgggtgcccacaatcatggaggaggatgccttccagctgcccggccttggcacgccacccatcaccaagctcacagtgctggaggaggatgaaaagaagccggtgccctgggagtcccataacagctcagagacctgtggcctccccactctggtccagacctatgtgctccagggggacccaagagcagtttccacccagccccaatcccagtctggcaccagcgatcaggctgggcctcccaggcgatctgcatactttaaggaccagatcatgctccatccagccccacccaatggccttttgtgcttgtttcctataacttcagtattgtaaactagtttttggtttgcagtttttgttgttgtttatagacactcttgggtgta

SEQ ID NO: 121695 - DNA, 3373 bp, Homo sapiens
  Payload ID: 3859
  Gene Symbol: CSF3R
  Gene Name: colony stimulating factor 3 receptor (granulocyte)
  Uniprot ID: Q99062
  ENST ID: ENST00000373106
  CDS Start-End: 549-3059
gaaaagaggcttagggccgggtgagccttccagccagggcctgcctccaagtgatgctcccccagggcagggggcataaggatggcacccagccaggtgggagcctgggccctgcccagcctcaaagctttgagctcaggaaatccggaggcaggggagggggacatcgttgccacattccccagccctttaagacccccaaggcaggaaggctgcccgggcctcaccagcttccctcacaggctccttcctgggaggaaggggctgcctgtgccctcgaaggcgcaagggagggcaggagggaggctcggaaggtgttgcaatccccagcccccgggcctgtcagaggctgagccattaacgacagagctcggggagagaagctggactgcagctggtttcaggaacttctcttgacgagaagagagaccaaggaggccaagcaggggctgggccagaggtgccaacatggggaaactgaggctcggctcggaaaggtgaagtaacttgtccaagatcacaaagctggtgaacatcaagttggtgctatggcaaggctgggaaactgcagcctgacttgggctgccctgatcatcctgctgctccccggaagtctggaggagtgcgggcacatcagtgtctcagcccccatcgtccacctgggggatcccatcacagcctcctgcatcatcaagcagaactgcagccatctggacccggagccacagattctgtggagactgggagcagagcttcagcccgggggcaggcagcagcgtctgtctgatgggacccaggaatctatcatcaccctgccccacctcaaccacactcaggcctttctctcctgctgcctgaactggggcaacagcctgcagatcctggaccaggttgagctgcgcgcaggctaccctccagccataccccacaacctctcctgcctcatgaacctcacaaccagcagcctcatctgccagtgggagccaggacctgagacccacctacccaccagcttcactctgaagagtttcaagagccggggcaactgtcagacccaaggggactccatcctggactgcgtgcccaaggacgggcagagccactgctgcatcccacgcaaacacctgctgttgtaccagaatatgggcatctgggtgcaggcagagaatgcgctggggaccagcatgtccccacaactgtgtcttgatcccatggatgttgtgaaactggagccccccatgctgcggaccatggaccccagccctgaagcggcccctccccaggcaggctgcctacagctgtgctgggagccatggcagccaggcctgcacataaatcagaagtgtgagctgcgccacaagccgcagcgtggagaagccagctgggcactggtgggccccctccccttggaggcccttcagtatgagctctgcgggctcctcccagccacggcctacaccctgcagatacgctgcatccgctggcccctgcctggccactggagcgactggagccccagcctggagctgagaactaccgaacgggcccccactgtcagactggacacatggtggcggcagaggcagctggaccccaggacagtgcagctgttctggaagccagtgcccctggaggaagacagcggacggatccaaggttatgtggtttcttggagaccctcaggccaggctggggccatcctgcccctctgcaacaccacagagctcagctgcaccttccacctgccttcagaagcccaggaggtggcccttgtggcctataactcagccgggacctctcgtcccactccggtggtcttctcagaaagcagaggcccagctctgaccagactccatgccatggcccgagaccctcacagcctctgggtaggctgggagccccccaatccatggcctcagggctatgtgattgagtggggcctgggcccccccagcgcgagcaatagcaacaagacctggaggatggaacagaatgggagagccacggggtttctgctgaaggagaacatcaggccctttcagctctatgagatcatcgtgactcccttgtaccaggacaccatgggaccctcccagcatgtctatgcctactctcaagaaatggctccctcccatgccccagagctgcatctaaagcacattggcaagacctgggcacagctggagtgggtgcctgagccccctgagctggggaagagcccccttacccactacaccatcttctggaccaacgctcagaaccagtccttctccgccatcctgaatgcctcctcccgtggctttgtcctccatggcctggagcccgccagtctgtatcacatccacctcatggctgccagccaggctggggccaccaacagtacagtcctcaccctgatgaccttgaccccagaggggtcggagctacacatcatcctgggcctgttcggcctcctgctgttgctcacctgcctctgtggaactgcctggctctgttgcagccccaacaggaagaatcccctctggccaagtgtcccagacccagctcacagcagcctgggctcctgggtgcccacaatcatggaggaggatgccttccagctgcccggccttggcacgccacccatcaccaagctcacagtgctggaggaggatgaaaagaagccggtgccctgggagtcccataacagctcagagacctgtggcctccccactctggtccagacctatgtgctccagggggacccaagagcagtttccacccagccccaatcccagtctggcaccagcgatcaggtcctttatgggcagctgctgggcagccccacaagcccagggccagggcactatctccgctgtgactccactcagcccctcttggcgggcctcacccccagccccaagtcctatgagaacctctggttccaggccagccccttggggaccctggtaaccccagccccaagccaggaggacgactgtgtctttgggccactgctcaacttccccctcctgcaggggatccgggtccatgggatggaggcgctggggagcttctagggcttcctggggttcccttcttgggcctgcctcttaaaggcctgagctagctggagaagaggggagggtccataagcccatgactaaaaactaccccagcccaggctctcaccatctccagtcaccagcatctccctctcctcccaatctccataggctgggcctcccaggcgatctgcatactttaaggaccagatcatgctccatccagccccacccaatggccttttgtgcttgtttcctataacttcagtattgtaaactagtttttggtttgcagtttttgttgttgtttatagacactcttgggtgta

SEQ ID NO: 121696 - DNA, 512 bp, Homo sapiens
  Payload ID: 3859
  Gene Symbol: CSF3R
  Gene Name: colony stimulating factor 3 receptor (granulocyte)
  ENST ID: ENST00000533491
  CDS Start-End: 448-512
gagagtagaaacagcaagggagcgaggggtgtgaagtggggaagagagtgtgaggggagagggctgagcgtgatgagggagaaacagaaagagggaatgtgaaggcagccagcccaggagacatcgagctgtgctgggccacaggagtgagcacctgcagagcccagcagagatggccgcagtgacaggagggccagggggcccaggagttaggaggagaggatccagaaagggggctttggaactgcgcagtgtggcacagacaaaagcaagatggggaaactgaggctcggctcggaaaggtgaagtaacttgtccaagatcacaaagctgggataaattgaccctccagtggacagctctgagaagtgttctacatggctctttggaaggttccagcaggatagagccccagttgtccatagaggtgaacatcaagttggtgctatggcaaggctgggaaactgcagcctgacttgggctgccctgatcatcctgctgctccccggaag

SEQ ID NO: 121697 - DNA, 1440 bp, Homo sapiens
  Payload ID: 3859
  Gene Symbol: CSF3R
  Gene Name: colony stimulating factor 3 receptor (granulocyte)
  ENST ID: ENST00000464465
  CDS Start-End: 1-1166
ggacctctcgtcccactccggtggtcttctcagaaagcagaggcccagctctgaccagactccatgccatggcccgagaccctcacagcctctgggtaggctgggagccccccaatccatggcctcagggctatgtgattgagtggggcctgggcccccccagcgcgagcaatagcaacaagacctggaggatggaacagaatgggagagccacggggtttctgctgaaggctccctcccatgccccagagctgcatctaaagcacattggcaagacctgggcacagctggagtgggtgcctgagccccctgagctggggaagagcccccttacccactacaccatcttctggaccaacgctcagaaccagtccttctccgccatcctgaatgcctcctcccgtggctttgtcctccatggcctggagcccgccagtctgtatcacatccacctcatggctgccagccaggctggggccaccaacagtacagtcctcaccctgatgaccttgaccccagaggggtcggagctacacatcatcctgggcctgttcggcctcctgctgttgctcacctgcctctgtggaactgcctggctctgttgcagccccaacaggaagaatcccctctggccaagtgtcccagacccagctcacagcagcctgggctcctgggtgcccacaatcatggaggaggatgccttccagctgcccggccttggcacgccacccatcaccaagctcacagtgctggaggaggatgaaaagaagccggtgccctgggagtcccataacagctcagagacctgtggcctccccactctggtccagacctatgtgctccagggggacccaagagcagtttccacccagccccaatcccagtctggcaccagcgatcaggtcctttatgggcagctgctgggcagccccacaagcccagggccagggcactatctccgctgtgactccactcagcccctcttggcgggcctcacccccagccccaagtcctatgagaacctctggttccaggccagccccttggggaccctggtaaccccagccccaagccaggaggacgactgtgtctttgggccactgctcaacttccccctcctgcaggggatccgggtccatgggatggaggcgctggggagcttctagggcttcctggggttcccttcttgggcctgcctcttaaaggcctgagctagctggagaagaggggagggtccataagcccatgactaaaaactaccccagcccaggctctcaccatctccagtcaccagcatctccctctcctcccaatctccataggctgggcctcccaggcgatctgcatactttaaggaccagatcatgctccatccagccccacccaatggccttttgtgcttgtttcctataacttcagtattgtaaactagtttttggt

SEQ ID NO: 121698 - DNA, 1414 bp, Homo sapiens
  Payload ID: 3860
  Gene Symbol: COLCA2
  Gene Name: colorectal cancer associated 2
  Uniprot ID: A8K830
  ENST ID: ENST00000398035
  CDS Start-End: 759-1223
actatctccaggcgtccaggctgaacgcgcggtcaccctcggccgccgcacccagcgcacttcccggcgcgattcctggacgcacactgcagggtagtggtcagggccggagccgccccggactcctgcggccacctccaccttgaaagctcgcccggctcggcttggcctaacagccagtccccaacctactcactgcggcttttcggggcccggggctgaggctgcccctgctcccagcgctcaggggtccctcccagcgaacccctcttgagcgcgcccgccacctcccgcgagccggggcagtccgaccgggccccgccagccccggggcggcccctaccgaagggcggcctcccggcggagtgcagggtcatcgggagccccggacggctttccccagctcgcgctgcgcggactcgccccggagcctcagtgcgcctcggagaaacgcctgccccagaaagggaggggaaaaaccgaaggtgtatcaaggtgtccgagtgaagatcacagtgaaggagctgctgcagcaaagacgggcacaccaggcggcctccgggggaacccggtccggaggcagcagtgtccacctttcagacccagttgcaccatcttctgcaggactgtattttgagcctgaaccaatttcttccacgcccaattatttgcaacggggagaattttccagttgtgtttcatgtgaagaaaactcaagctgcctcgaccagatctttgattcctaccttcagacagagatgcacccggagcctttgctcaattccacacaaagtgctccacaccatttcccagacagcttccaggccacccctttctgctttaaccagagcctgatcccaggatcaccttcaaattcctccattctctctggctccttagactacagttactcgccagtgcagctgccttcatatgctccagagaattacaattcccctgcttctctggacaccagaacctgtggctaccccccagaagaccattcctaccaacacttgtcctcacacgcccagtacagctgcttctcctcggccaccacctccatctgctactgcgcatcgtgtgaggcagaggacttggatgctctccaggcagcagagtacttctacccgagcacagactgtgtggactttgccccctcagcagccgccaccagtgatttctataagagggaaacaaactgtgacatctgctatagttaatagaaattacagtaattcagaacatggcatgggtatatctatttttctaccacgtctagatgacactgcaaaatatgcaacttggtaacacaatatcccaagcacagtttacatgtcactatttccaattttctgatgctaagcattcatatgaagtcctcagacccggtcacagcgccactcctactttg

SEQ ID NO: 121699 - DNA, 1332 bp, Homo sapiens
  Payload ID: 3860
  Gene Symbol: COLCA2
  Gene Name: colorectal cancer associated 2
  Uniprot ID: A8K830
  ENST ID: ENST00000526216
  CDS Start-End: 570-1034
agaggggaagaaggggagagtaggagcgggggcgaaggagggaggagggcaagatggagcgcggaaaaggcggagaaaagggacgagggagagcgggcagaaggcaaagacagaagggagcgagggagggagttcctcgggcctggcccctttactaggtcagtctggcaggtacctcgccggcccaggacggggctggccaaacctcaccgcttgctcccgggctggcttccagaccaagggcacgcagaggtcggagcctgcccagaagccacacctggccagaaaaaccgaaggtgtatcaaggtgtccgagtgaagatcacagtgaaggagctgctgcagcaaagacgggcacaccaggcggcctccgggggaacccggtccggaggcagcagtgtccacctttcagacccagttgcaccatcttctgcaggactgtattttgagcctgaaccaatttcttccacgcccaattatttgcaacggggagaattttccagttgtgtttcatgtgaagaaaactcaagctgcctcgaccagatctttgattcctaccttcagacagagatgcacccggagcctttgctcaattccacacaaagtgctccacaccatttcccagacagcttccaggccacccctttctgctttaaccagagcctgatcccaggatcaccttcaaattcctccattctctctggctccttagactacagttactcgccagtgcagctgccttcatatgctccagagaattacaattcccctgcttctctggacaccagaacctgtggctaccccccagaagaccattcctaccaacacttgtcctcacacgcccagtacagctgcttctcctcggccaccacctccatctgctactgcgcatcgtgtgaggcagaggacttggatgctctccaggcagcagagtacttctacccgagcacagactgtgtggactttgccccctcagcagccgccaccagtgatttctataagagggaaacaaactgtgacatctgctatagttaatagaaattacagtaattcagaacatggcatgggtatatctatttttctaccacgtctagatgacactgcaaaatatgcaacttggtaacacaatatcccaagcacagtttacatgtcactatttccaattttctgatgctaagcattcatatgaagtcctcagacccggtcacagcgccactcctactttgtatgctcatagtttaaatttttgtaggaaactttcaattgttttactttttgtataacgaacaaatgctgtctccttttttactaataaataattttgtattactaa

SEQ ID NO: 121700 - DNA, 823 bp, Homo sapiens
  Payload ID: 3860
  Gene Symbol: COLCA2
  Gene Name: colorectal cancer associated 2
  ENST ID: ENST00000528846
  CDS Start-End: 504-823
tcccacgtatccactgttgtgtcctgagacacgcggtgcggaccctgcgcgcccagaagctgctacggggggagctagaggctcacagtgagcctgggacgggggcagagcgcaccgactgcactgagccgagctgtggcggtccctgcgcggaccccgaggggcgcccgctgcccgcggagtccggagccgatcggggaacggggtggtggggctgcgaaaaaccgaaggtgtatcaaggtgtccgagtgaagatcacagtgaaggagctgctgcagcaaagacgggcacaccaggcggcctccgggggaacccggtccggaggcagcagtgtccacctttcagacccagttgcaccatcttctgcaggactgtattttgagcctgaaccaatttcttccacgcccaattatttgcaacggggagaattttccagttgtgtttcatgtgaagaaaactcaagctgcctcgaccagatctttgattcctaccttcagacagagatgcacccggagcctttgctcaattccacacaaagtgctccacaccatttcccagacagcttccaggccacccctttctgctttaaccagagcctgatcccaggatcaccttcaaattcctccattctctctggctccttagactacagttactcgccagtgcagctgccttcatatgctccagagaattacaattcccctgcttctctggacaccagaacctgtggctaccccccagaagaccattcctaccaacacttgtcctcacacgcccagtacagctgcttctcctcggccaccacctccatctgctactgcgc

SEQ ID NO: 121701 - DNA, 1264 bp, Homo sapiens
  Payload ID: 3860
  Gene Symbol: COLCA2
  Gene Name: colorectal cancer associated 2
  Uniprot ID: A8K830
  ENST ID: ENST00000614153
  CDS Start-End: 504-968
tcccacgtatccactgttgtgtcctgagacacgcggtgcggaccctgcgcgcccagaagctgctacggggggagctagaggctcacagtgagcctgggacgggggcagagcgcaccgactgcactgagccgagctgtggcggtccctgcgcggaccccgaggggcgcccgctgcccgcggagtccggagccgatcggggaacggggtggtggggctgcgaaaaaccgaaggtgtatcaaggtgtccgagtgaagatcacagtgaaggagctgctgcagcaaagacgggcacaccaggcggcctccgggggaacccggtccggaggcagcagtgtccacctttcagacccagttgcaccatcttctgcaggactgtattttgagcctgaaccaatttcttccacgcccaattatttgcaacggggagaattttccagttgtgtttcatgtgaagaaaactcaagctgcctcgaccagatctttgattcctaccttcagacagagatgcacccggagcctttgctcaattccacacaaagtgctccacaccatttcccagacagcttccaggccacccctttctgctttaaccagagcctgatcccaggatcaccttcaaattcctccattctctctggctccttagactacagttactcgccagtgcagctgccttcatatgctccagagaattacaattcccctgcttctctggacaccagaacctgtggctaccccccagaagaccattcctaccaacacttgtcctcacacgcccagtacagctgcttctcctcggccaccacctccatctgctactgcgcatcgtgtgaggcagaggacttggatgctctccaggcagcagagtacttctacccgagcacagactgtgtggactttgccccctcagcagccgccaccagtgatttctataagagggaaacaaactgtgacatctgctatagttaatagaaattacagtaattcagaacatggcatgggtatatctatttttctaccacgtctagatgacactgcaaaatatgcaacttggtaacacaatatcccaagcacagtttacatgtcactatttccaattttctgatgctaagcattcatatgaagtcctcagacccggtcacagcgccactcctactttgtatgctcatagtttaaatttttgtaggaaactttcaattgttttactttttgtataacgaacaaatgctgtctccttttttactaataaataattttgtattact

SEQ ID NO: 121702 - DNA, 1088 bp, Homo sapiens
  Payload ID: 3860
  Gene Symbol: COLCA2
  Gene Name: colorectal cancer associated 2
  Uniprot ID: A8K830
  ENST ID: ENST00000610738
  CDS Start-End: 37-792
agcatccagccaccgacccagctcctgctgaccacgatgtcggaaaaaccgaaggtgtatcaaggtgtccgagtgaagatcacagtgaaggagctgctgcagcaaagacgggcacaccaggcggcctccgggggaacccggtccggaggcagcagtgtccacctttcagacccagttgcaccatcttctgcaggactgtattttgagcctgaaccaatttcttccacgcccaattatttgcaacggggagaattttccagttgtgtttcatgtgaagaaaactcaagctgcctcgaccagatctttgattcctaccttcagacagagatgcacccggagcctttgctcaattccacacaaagtgctccacaccatttcccagacagcttccaggccacccctttctgctttaaccagagcctgatcccaggatcaccttcaaattcctccattctctctggctccttagactacagttactcgccagtgcagctgccttcatatgctccagagaattacaattcccctgcttctctggacaccagaacctgtggctaccccccagaagaccattcctaccaacacttgtcctcacacgcccagtacagctgcttctcctcggccaccacctccatctgctactgcgcatcgtgtgaggcagaggacttggatgctctccaggcagcagagtacttctacccgagcacagactgtgtggactttgccccctcagcagccgccaccagtgatttctataagagggaaacaaactgtgacatctgctatagttaatagaaattacagtaattcagaacatggcatgggtatatctatttttctaccacgtctagatgacactgcaaaatatgcaacttggtaacacaatatcccaagcacagtttacatgtcactatttccaattttctgatgctaagcattcatatgaagtcctcagacccggtcacagcgccactcctactttgtatgctcatagtttaaatttttgtaggaaactttcaattgttttactttttgtataacgaacaaatgctgtctccttttttactaataaataattttgtattact

SEQ ID NO: 121703 - DNA, 1469 bp, Homo sapiens
  Payload ID: 3861
  Gene Symbol: COMMD10
  Gene Name: COMM domain containing 10
  Uniprot ID: Q9Y6G5
  ENST ID: ENST00000274458
  CDS Start-End: 63-671
gcggccgccattggctgggttcggcgcagctaacagacggcggcagtgcgagaaagccgaagatggcggtccccgcggcgctgatcctacgggagagccccagcatgaagaaagcagtgtcactgataaatgcaatagatacaggaagatttccacggttgctcactcggattcttcaaaaacttcacctgaaggctgagagcagtttcagtgaagaagaggaagaaaaacttcaagcggcattttctctagagaaacaagatcttcacctagttcttgaaacaatatcatttattttagaacaggcagtgtatcacaatgtgaagccagcagctttgcagcagcaattagagaacattcatcttagacaagacaaagctgaagcatttgtcaatacgtggtcttctatgggtcaagaaacagttgaaaagttccggcagagaattctggctccctgtaagctagagaccgttggatggcagcttaaccttcagatggctcactctgctcaagcaaaactaaaatctcctcaagctgtgttacaactcggagtgaacaatgaagattcaaagagcctggagaaagttcttgtggaattcagtcacaaggagttgtttgatttctataacaagctagagactatacaagcacagctggattcccttacatgatgttttcgaagactgtttttttcatcacgctcctgccacctcattattttgcattgaagatacattgccaggttgtgttttctgaaggattcagtgacttgctttctgtaaattatatggcttatcacttcttagacaaataacaaccaatagagatcattgttaagaatactgaggttctaatatactttctttagttctgtgagccaacagtaattattaagaacactttccctttaaaggaaacaaaagtgaataccatattgtttttactgtcatagtgttgctttcttgcctgtcctgcttagtttttacttgctggatgataccataatgtatcaaggagcgtccatggatacaagataagatgtgtaccttagtagaatacagagctttggtaattacatgaataaaattaagaaaatagccatatacaatcaaatacactatggcatttttatttgaatatgatgagtatattttgcttcggaaataatataggaaggaaatgtaaaatagtgagtagtatggtatcagttaattccagtctgagcttctctgtcaacttcagtttctctctcagtttaatgatttaataatagtccaggtttttgtgtgtttttctttatactgcaaattaataatgattcactttatagtttgggagacagaatcaggtcttgaataaaataattgtaatgagtgctaaatgggcaccattattcgaatcagataccttttatattctctttccataaatacgttgatttctgtcaataaaatttttgtgtcttagga

SEQ ID NO: 121704 - DNA, 870 bp, Homo sapiens
  Payload ID: 3861
  Gene Symbol: COMMD10
  Gene Name: COMM domain containing 10
  ENST ID: ENST00000507356
  CDS Start-End: 38-457
gcagctaacagacggcggcagtgcgagaaagccgaagatggcggtccccgcggcgctgatcctacgggagagccccagcatgaagaaagcagtgtcactgataaatgcaatagatacaggaagatttccacggttgctcactcggattcttcaaaaacttcacctgaaggctgagagcagtttcagtgaagaagaggaagaaaaacttcaagcggcattttctctagagaaacaagatcttcacctagttcttgaaacaatatcatttattttagaacaggcagtgtatcacaatgtgaagccagcagctttgcagcagcaattagagaacattcatcttagacaagacaaagctgaagcatttgtcaatacgtggtcttctatgggtcaagaaacagttgaaaagttccggcagagaattctggctccctctagagaccgttggatggcagcttaaccttcagatggctcactctgctcaagcaaaactaaaatctcctcaagctgtgttacaactcggagtgaacaatgaagattcaaagagcctggagaaagttcttgtggaattcagtcacaaggagttgtttgatttctataacaagctagagactatacaagcacagctggattcccttacatgatgttttcgaagactgtttttttcatcacgctcctgccacctcattattttgcattgaagatacattgccaggttgtgttttctgaaggattcagtgacttgctttctgtaaattatatggcttatcacttcttagacaaataacaaccaatagagatcattgttaagaatactgaggttctaatatactttctttagttctgtgagccaacagtaattattaagaacac

SEQ ID NO: 121705 - DNA, 793 bp, Homo sapiens
  Payload ID: 3861
  Gene Symbol: COMMD10
  Gene Name: COMM domain containing 10
  ENST ID: ENST00000506589
  CDS Start-End: 1-366
gctgagagcagtttcagtgaagaagaggaagaaaaacttcaagcggcattttctctagagaaacaagatcttcacctagttcttgaaacaatatcatttattttagaacaggcagtgtatcacaatgtgaagccagcagctttgcagcagcaattagagaacattcatcttagacaagacaaagctgaagcatttgtcaatacgtggtcttctatgggtcaagaaacagttgaaaagttccggcagagaattctggctccctgtaagagcctggagaaagttcttgtggaattcagtcacaaggagttgtttgatttctataacaagctagagactatacaagcacagctggattcccttacatgatgttttcgaagactgtttttttcatcacgctcctgccacctcattattttgcattgaagatacattgccaggttgtgttttctgaaggattcagtgacttgctttctgtaaattatatggcttatcacttcttagacaaataacaaccaatagagatcattgttaagaatactgaggttctaatatactttctttagttctgtgagccaacagtaattattaagaacactttccctttaaaggaaacaaaagtgaataccatattgtttttactgtcatagtgttgctttcttgcctgtcctgcttagtttttacttgctggatgataccataatgtatcaaggagcgtccatggatacaagataagatgtgtaccttagtagaatacagagctttggtaattacatgaataaaattaagaaaatag

SEQ ID NO: 121706 - DNA, 869 bp, Homo sapiens
  Payload ID: 3861
  Gene Symbol: COMMD10
  Gene Name: COMM domain containing 10
  ENST ID: ENST00000515539
  CDS Start-End: 135-701
gacactctggtgggaaaggctcacgctgctgctggagggtctttaatagccaacatgtgttaataccccttttaaatcagtatcgaataggggaccgaatttttggttggtagaagaatctagcctggctttgcatgaagaaagcagtgtcactgataaatgcaatagatacaggaagatttccacggttgctcactcggattcttcaaaaacttcacctgaaggctgagagcagtttcagtgaagaagaggaagaaaaacttcaagcggcattttctctagagaaacaagatcttcacctagttcttgaaacaatatcatttattttagaacaggcagtgtatcacaatgtgaagccagcagctttgcagcagcaattagagaacattcatcttagacaagacaaagctgaagcatttgtcaatacgtggtcttctatgggtcaagaaacagttgaaaagttccggcagagaattctggctccctgtaagctagagaccgttggatggcagcttaaccttcagatggctcactctgctcaagcaaaactaaaatctcctcaagctgtgttacaactcggagtgaacaatgaagattcaaagagcctggagaaagttcttgtggaattcagtcacaaggagttgtttgatttctataacaagctagagactatacaagcacagctggattcccttacatgatgttttcgaagactgtttttttcatcacgctcctgccacctcattattttgcattgaagatacattgccaggttgtgttttctgaaggattcagtgacttgctttctgtaaattatatggcttatcacttcttagacaaataacaaccaatagagatcattgttaaga

SEQ ID NO: 121707 - DNA, 1433 bp, Homo sapiens
  Payload ID: 3861
  Gene Symbol: COMMD10
  Gene Name: COMM domain containing 10
  ENST ID: ENST00000632434
  CDS Start-End: 70-636
gacggcggcagtgcgagaaagccgaagatggcggtccccgcggcgctgatcctacgggagagccccagcatgaagaaagcagtgtcactgataaatgcaatagatacaggaagatttccacggttgctcactcggattcttcaaaaacttcacctgaaggctgagagcagtttcagtgaagaagaggaagaaaaacttcaagcggcattttctctagagaaacaagatcttcacctagttcttgaaacaatatcatttattttagaacaggcagtgtatcacaatgtgaagccagcagctttgcagcagcaattagagaacattcatcttagacaagacaaagctgaagcatttgtcaatacgtggtcttctatgggtcaagaaacagttgaaaagttccggcagagaattctggctccctgtaagctagagaccgttggatggcagcttaaccttcagatggctcactctgctcaagcaaaactaaaatctcctcaagctgtgttacaactcggagtgaacaatgaagattcaaagagcctggagaaagttcttgtggaattcagtcacaaggagttgtttgatttctataacaagctagagactatacaagcacagctggattcccttacatgatgttttcgaagactgtttttttcatcacgctcctgccacctcattattttgcattgaagatacattgccaggttgtgttttctgaaggattcagtgacttgctttctgtaaattatatggcttatcacttcttagacaaataacaaccaatagagatcattgttaagaatactgaggttctaatatactttctttagttctgtgagccaacagtaattattaagaacactttccctttaaaggaaacaaaagtgaataccatattgtttttactgtcatagtgttgctttcttgcctgtcctgcttagtttttacttgctggatgataccataatgtatcaaggagcgtccatggatacaagataagatgtgtaccttagtagaatacagagctttggtaattacatgaataaaattaagaaaatagccatatacaatcaaatacactatggcatttttatttgaatatgatgagtatattttgcttcggaaataatataggaaggaaatgtaaaatagtgagtagtatggtatcagttaattccagtctgagcttctctgtcaacttcagtttctctctcagtttaatgatttaataatagtccaggtttttgtgtgtttttctttatactgcaaattaataatgattcactttatagtttgggagacagaatcaggtcttgaataaaataattgtaatgagtgctaaatgggcaccattattcgaatcagataccttttatattctctttccataaatacgttgatttctgtcaataaaatttttgtgtcttagg

SEQ ID NO: 121708 - DNA, 885 bp, Homo sapiens
  Payload ID: 3862
  Gene Symbol: COMMD2
  Gene Name: COMM domain containing 2
  ENST ID: ENST00000491617
  CDS Start-End: 29-436
tgccgggtgaaatcgtaggacagtgaagatgctgctggaattgtccgaggagcataaggaacacctggccttcctgcctcaagtggacagcgcggtggtcgccgagtttgggcggattgctgtggaattcctgagacgcggcgcaaacccaaaaatctacgaaggcgccgccagaaaactcaatgtgagtagtgacactgtccagcatggtgtggaaggattaacgtatctcctcactgagagctcaaagctcatgatttctgaactggatttccaagactctgtttttgttctgggattctctgaagaattaaacaaattgttgcttcagctttatctggacaacagaaaagagatcagaacgattctgagtgaattggcaccaagccttcccagttatcataaccttgaatggcgactagatgtacagatgtagaaaagtgcacaggtcaatgtaccgctcaatgaattatcacatggtgcatttaactgtgactcacaccccagaagcatcctccttgcctcctaattactgccccttcactcctttctaaagcttgcaagtagaagtctcaggcaacagattaaaccagcagtgactataaagctacaccttaatcaaaatggagatcacaacaccaaagttctgcagacagacccagccaccctgctccatttggttcaacaactggaacaagcattggaagagatgaagacaaatcactgtaggagagttgttcgcaacatcaagtagtaccagttttaaggttttaattcatttgaatcacttatgaattgatgatatacagcaattacttttcaaaattaattttttattaattcatgatgataaatacatagtattcctcagtatctattccaaga

SEQ ID NO: 121709 - DNA, 632 bp, Homo sapiens
  Payload ID: 3862
  Gene Symbol: COMMD2
  Gene Name: COMM domain containing 2
  ENST ID: ENST00000483708
  CDS Start-End: 7-372
gtgaagatgctgctggaattgtccgaggagcataaggaacacctggccttcctgcctcaagtggacagcgcggtggtcgccgagtttgggcggattgctgtggaattcctgagacgcggcgcaaacccaaaaatctacgaaggcgccgccagaaaactcaatgtgagtagtgacactgtccagcatggtgtggaaggattaacgtatctcctcactgagagctcaaagctcatggtaagggattttctggactgttttgtgttggctggattcttaagaacggtctggtgtactctacatcatagtcctggcagatttctgaactggatttccaagactctgtttttgttctgggattctctgaagaattaaacaaattgttgcttcagctttatctggacaacagaaaagagatcagaacgattctgagtgaattggcaccaagccttcccagttatcataaccttgaatggcgactagatgtacagcttgcaagtagaagtctcaggcaacagattaaaccagcagtgactataaagctacaccttaatcaaaatggagatcacaacaccaaagttctgcagacagacccagccaccctgctccatttggttcaacaactggaacaagca

SEQ ID NO: 121710 - DNA, 3706 bp, Homo sapiens
  Payload ID: 3862
  Gene Symbol: COMMD2
  Gene Name: COMM domain containing 2
  Uniprot ID: Q86X83
  ENST ID: ENST00000473414
  CDS Start-End: 56-655
cggaagtggcgaaggcggggtcggcgctgccgggtgaaatcgtaggacagtgaagatgctgctggaattgtccgaggagcataaggaacacctggccttcctgcctcaagtggacagcgcggtggtcgccgagtttgggcggattgctgtggaattcctgagacgcggcgcaaacccaaaaatctacgaaggcgccgccagaaaactcaatgtgagtagtgacactgtccagcatggtgtggaaggattaacgtatctcctcactgagagctcaaagctcatgatttctgaactggatttccaagactctgtttttgttctgggattctctgaagaattaaacaaattgttgcttcagctttatctggacaacagaaaagagatcagaacgattctgagtgaattggcaccaagccttcccagttatcataaccttgaatggcgactagatgtacagcttgcaagtagaagtctcaggcaacagattaaaccagcagtgactataaagctacaccttaatcaaaatggagatcacaacaccaaagttctgcagacagacccagccaccctgctccatttggttcaacaactggaacaagcattggaagagatgaagacaaatcactgtaggagagttgttcgcaacatcaagtagtaccagttttaaggttttaattcatttgaatcacttatgaattgatgatatacagcaattacttttcaaaattaattttttattaattcatgatgataaatacatagtattcctcagtatctattccaagatactgaggtcataatcagaagctaagctgggtgcagtggctcatgccagttatcccagcactttgggaggccgaggtgggcaaatcatgaggtcaggagattgagaccttcctggctaacatggtgaaaccccatctctactaaaaatataaaaaattagccaggtgtggtggcacgcatctatcagagtcccagctactcaggaggctgaggcaggagaatcgcttgaacctgggaggtggaggttgcagtgagctgagattgtgccactgcactccagcctgggtgacagagtgagactccatctcaaaaataataataataataataaagtaaaaataaaaataaaaaagtaatcagaagctaaagtaaagttcctttcctggtgctaactgtggtcttcttgacacattaagatgtattttgtattttaagagtctcatgctctaccgttggaactagccagatggccattattttgtattttaaatacataaataggattgaatcaactagaaatgaatctatatgttctgtatatatgaatgactatcttgtttttgctacttcttttgactgcttaattttattattttcatctttattgatcaaatttgaaaataaaattcacaatgtaatactactactatgcagaattttctaaacagttcagtatttttgacttttaaaaacaccccacagtgttaatagccacagaatattgaacatcaataggatttttaatgctatattgttataggcagtttattcatttttctttgtatatgaagatgataagtatcatattgcctaagtttgagtgatcatggttaattaattggcttaaatagtactcaaatttgtgtggtcgtatattgtattttatcaaggactaattcttccaccatacccaaagcatctaggagacactctgtcatttacatttacaaataatggatgcagagaaatataatcaattcttgattgtcctggatacaaattatagtcactttttataatttgaataaactatgatgagggaaggaaggccatgtttattacattataggcaactatcccttctcaaaacataacttgatttatgttttgttttattttttagtagggaaccaaaagcttttggtctgaaaaactcaggtgctgatttgtcaggtcagcctgagagagtgcagagatactgaggtcagcttagggagaagaattgtatggaagggtggaaatgagggttcagtcttaactatgtgtccaagaccttatcctgagagtcttcatggaataatctagaaagggctgtagaagcaatcaaactctaaactgcgctctagactttgtcaatactttgcttcgtaagaattagggattttcatatcagagtgataccatgttgcaatctctttagagaagagagagcctagcagggaataggctagtggaagaaaaacatacttgagatggttacccattggtccctgcaggcatctgggccacccttttcctgtaggtatatattctgccgttgtgaaacaactatattattagatgtcagcaaactataatcagaaataatttttaattatagtggcaacttgattaatgaagctctcatatacaacctcacaaacaaaaagaaactttattacgtgaaatagtagcatatgtcattgggtttaaaagcaacatgcctgcaaaacatatgataaaaaatacctctgtaagggtttttatttgtccaccttcgatggaaggtaaacatggctgatcccagccaagatgaaacaatagccctttgtctcctcagaacaacctatctccaactctttgtccactgttcttaccccaattaaaacaagaaagcatgtgctaatccttttttaatttttatcaacctgccttggcctcctttcactgtactccattattccttctgtgatgttctaccttcttcaccttttgagaccagggtgagttgggagcagtttgcctaccttcttttagaatctggggcttatcttttagtacaagccattgaataagcctcttccttttttttgctcaaacattccacatccttgtggattcccctgcattgtttgttttatataacatttgatatttgttgtagcttgtatatgaacataattttctttagaggtagtcactgttctctccagtatgacccaggtttcttgactctgagtaatgcaccttctataactatctaaatttctattgaagctttttggattatgagtatgctgacttttcacgattggctggtgcatgtttagacttaaatgtcatatccttcatgtctcaaagccaaaatagtaacatctcatctcagaacagagctgtgaccacatgccaatatatgtgtcacaaagtctacatatgttacattccttggaagtctccttaaatgtttcacaaaatgtcaacaagcttgttttgttattgatatttccgagattgggcacatttaagacagtaaacgggaaaggtggtgaagatgctataagaagatgctgtatcttgagaattgaaaaatgagaatctgacatggtttgaaaaatcatgaagggtatatataaaggatgcatgtgtaggagccattaaaattcataacagtatgtgccccttcagcgttttaatcttatgaagtggttaagagataagtcttcggagttggacaaaaggatttgaatttaggttctgtggattattatgggtccttgataaattctcaaagcctttttttttgttcatctctaaaataggaatataggattacctaccacattgactcgtaaggactatatgagaccatgtatatagaatgtttaacatagtaccaggctttacaaagaactcaataaatgtttaccattattgaaatagt

SEQ ID NO: 121711 - DNA, 1342 bp, Homo sapiens
  Payload ID: 3863
  Gene Symbol: COMMD3
  Gene Name: COMM domain containing 3
  Uniprot ID: Q9UBI1
  ENST ID: ENST00000376836
  CDS Start-End: 445-1032
gagatcggagcttcccgcaggattcgcgcagagcgaggagcggggaggacgccgtttgcgggaggcgggggccgggatcccgacaccgtccgcagtctccccggggtctctcagggaaccgagctggtggccgtccgaggtaagcgccgaaccaaggagaaagcgccgagcgcgtccacaaaacgcccgaggccgcccttctcgccaaggctcggcagctcccgcggcctgcgctggacaagcgagagctggacggaaacggtgggaggccgtaggcggcggctgggggcgcgggacccgcgcgcgggcgcggaggcgggcggggaggccccgcagcccgcgccgccgccagccgccccgagccgcgtgcgcgcgcggccgcatcagctgagcgcgcggcgcgtgtcacgtggtgtgcgtgtcgaaggtcacggcgcgctcacaatggagctctcggagtctgtgcagaaaggcttccagatgctggcggatccccgctccttcgactccaacgccttcacgcttctcctccgggcggcattccagagtctgctggacgcccaggcggacgaggccgtgttagatcatccagacttgaaacatatcgacccagtggttttaaaacattgtcatgcagcagctgcaacttacatactagaggcaggaaagcaccgagctgacaagtcaactctaagcacttatctagaagactgtaaatttgacagagagcgaatagaactgttttgcacggaatatcagaataataagaattccctagaaatcctactgggaagtataggcagatctctccctcatataacggatgtttcttggcgcttggaatatcagataaagaccaatcaacttcataggatgtacagacctgcatatttggtgaccttaagtgtacagaacactgattccccatcctatccagagattagttttagttgcagcatggaacaattacaggacttggtggggaaacttaaagatgcttcgaaaagcctggaaagagcaactcagttgtaacttggggaagttaacgatccgcccgagtgcagaggaaaaccagaaacgccttgccttcagctgaaccaccgtttgtgcgagctggatgtccttttcagtagaaaagaattttccttttgaatttataccattcatcaattttgacactttaaaaacgtgtgaaagggttaagagggaaagatactgcccaagtatttgaatcgtttagtagtaactgtccatttatcctattttgatctttttcaagtcttctgaaaggaagtagacagtattacaccctgaataaataaggtgttgttttccacaaaga

SEQ ID NO: 121712 - DNA, 757 bp, Homo sapiens
  Payload ID: 3863
  Gene Symbol: COMMD3
  Gene Name: COMM domain containing 3
  ENST ID: ENST00000448361
  CDS Start-End: 1-449
ggcttccagatgctggcggatccccgctccttcgactccaacgccttcacgcttctcctccgggcggcattccagagtctgctggacgcccaggcggacgaggccgtgttagcacttatctagaagactgtaaatttgacagagagcgaatagaactgttttgcacggaatatcagaataataagaattccctagaaatcctactgggaagtataggcagatctctccctcatataacggatgtttcttggcgcttggaatatcagataaagaccaatcaacttcataggatgtacagacctgcatatttggtgaccttaagtgtacagaacactgattccccatcctatccagagattagttttagttgcagcatggaacaattacaggacttggtggggaaacttaaagatgcttcgaaaagcctggaaagagcaactcagttgtaacttggggaagttaacgatccgcccgagtgcagaggaaaaccagaaacgccttgccttcagctgaaccaccgtttgtgcgagctggatgtccttttcagtagaaaagaattttccttttgaatttataccattcatcaattttgacactttaaaaacgtgtgaaagggttaagagggaaagatactgcccaagtatttgaatcgtttagtagtaactgtccatttatcctattttgatctttttcaagtcttctgaaaggaagtagacagtattacaccctgaataaataaggtgttgttttccacaaa

SEQ ID NO: 121713 - DNA, 748 bp, Homo sapiens
  Payload ID: 3863
  Gene Symbol: COMMD3
  Gene Name: COMM domain containing 3
  ENST ID: ENST00000456711
  CDS Start-End: 1-490
aatggagctctcggagtctgtgcagaaaggcttccagatgctggcggatccccgctccttcgactccaacgccttcacgcttctcctccgggcggcattccagagtctgctggacgcccaggcggacgaggccgtgttagatcatccagacttgaaacatatcgacccagtggttttaaaacattgtcatgcagcagctgcaacttacatactagaggcaggaaagcaccgagctgacaagtcaactctaagtataggcagatctctccctcatataacggatgtttcttggcgcttggaatatcagataaagaccaatcaacttcataggatgtacagacctgcatatttggtgaccttaagtgtacagaacactgattccccatcctatccagagattagttttagttgcagcatggaacaattacaggacttggtggggaaacttaaagatgcttcgaaaagcctggaaagagcaactcagttgtaacttggggaagttaacgatccgcccgagtgcagaggaaaaccagaaacgccttgccttcagctgaaccaccgtttgtgcgagctggatgtccttttcagtagaaaagaattttccttttgaatttataccattcatcaattttgacactttaaaaacgtgtgaaagggttaagagggaaagatactgcccaagtatttgaatcgtttagtagtaactgtccatttatcctattttgatctttttcaagtcttctgaaag

SEQ ID NO: 121714 - DNA, 757 bp, Homo sapiens
  Payload ID: 3863
  Gene Symbol: COMMD3
  Gene Name: COMM domain containing 3
  ENST ID: ENST00000444869
  CDS Start-End: 1-532
ggagctctcggagtctgtgcagaaaggcttccagatgctggcggatccccgctccttcgactccaacgccttcacgcttctcctccgggcggcattccagagtctgctggacgcccaggcggacgaggccgtgttagatcatccagacttgaaacatatcgacccagtggttttaaaacattgtcatgcagcagctgcaacttacatactagaggcaggaaagcaccgagctgacaagtcaactctaagcacttatctagaagactgtaaatttgacagagagcgaatagaactgttttgcacggaatatcagaataataagaattccctagaaatcctactgggaagaacactgattccccatcctatccagagattagttttagttgcagcatggaacaattacaggacttggtggggaaacttaaagatgcttcgaaaagcctggaaagagcaactcagttgtaacttggggaagttaacgatccgcccgagtgcagaggaaaaccagaaacgccttgccttcagctgaaccaccgtttgtgcgagctggatgtccttttcagtagaaaagaattttccttttgaatttataccattcatcaattttgacactttaaaaacgtgtgaaagggttaagagggaaagatactgcccaagtatttgaatcgtttagtagtaactgtccatttatcctattttgatctttttcaagtcttctgaaaggaagtagacagtattacaccctgaataaata

SEQ ID NO: 121715 - DNA, 428 bp, Homo sapiens
  Payload ID: 3863
  Gene Symbol: COMMD3
  Gene Name: COMM domain containing 3
  ENST ID: ENST00000472610
  CDS Start-End: 1-146
cggagtctgtgcagaaaggcttccagatgctggcggatccccgctccttcgactccaacgccttcacgcttctcctccgggcggcattccagagtctgctggacgcccaggcggacgaggccgtgttaggcatcactggaagttaatttattttagatcatccagacttgaaacatatcgacccagtggttttaaaacattgtcatgcagcagctgcaacttacatactagaggcaggaaagcaccgagctgacaagtcaactctaagcacttatctagaagactgtaaatttgacagagagcgaatagaactgttttgcacggaatatcagaataataagaattccctagaaatcctactgggaagtataggcagatctctccctcatataacggatgtttcttggcgcttggaatatcagataaag

SEQ ID NO: 121716 - DNA, 476 bp, Homo sapiens
  Payload ID: 3863
  Gene Symbol: COMMD3
  Gene Name: COMM domain containing 3
  ENST ID: ENST00000471350
  CDS Start-End: 1-225
aataataagaattccctagaaatcctactgggaagtataggcagatctctccctcatataacggatgtttcttggcgcttggaatatcagataaagaccaatcaacttcataggatgtacagacctgcatatttggtgaccttaagtgtacagaacactgattccccatcctatccagagattagttttagttgcagcatggaacaattacaggtacagtattaggatctataaatattcctgtctttttataaatgtttacttgagagttatactcttgggaagttcaaaagaaaattaatctaaccatttgtcagcagataatgaagattggttaaggatttaatgggaaaggggcatcaaaagtagtattttaagataggcttcacttgaaattaagatgttattaatagagaattggtctgtatttgctgttcttgctgattgaaataaacttctgtagtgtttagtgtaaa

SEQ ID NO: 121717 - DNA, 1067 bp, Homo sapiens
  Payload ID: 3864
  Gene Symbol: COMMD4
  Gene Name: COMM domain containing 4
  Uniprot ID: Q9H0A8
  ENST ID: ENST00000267935
  CDS Start-End: 200-799
agggaaggattctgggagacggaggaggagacgccagcatttcgccccctgcacctccagcgggctgcggtccgctcccggcctcactcgagcaggccccgccctcccagaggcagttagtccaagtcacgtgatcgtcgactcagctgaccctgcgggaccggaaaaagaaattcccgggccctggcttcttggcgcgatgaggttccggttctgtggtgatctggactgtcccgactgggtcctggcagaaatcagcacgctggccaagatgtcctctgtgaagttgcggctgctctgcagccaggtactaaaggagctgctgggacaggggattgattatgagaagatcctgaagctcacggctgacgccaagtttgagtcaggcgatgtgaaggccacagtggcagtgctgagtttcatcctctccagtgcggccaagcacagtgtcgatggcgaatccttgtccagtgaactgcagcagctggggctgcccaaagagcacgcggccagcctgtgccgctgttatgaggagaagcaaagccccttgcagaagcacttgcgggtctgcagcctacgcatgaataggttggcaggtgtgggctggcgggtggactacaccctgagctccagcctgctgcaatccgtggaagagcccatggtgcacctgcggctggaggtggcagctgccccagggaccccagcccagcctgttgccatgtccctctcagcagacaagttccaggtcctcctggcagaactgaagcaggcccagaccctgatgagctccctgggctgaggagaagggtgttccaggcctgtgtggagccgccctgcccgtatggagtcacgccctctgaactgctcttcgggaggcagccctggttctaggatgctgaggccctggcccggactctggcctcccagatccccagctgcctcacttctctcttgagaacttggctcagggctcctgaggacctttcccagcattaccttcccttcccttgaaaggcaattgttggctgttttcataagcaggaaaaataaacagaagtataaaggaa

SEQ ID NO: 121718 - DNA, 722 bp, Homo sapiens
  Payload ID: 3864
  Gene Symbol: COMMD4
  Gene Name: COMM domain containing 4
  Uniprot ID: Q9H0A8
  ENST ID: ENST00000338995
  CDS Start-End: 32-454
agaaattcccgggccctggcttcttggcgcgatgaggttccggttctgtggtgatctggactgtcccgactgggtcctggcagaaatcagcacgctggccaagatgtcctctgtgaagttgcggctgctctgcagccaggtactaaaggagctgctgggacaggggattgattatgagaagatcctgaagctcacggctgacgccaagtttgagtcaggcgatgtgaaggccacagtggcagtgctgagtttcatcctctccagtgcggccaagcacagtgtcgatggcgaatccttgtccagtgaactgcagcagctggggctgcccaaagagcacgcggccagcctgtgccgctgttatgaggagaagcaaagccccttgcagaagcacttgcgggtctgcagcctacgcaaactgaagcaggcccagaccctgatgagctccctgggctgaggagaagggtgttccaggcctgtgtggagccgccctgcccgtatggagtcacgccctctgaactgctcttcgggaggcagccctggttctaggatgctgaggccctggcccggactctggcctcccagatccccagctgcctcacttctctcttgagaacttggctcagggctcctgaggacctttcccagcattaccttcccttcccttgaaaggcaattgttggctgttttcataagcaggaaaaataaacagaagtataaaggaa

SEQ ID NO: 121719 - DNA, 3225 bp, Homo sapiens
  Payload ID: 3864
  Gene Symbol: COMMD4
  Gene Name: COMM domain containing 4
  Uniprot ID: Q9H0A8
  ENST ID: ENST00000480484
  CDS Start-End: 15-614
ggcttcttggcgcgatgaggttccggttctgtggtgatctggactgtcccgactgggtcctggcagaaatcagcacgctggccaagatgtcctctgtgaagttgcggctgctctgcagccaggtactaaaggagctgctgggacaggggattgattatgagaagatcctgaagctcacggctgacgccaagtttgagtcaggcgatgtgaaggccacagtggcagtgctgagtttcatcctctccagtgcggccaagcacagtgtcgatggcgaatccttgtccagtgaactgcagcagctggggctgcccaaagagcacgcggccagcctgtgccgctgttatgaggagaagcaaagccccttgcagaagcacttgcgggtctgcagcctacgcatgaataggttggcaggtgtgggctggcgggtggactacaccctgagctccagcctgctgcaatccgtggaagagcccatggtgcacctgcggctggaggtggcagctgccccagggaccccagcccagcctgttgccatgtccctctcagcagacaagttccaggtcctcctggcagaactgaagcaggcccagaccctgatgagctccctgggctgaggagaagggtgttccaggcctgtgtggagccgccctgcccgtatggagtcacgccctctgaactgctcttcgggaggcagccctggttctaggatgctgaggccctggcccggactctggcctcccagatccccagctgcctcacttctctcttgagaacttggctcagggctcctgaggacctttcccagcattaccttcccttcccttgaaagtagagatgaggtttctccatgttggtcaggctggtctcgaactcctgacctcaggtgatccacccaccttgccctcccaaagtgctgggattacaggcgtaagccactgcgcccagccactgccatcatctttaggaagagagaagtgaccatgcctgaaccagtcattggcaagaggaacggtgttatggactgaatgttcatgttcctccagaattcatatgctgaagcctctgtccacacatgcacaccagatgagggccatgtgcgcacacgaggtggctgtctacaaggccagaaagagggctgtcaacaggaactgcgtctgctggcaccttgatcttgaacttcccagcctccagaactgtgagaaagaaatctctatggtgtaagccactagtctgtggcattgttatagcagctcgagaagactaaggcagatgggcttccaggactggcccagaccagccagggctccttgtagaaaaggctgatgccagggttggcacatggagggtacaaggaggactcgcctggagtatcttaaggaacctatcgaagaataatggcttgttccactggccaaagatgggacaatttgaacatcaaaagagatacttactgactccactcctgacttctgcttctgaaaaaatgaagtaggtgttttccctattcctcccactaagtacagttaacaaccctggatgttacatataaaacaaacaaaaagactccgagcgatggagagaaggcaccctagcctggctgggatcctcaggacctgaggctccacagagagaaattcctggaatctggaccccatggcccagtcaggttacacaaaactgatcatcacagatctgtagaactatacaaaagtgctaacattcatgattagggtctcagaaggtaaggaggaagagagtggaatggaaaaagtattcaaaaaaataatcactaaaggccaggtgcagtggcccatgcctgtaatcccagcactttgggaggtgggacaattgctttagaccttgcaactggcctgagcaacacagggagactcagtttctccaaaaaaataaaaaattagccgatcatggtggtgcgtgcttatagtctcagctactcagaaggctgaggcaggaggatcaatcgcttgagcccaggggtttgaggctgcagtgagctgtgatcatacctctgcactccagcctggataacagagctgagaccctgtctcaaaaaaaaaaaaaaaaaaaaaaaaaaaatgtatatatacacacattggaatatttttcagcccttaaaaagcagaaggttctgtcatttgtgacttggatgaacctagacgacatgatgctaagtgaaataagccaggcacagagagacaaatacctcgtcacctcacttatgcctggagttgaaaaaagggcctggggcagtggctcacgcctgtaatcccagcactttgggaagccaaggtgggaggatcacttaagcccaggagttcgagaccaggctgggcaacatggcaaacctgtctctacaaaaagtaaaaaaattagccgggtgcagtggcacatgcctgtggttccagcacttgggaggttgaggtgggaggattgcttgagccagggcggtcaaggctgcagtgaaccatgatagtgcccctgcactccagcctgggtgacagtgagaccctgtctcaaaaaaaaaaagttaaattcatagaagtcgacagtagaatggtggttagcagaggctggaggagagagagggtgggttgtggggaaaaggggagacaccggtcaaaaggtacaaagttccagttaggaggagtacattctggtgatttattgcccagcgtggtgaccagttaataatgatgtatacttcaaaatagctaaaagagggttttaaatgttctcatcacaaagaaataaatatttgaggtaatggatatcctaattagcctgatttgatctttttttgtgttttttgttttcttgagacagagtctcactctgttgcctaggctggagtgcagtggcgtgatcttggctcactgcaacctccgcctcccgagttcaagtgattctcctgcctcagcctctgtagtagctgggactacaggcatgcaccaccacccctggctaattttttgtattttttgtagagactgggtttcactatgttggccaggctggttttaaacttctgacctcaggtgatccgtctgcctcggcctcccacagtgctgggattacaggcatgagccaccgtgcccagccgatttgatcattccacaatatatgcatgtaacaaaacatcacactgtactccataaatttatacaattattatttgtcaattaaaaataaaactatagataagtc

SEQ ID NO: 121720 - DNA, 666 bp, Homo sapiens
  Payload ID: 3864
  Gene Symbol: COMMD4
  Gene Name: COMM domain containing 4
  ENST ID: ENST00000568301
  CDS Start-End: 34-666
gggcgaagcgaggcttgggctgctggagcgggaatgagggggcgccaagtggctccggaaactgggggaggttgtactggcctctccgcaaacacagtgtgtgcgggcgtgagggctaggttccggttctgtggtgatctggactgtcccgactgggtcctggcagaaatcagcacgctggccaagatgtcctctgtgaagttgcggctgctctgcagccaggtactaaaggagctgctgggacaggggattgattatgagaagatcctgaagctcacggctgacgccaagtttgagtcaggcgatgtgaaggccacagtggcagtgctgagtttcatcctctccagtgcggccaagcacagtgtcgatggcgaatccttgtccagtgaactgcagcagctggggctgcccaaagagcacgcggccagcctgtgccgctgttatgaggagaagcaaagccccttgcagaagcacttgcgggtctgcagcctacgcatgaataggttggcaggtgtgggctggcgggtggactacaccctgagctccagcctgctgcaatccgtggaagagcccatggtgcacctgcggctggaggtggcagctgccccagggaccccagcccagcctgttgccatgtccctctcagcagacaagttccaggtcctc

SEQ ID NO: 121721 - DNA, 639 bp, Homo sapiens
  Payload ID: 3864
  Gene Symbol: COMMD4
  Gene Name: COMM domain containing 4
  ENST ID: ENST00000564815
  CDS Start-End: 38-571
ggaaaaagaaattcccgggccctggcttcttggcgcgatgaggttccggttctgtggtgatctggactgtcccgactgggtcctggcagaaatcagcacgctggccaagatgtatgagaagatcctgaagctcacggctgacgccaagtttgagtcaggcgatgtgaaggccacagtggcagtgctgagtttcatcctctccagtgcggccaagcacagtgtcgatggcgaatccttgtccagtgaactgcagcagctggggctgcccaaagagcacgcggccagcctgtgccgctgttatgaggagaagcaaagccccttgcagaagcacttgcgggtctgcagcctacgcatgaataggttggcaggtgtgggctggcgggtggactacaccctgagctccagcctgctgcaatccgtggaagagcccatggtgcacctgcggctggaggtggcagctgccccagggaccccagcccagcctgttgccatgtccctctcagcagacaagttccaggtcctcctggcagaactgaagcaggcccagaccctgatgagctccctgggctgaggagaagggtgttccaggcctgtgtggagccgccctgcccgtatggagtcacgccctctgaactgctc

SEQ ID NO: 121722 - DNA, 461 bp, Homo sapiens
  Payload ID: 3864
  Gene Symbol: COMMD4
  Gene Name: COMM domain containing 4
  ENST ID: ENST00000567377
  CDS Start-End: 52-461
gcgatggtgaggcactaggggcgaagcgaggcttgggctgctggagcgggaatgagggggcgccaagtggctccggaaactgggggaggttgtactggcctctccgcaaacacagtgtgtgcgggcgtgagggctgtgagtctgtatgagaagatcctgaagctcacggctgacgccaagtttgagtcaggcgatgtgaaggccacagtggcagtgctgagtttcatcctctccagtgcggccaagcacagtgtcgatggcgaatccttgtccagtgaactgcagcagctggggctgcccaaagagcacgcggccagcctgtgccgctgttatgaggagaagcaaagccccttgcagaagcacttgcgggtctgcagcctacgcatgaataggttggcaggtgtgggctggcgggtggactacaccctgagctccagcctgctgcaatccgtggaagagcc

SEQ ID NO: 121723 - DNA, 746 bp, Homo sapiens
  Payload ID: 3864
  Gene Symbol: COMMD4
  Gene Name: COMM domain containing 4
  ENST ID: ENST00000562789
  CDS Start-End: 40-480
cactaggggcgaagcgaggcttgggctgctggagcgggaatgagggggcgccaagtggctccggaaactgggggaggttgtactggcctctccgcaaacacagtgtgtgcgggcgtgagggctgtgagtctgtcctctgtgaagttgcggctgctctgcagccaggtactaaaggagctgctgggacaggggattgattatgagaagatcctgaagctcacggctgacgccaagtttgagtcaggcgatgtgaaggccacagtggcagtgctgagtttcatcctctccagtgcggccaagcacagtgtcgatggcgaatccttgtccagtgaactgcagcagctggggctgcccaaagagcacgcggccagcctgtgccgctgttatgaggagaagcaaagccccttgcagaagcacttgcgggtctgcagcctacgcaaactgaagcaggcccagaccctgatgagctccctgggctgaggagaagggtgttccaggcctgtgtggagccgccctgcccgtatggagtcacgccctctgaactgctcttcgggaggcagccctggttctaggatgctgaggccctggcccggactctggcctcccagatccccagctgcctcacttctctcttgagaacttggctcagggctcctgaggacctttcccagcattaccttcccttcccttgaaaggcaattgttggctgttttcataagcaggaaaaataaacagaagtataaagg

SEQ ID NO: 121724 - DNA, 850 bp, Homo sapiens
  Payload ID: 3864
  Gene Symbol: COMMD4
  Gene Name: COMM domain containing 4
  ENST ID: ENST00000562610
  CDS Start-End: 37-369
gaaaaagaaattcccgggccctggcttcttggcgcgatgaggttccggttctgtggtgatctggactgtcccgactgggtcctggcagaaatcagcacgctggccaagatgtcctctgtgaagttgcggctgctctgcagccaggtactaaaggagctgctgggacaggggattgattatgagaagatcctgaagctcacggctgacgccaagtttgtgcggccaagcacagtgtcgatggcgaatccttgtccagtgaactgcagcagctggggctgcccaaagagcacgcggccagcctgtgccgctgttatgaggagaagcaaagccccttgcagaagcacttgcgggtctgcagcctacgcatgaataggttggcaggtgtgggctggcgggtggactacaccctgagctccagcctgctgcaatccgtggaagagcccatggtgcacctgcggctggaggtggcagctgccccagggaccccagcccagcctgttgccatgtccctctcagcagacaagttccaggtcctcctggcagaactgaagcaggcccagaccctgatgagctccctgggctgaggagaagggtgttccaggcctgtgtggagccgccctgcccgtatggagtcacgccctctgaactgctcttcgggaggcagccctggttctaggatgctgaggccctggcccggactctggcctcccagatccccagctgcctcacttctctcttgagaacttggctcagggctcctgaggacctttcccagcattaccttcccttcccttgaaaggcaattgttggctgttttcataagcaggaaaaataaacagaagtataaagg

SEQ ID NO: 121725 - DNA, 544 bp, Homo sapiens
  Payload ID: 3864
  Gene Symbol: COMMD4
  Gene Name: COMM domain containing 4
  ENST ID: ENST00000567720
  CDS Start-End: 30-188
aaattcccgggccctggcttcttggcgcgatgaggttccggttctgtggtgatctggactgtcccgactgggtcctggcagaaatcagcacgctggccaagatgtcctctgtgaagttgcggctgctctgcagccaggtactaaaggagctgctgggacaggggattgatgatccaggctgggggtgaggggctggtgagcaggggcctggcaccccctgaaggtctcctttccccatagtatgagaagatcctgaagctcacggctgacgccaagtttgagtcaggcgatgtgaaggccacagtggcagtgctgagtttcatcctctccagtgcggccaagcacagtgtcgatggcgaatccttgtccagtgaactgcagcagctggggctgcccaaagagcacgcggccagcctgtgccgctgttatgaggagaagcaaagccccttgcagaagcacttgcgggtctgcagcctacgcatgaataggttggcaggtgtgggctggcgggtggactacaccctgagctccagcctgctgcaat

SEQ ID NO: 121726 - DNA, 677 bp, Homo sapiens
  Payload ID: 3864
  Gene Symbol: COMMD4
  Gene Name: COMM domain containing 4
  Uniprot ID: Q9H0A8
  ENST ID: ENST00000567195
  CDS Start-End: 71-412
cgtgatcgtcgactcagctgaccctgcgggaccggaaaaagaaattcccgggccctggcttcttggcgcgatgaggttccggttctgtggtgatctggactgtcccgactgggtcctggcagaaatcagcacgctggccaagatgtcctctgtgaagttgcggctgctctgcagccaggtactaaaggagctgctgggacaggggattgattatgagaagatcctgaagctcacggctgacgccaagtttgagtcaggcgatgtgaaggccacagtggcagtgctgagtttcatcctctccagtgcggccaagcacagtgtcgatggcgaatccttgtccagtgaactgcagcagctggggctgcccaaagaactgaagcaggcccagaccctgatgagctccctgggctgaggagaagggtgttccaggcctgtgtggagccgccctgcccgtatggagtcacgccctctgaactgctcttcgggaggcagccctggttctaggatgctgaggccctggcccggactctggcctcccagatccccagctgcctcacttctctcttgagaacttggctcagggctcctgaggacctttcccagcattaccttcccttcccttgaaaggcaattgttggctgttttcataagcaggaaaaataaacagaagtataaag

SEQ ID NO: 121727 - DNA, 1373 bp, Homo sapiens
  Payload ID: 3865
  Gene Symbol: COMMD5
  Gene Name: COMM domain containing 5
  Uniprot ID: Q9GZQ3
  ENST ID: ENST00000305103
  CDS Start-End: 254-928
ggcccgcttttggctgcatcagccggggattgccggcgccaggtgctgggggcgactcggacagcgggagcgtggggtggagtaggatggagtctccctcccgagctgggggtgtgggcctaggaaaggctgcttcgccgctgtgttcggagagctctggatactgcggggcttttccgcggaggagcgcccgccggcatctgcatctgggaccgacctcctgggctggctgatcaaagaggaagcagcagcaatgtctgctgtgggggctgcaactccatacctgcatcatcctggtgatagtcacagtggccgagtgagtttcttgggggcccagcttcctccagaggtggcagcaatggcccggctactaggggacctagacaggagcacgttcagaaagttgctgaagtttgtggtcagcagcctgcagggggaggactgccgagaggctgtgcagcgtcttggggtcagcgccaacctgccggaggagcagctgggtgccctgctggcaggcatgcacacactgctccagcaggccctccgtctgccccccaccagcctgaagcctgacaccttcagggaccagctccaggagctctgcatcccccaagacctggtcggggacttggccagcgtggtatttgggagccagcggcccctccttgattctgtggcccagcagcagggggcctggctgccgcatgttgctgactttcggtggcgggtggatgtagcaatctccaccagtgccctggctcgctccctgcagccgagcgtcctgatgcagctgaagctttcagatgggtcagcataccgctttgaggtccccacagccaagttccaggagctgcggtacagcgtggccctggtcctaaaggagatggcagatctggagaagaggtgtgagcgcagactgcaggactgacccctcacttgaccagtcccattcagatccggcttggacaggcacctgagatggtgccaaagtgcagctgactcttcccacgacagccctgcccttcccatgaggcaggctcttcagtgagtgtttgaacgtaattatgtagttttctgtttaattgaaaaagagagctatgcctttttttctttttggaagtaaagcagctaaaaacatgtttctataggtgagtgttggacctcacaccctccccttccctgtacatttgtctttggtgctggacgtggccatgtgaggccaggttgaggccctttgtagacaacatacagttgctcagcctggccccatgtagccaggtgcttttgtagatcttgtgttttaggttgggcattttcactcttctgccttaaatccctgaccccatggagctgacattctagtgcggctgagg

SEQ ID NO: 121728 - DNA, 1305 bp, Homo sapiens
  Payload ID: 3865
  Gene Symbol: COMMD5
  Gene Name: COMM domain containing 5
  Uniprot ID: Q9GZQ3
  ENST ID: ENST00000402718
  CDS Start-End: 133-807
cggaagtggctctcagggcgcttccggggaccaggcccgcttttggctgcatcagccggggattgccggcgccaggcatctgcatctgggaccgacctcctgggctggctgatcaaagaggaagcagcagcaatgtctgctgtgggggctgcaactccatacctgcatcatcctggtgatagtcacagtggccgagtgagtttcttgggggcccagcttcctccagaggtggcagcaatggcccggctactaggggacctagacaggagcacgttcagaaagttgctgaagtttgtggtcagcagcctgcagggggaggactgccgagaggctgtgcagcgtcttggggtcagcgccaacctgccggaggagcagctgggtgccctgctggcaggcatgcacacactgctccagcaggccctccgtctgccccccaccagcctgaagcctgacaccttcagggaccagctccaggagctctgcatcccccaagacctggtcggggacttggccagcgtggtatttgggagccagcggcccctccttgattctgtggcccagcagcagggggcctggctgccgcatgttgctgactttcggtggcgggtggatgtagcaatctccaccagtgccctggctcgctccctgcagccgagcgtcctgatgcagctgaagctttcagatgggtcagcataccgctttgaggtccccacagccaagttccaggagctgcggtacagcgtggccctggtcctaaaggagatggcagatctggagaagaggtgtgagcgcagactgcaggactgacccctcacttgaccagtcccattcagatccggcttggacaggcacctgagatggtgccaaagtgcagctgactcttcccacgacagccctgcccttcccatgaggcaggctcttcagtgagtgtttgaacgtaattatgtagttttctgtttaattgaaaaagagagctatgcctttttttctttttggaagtaaagcagctaaaaacatgtttctataggtgagtgttggacctcacaccctccccttccctgtacatttgtctttggtgctggacgtggccatgtgaggccaggttgaggccctttgtagacaacatacagttgctcagcctggccccatgtagccaggtgcttttgtagatcttgtgttttaggttgggcattttcactcttctgccttaaatccctgaccccatggagctgacattctagtgcggctgaggggaggggaaacattgtaaaataaatcataaaaattaactggaatagctcatca

SEQ ID NO: 121729 - DNA, 1573 bp, Homo sapiens
  Payload ID: 3865
  Gene Symbol: COMMD5
  Gene Name: COMM domain containing 5
  Uniprot ID: Q9GZQ3
  ENST ID: ENST00000450361
  CDS Start-End: 423-1097
agttttattgggctataattcacataccatataattcacccattttgtacaattcaatgattttggcatattattttttaactatggtaaagtacatgttaaataaaatggctcggccattgtttcggaccgagctcctgcgctagggcccaacagagcagcccaaagcggaaccgagtcacgcgcgccggacgccacccgacaggaggggaaacggggcagctctcaaaaccctggaggcgcagaccgtccacacgggacagggacgcccgctcggctccgctccgcgctgatcctcaaggtctcgcggtttccccgccgcccacccggacgccgacgaaagccagcgagctcctcagcctcaggcatctgcatctgggaccgacctcctgggctggctgatcaaagaggaagcagcagcaatgtctgctgtgggggctgcaactccatacctgcatcatcctggtgatagtcacagtggccgagtgagtttcttgggggcccagcttcctccagaggtggcagcaatggcccggctactaggggacctagacaggagcacgttcagaaagttgctgaagtttgtggtcagcagcctgcagggggaggactgccgagaggctgtgcagcgtcttggggtcagcgccaacctgccggaggagcagctgggtgccctgctggcaggcatgcacacactgctccagcaggccctccgtctgccccccaccagcctgaagcctgacaccttcagggaccagctccaggagctctgcatcccccaagacctggtcggggacttggccagcgtggtatttgggagccagcggcccctccttgattctgtggcccagcagcagggggcctggctgccgcatgttgctgactttcggtggcgggtggatgtagcaatctccaccagtgccctggctcgctccctgcagccgagcgtcctgatgcagctgaagctttcagatgggtcagcataccgctttgaggtccccacagccaagttccaggagctgcggtacagcgtggccctggtcctaaaggagatggcagatctggagaagaggtgtgagcgcagactgcaggactgacccctcacttgaccagtcccattcagatccggcttggacaggcacctgagatggtgccaaagtgcagctgactcttcccacgacagccctgcccttcccatgaggcaggctcttcagtgagtgtttgaacgtaattatgtagttttctgtttaattgaaaaagagagctatgcctttttttctttttggaagtaaagcagctaaaaacatgtttctataggtgagtgttggacctcacaccctccccttccctgtacatttgtctttggtgctggacgtggccatgtgaggccaggttgaggccctttgtagacaacatacagttgctcagcctggccccatgtagccaggtgcttttgtagatcttgtgttttaggttgggcattttcactcttctgccttaaatccctgaccccatggagctgacattctagtgcggctgaggggaggggaaacattgtaaaataaatcataaa

SEQ ID NO: 121730 - DNA, 848 bp, Homo sapiens
  Payload ID: 3865
  Gene Symbol: COMMD5
  Gene Name: COMM domain containing 5
  ENST ID: ENST00000533270
  CDS Start-End: 336-848
gccggcgccaggtgctgggggcgactcggacagcgggagcgtggggtggagtaggatggagtctccctcccgagctgggggtgtgggcctaggaaaggctgcttcgccgctgtgttcggagagctctggatactgcggggcttttccgcggaggagcgcccgccggtaggttggccccgaaccgtgggggcggcgacggccgagtgccaatttgactctgtgcaccaaggtccccgcgccccggaacgggcgacgccgcgcccccatcagagccgcgggcatctgcatctgggaccgacctcctgggctggctgatcaaagaggaagcagcagcaatgtctgctgtgggggctgcaactccatacctgcatcatcctggtgatagtcacagtggccgagtgagtttcttgggggcccagcttcctccagaggtggcagcaatggcccggctactaggggacctagacaggagcacgttcagaaagttgctgaagtttgtggtcagcagcctgcagggggaggactgccgagaggctgtgcagcgtcttggggtcagcgccaacctgccggaggagcagctgggtgccctgctggcaggcatgcacacactgctccagcaggccctccgtctgccccccaccagcctgaagcctgacaccttcagggaccagctccaggagctctgcatcccccaagacctggtcggggacttggccagcgtggtatttgggagccagcggcccctccttgattctgtggcccagcagcagggggcctggctgccgcatgttgctgactttcggtggcgggtggatgtagcaatctccaccagtgccctggctcgctcc

SEQ ID NO: 121731 - DNA, 849 bp, Homo sapiens
  Payload ID: 3865
  Gene Symbol: COMMD5
  Gene Name: COMM domain containing 5
  ENST ID: ENST00000529143
  CDS Start-End: 336-849
cccggatggctctttggagtgggaaggagctcctggtgctggcgggacggtgaaggagttggcagtgggtggtcgttgactcccagggagaatggggcgccgtgaagcccgtggggagctcctgggctcccccagcgctgtgcagagtggcctgacaagtgcctcgaggacaggagctgtgccccgctgagctctgctccagtacctggtgtgctgaggtgggcacgtgcgtttcctctggcatagcaggtgcttgtgctgctgcactgctccttcaggcatctgcatctgggaccgacctcctgggctggctgatcaaagaggaagcagcagcaatgtctgctgtgggggctgcaactccatacctgcatcatcctggtgatagtcacagtggccgagtgagtttcttgggggcccagcttcctccagaggtggcagcaatggcccggctactaggggacctagacaggagcacgttcagaaagttgctgaagtttgtggtcagcagcctgcagggggaggactgccgagaggctgtgcagcgtcttggggtcagcgccaacctgccggaggagcagctgggtgccctgctggcaggcatgcacacactgctccagcaggccctccgtctgccccccaccagcctgaagcctgacaccttcagggaccagctccaggagctctgcatcccccaagacctggtcggggacttggccagcgtggtatttgggagccagcggcccctccttgattctgtggcccagcagcagggggcctggctgccgcatgttgctgactttcggtggcgggtggatgtagcaatctccaccagtgccctggctcgctccc

SEQ ID NO: 121732 - DNA, 1329 bp, Homo sapiens
  Payload ID: 3865
  Gene Symbol: COMMD5
  Gene Name: COMM domain containing 5
  ENST ID: ENST00000530332
  CDS Start-End: 1-511
ggtcagcagcctgcagggggaggactgccgagaggctgtgcagcgtcttggggtcagcgccaacctgccggaggagcagctgggtgccctgctggcaggcatgcacacactgctccagcaggccctccgtctgccccccaccagcctgaagcctgacaccttcagggaccagctccaggagctctgcatcccccaagacctggtcggggacttggccagcgtggtatttgggagccagcggcccctccttgattctgtggcccagcagcagggggcctggctgccgcatgttgctgactttcggtggcgggtggatgtagcaatctccaccagtgccctggctcgctccctgcagccgagcgtcctgatgcagctgaagctttcagatgggtcagcataccgctttgaggtccccacagccaagttccaggagctgcggtacagcgtggccctggtcctaaaggagatggcagatctggagaagaggtgtgagcgcagactgcaggactgacccctcacttgaccagtcccattcagatccggcttggacaggcacctgagatggtgccaaagtgcagctgactcttcccacgacagccctgcccttcccatgaggcaggctcttcaagcgatatctgaagtggctctgatgcctttgccacactcctcgcatctctgggacatcccttccgcactctctccctgactttcaagaggctgacaatccaggccgctgcttcccagctccttacatccctggggtgcgtccttggtgaaggtcttgggaaccacagtctcctcattcaaacagttattttggaaggtaaagcctgtcactttcagcccgggactgcccagatgactgtctaaccagacctcagaatcagaaacgtctccaaagccaggattctgaggaaagtcctgtggggagattctgaccactgtcccataggattctgattttaggatgtccatgtcctcacaggcctgctcattttcagtcctaatcgtagaatctgaaataaacaggaacaaagacgttccttaggccctgtgctcagagaaatgataagactacaaatgcgggggccagggctcaaggctcccaggatagttgcactgagcactgtgaggccccaggtggaaacgtgcaagagaaggcagagcctttgacagttctcaaaagtggtttcatactttttaccttgttcactcattcgatagcaatgaatgttcattgctggggcagggctgggttctgtgagcagagaggtccatcctacaggcactggtgtggggcacagtccatgcagaggcaaaggagacaaa

SEQ ID NO: 121733 - DNA, 1571 bp, Homo sapiens
  Payload ID: 3865
  Gene Symbol: COMMD5
  Gene Name: COMM domain containing 5
  Uniprot ID: Q9GZQ3
  ENST ID: ENST00000543949
  CDS Start-End: 400-1074
cggaagtggctctcagggcgcttccggggaccaggcccgcttttggctgcatcagccggggattgccggcgccaggtgctgggggcgactcggacagcgggagcgtggggtggagtaggatggagtctccctcccgagctgggggtgtgggcctaggaaaggctgcttcgccgctgtgttcggagagctctggatactgcggggcttttccgcggaggagcgcccgccggtaggttggccccgaaccgtgggggcggcgacggccgagtgccaatttgactctgtgcaccaaggtccccgcgccccggaacgggcgacgccgcgcccccatcagagccgcgggcatctgcatctgggaccgacctcctgggctggctgatcaaagaggaagcagcagcaatgtctgctgtgggggctgcaactccatacctgcatcatcctggtgatagtcacagtggccgagtgagtttcttgggggcccagcttcctccagaggtggcagcaatggcccggctactaggggacctagacaggagcacgttcagaaagttgctgaagtttgtggtcagcagcctgcagggggaggactgccgagaggctgtgcagcgtcttggggtcagcgccaacctgccggaggagcagctgggtgccctgctggcaggcatgcacacactgctccagcaggccctccgtctgccccccaccagcctgaagcctgacaccttcagggaccagctccaggagctctgcatcccccaagacctggtcggggacttggccagcgtggtatttgggagccagcggcccctccttgattctgtggcccagcagcagggggcctggctgccgcatgttgctgactttcggtggcgggtggatgtagcaatctccaccagtgccctggctcgctccctgcagccgagcgtcctgatgcagctgaagctttcagatgggtcagcataccgctttgaggtccccacagccaagttccaggagctgcggtacagcgtggccctggtcctaaaggagatggcagatctggagaagaggtgtgagcgcagactgcaggactgacccctcacttgaccagtcccattcagatccggcttggacaggcacctgagatggtgccaaagtgcagctgactcttcccacgacagccctgcccttcccatgaggcaggctcttcagtgagtgtttgaacgtaattatgtagttttctgtttaattgaaaaagagagctatgcctttttttctttttggaagtaaagcagctaaaaacatgtttctataggtgagtgttggacctcacaccctccccttccctgtacatttgtctttggtgctggacgtggccatgtgaggccaggttgaggccctttgtagacaacatacagttgctcagcctggccccatgtagccaggtgcttttgtagatcttgtgttttaggttgggcattttcactcttctgccttaaatccctgaccccatggagctgacattctagtgcggctgaggggaggggaaacattgtaaaataaatcataaaaattaactggaatagctcatc

SEQ ID NO: 121734 - DNA, 486 bp, Homo sapiens
  Payload ID: 3866
  Gene Symbol: COMMD6
  Gene Name: COMM domain containing 6
  Uniprot ID: Q7Z4G1
  ENST ID: ENST00000355801
  CDS Start-End: 37-333
ctctcgagtccgggccgcaagtcccagacgctgcccatggaggcgtccagcgagccgccgctggatgctaagtccgatgtcaccaaccagcttgtagattttcagtggaaactgggtatggctgtgagctcagacacttgcagatctcttaagtatccttacgttgcagtgatgctaaaagtggcagatcattcaggccaagtaaagaccaagtgctttgaaatgacgattccacagtttcagcctcagctcctggcaacctccagtctcctttctgcttctaatttctacagacagttcaaggaaattgctgcagttattgaaacggtgtgaagacggattctttggttgataaattgctatcattctaaagtcatggacttcactttcggcaacaaaactaaataaggatggaacatttattgaatgaaaaatgcacttttgtttttccatttttttaaataataaaaatcagacaaacaggaa

SEQ ID NO: 121735 - DNA, 580 bp, Homo sapiens
  Payload ID: 3866
  Gene Symbol: COMMD6
  Gene Name: COMM domain containing 6
  ENST ID: ENST00000377612
  CDS Start-End: 166-285
tgatcaccaaattcaaggcggcccttgattagattctagttgtggatgggcttcccctgctacgtccgccccatgcgccaggccgctaggggcaggacgtggaagcggaagcgctggtctgggggcgttctctcgagtccgggccgcaagtcccagacgctgcccatggaggcgtccagcgagccgccgctggatgctaagtccgatgtgagttccaacctggaaggagaattttcagtggaaactgggtatggctgtgagctcagacacttgcagatctcttaagtatccttacgttgcagtgatgctaaaagtggcagatcattcaggccaagtaaagaccaagtgctttgaaatgacgattccacagtttcagaatttctacagacagttcaaggaaattgctgcagttattgaaacggtgtgaagacggattctttggttgataaattgctatcattctaaagtcatggacttcactttcggcaacaaaactaaataaggatggaacatttattgaatgaaaaatgcacttttgtttttccatttttttaaataataaaaatcagacaaacaggaa

SEQ ID NO: 121736 - DNA, 1793 bp, Homo sapiens
  Payload ID: 3866
  Gene Symbol: COMMD6
  Gene Name: COMM domain containing 6
  Uniprot ID: Q7Z4G1
  ENST ID: ENST00000377615
  CDS Start-End: 166-423
tgatcaccaaattcaaggcggcccttgattagattctagttgtggatgggcttcccctgctacgtccgccccatgcgccaggccgctaggggcaggacgtggaagcggaagcgctggtctgggggcgttctctcgagtccgggccgcaagtcccagacgctgcccatggaggcgtccagcgagccgccgctggatgctaagtccgatgtcaccaaccagcttgtagattttcagtggaaactgggtatggctgtgagctcagacacttgcagatctcttaagtatccttacgttgcagtgatgctaaaagtggcagatcattcaggccaagtaaagaccaagtgctttgaaatgacgattccacagtttcagaatttctacagacagttcaaggaaattgctgcagttattgaaacggtgtgaagacggattctttggttgataaattgctatcattctaaagtcatggacttcactttcggcaacaaaactaaataaggatggaacatttattgaatgaaaaatgcacttttgtttttccatttttttaaataataaaaatcagacaaacaggaactgggtagtggtgatgaatgcaaaactttgtgaatgtgctttataaaagtgataattagacactttagaggatatacttggtgataatgtgaatgatgtaatcagactaacagttgaatcattgctgttggaggcagcacaaatttatgtgttacaacagtagtttaaaaacttgtactggatggaacccattttataaacagtcttatttggagtcatgtatataaaaatatatataaattagaaaagtagtatttgattaggataactttacaaattcaatagtatagccatcacttattataatggcaatcagaagagtgaggcttcttttttcaaacttttgtaatcagattaagattgaccattgctcctttacacagtattagtctagcattcaattatttctgttattaatggttgtagaaagttcaaatacatacgcagagttggaaagacgagttttagtctgagttctgtacgacggagttaacccgttagcacaagttattgcattagatgatctctgttgaatttaaatacataaacctgttgttaaacgcttttatactataaagccaccacattgtatggcatttgtttagaagtaagcaaatagaccaccggaatagaatagatggcctagaaatagatcaagacattctggtccgccatattagaaatttaaaccctcttcacaccctgtctgcatttctgcaggtctgtgtgagtccactttcttttttgttccctgctaggtagcacacagctgtgaggagcccaggactgctgcctgccgcagcccacctgtgcgctcagattcctaccagcttgatgagttagctgatgggccatttgtgcataccaactacccacagacatttctattacccaccctctggatgccagtgcattaatgattctagaattaggagaaaccaaagatcccttctctctccctcccacaaccagtgtcgtcgtgttcctagaaataagagtagaaacccctctatctgggttaaaacagcaaacctgccttctgtaactgtgcatgaggttcctctgtctcccacttacttcggattaacaccttcctctttccccttccctgtttgcagggtagcatttctaggtttaaggcaatatgcaaaaagacccaaagttaggccctggctcaaacactgtgggtagcagatttgaaataaatttaaattgca

SEQ ID NO: 121737 - DNA, 594 bp, Homo sapiens
  Payload ID: 3866
  Gene Symbol: COMMD6
  Gene Name: COMM domain containing 6
  ENST ID: ENST00000377619
  CDS Start-End: 139-441
cacggccgcgaggccgtgccaccctgagccttccccaggtctcccctagtcctgtgtccgcgagccggtgaccttcagccgtccctcttgcattgctccttctcttttgcacctgagccggtagccgttgccattgtaatgaaagctcctcttccccaccctgcactagcccgaagaatgcagatcaaggattgttgggctttgattaggcgacagttattcgaagccaggaacacgcttgtagattttcagtggaaactgggtatggctgtgagctcagacacttgcagatctcttaagtatccttacgttgcagtgatgctaaaagtggcagatcattcaggccaagtaaagaccaagtgctttgaaatgacgattccacagtttcagaatttctacagacagttcaaggaaattgctgcagttattgaaacggtgtgaagacggattctttggttgataaattgctatcattctaaagtcatggacttcactttcggcaacaaaactaaataaggatggaacatttattgaatgaaaaatgcacttttgtttttccatttttttaaataataaaaatcagacaaacaggaa

SEQ ID NO: 121738 - DNA, 1628 bp, Homo sapiens
  Payload ID: 3866
  Gene Symbol: COMMD6
  Gene Name: COMM domain containing 6
  Uniprot ID: Q7Z4G1
  ENST ID: ENST00000406936
  CDS Start-End: 1-258
atggaggcgtccagcgagccgccgctggatgctaagtccgatgtcaccaaccagcttgtagattttcagtggaaactgggtatggctgtgagctcagacacttgcagatctcttaagtatccttacgttgcagtgatgctaaaagtggcagatcattcaggccaagtaaagaccaagtgctttgaaatgacgattccacagtttcagaatttctacagacagttcaaggaaattgctgcagttattgaaacggtgtgaagacggattctttggttgataaattgctatcattctaaagtcatggacttcactttcggcaacaaaactaaataaggatggaacatttattgaatgaaaaatgcacttttgtttttccatttttttaaataataaaaatcagacaaacaggaactgggtagtggtgatgaatgcaaaactttgtgaatgtgctttataaaagtgataattagacactttagaggatatacttggtgataatgtgaatgatgtaatcagactaacagttgaatcattgctgttggaggcagcacaaatttatgtgttacaacagtagtttaaaaacttgtactggatggaacccattttataaacagtcttatttggagtcatgtatataaaaatatatataaattagaaaagtagtatttgattaggataactttacaaattcaatagtatagccatcacttattataatggcaatcagaagagtgaggcttcttttttcaaacttttgtaatcagattaagattgaccattgctcctttacacagtattagtctagcattcaattatttctgttattaatggttgtagaaagttcaaatacatacgcagagttggaaagacgagttttagtctgagttctgtacgacggagttaacccgttagcacaagttattgcattagatgatctctgttgaatttaaatacataaacctgttgttaaacgcttttatactataaagccaccacattgtatggcatttgtttagaagtaagcaaatagaccaccggaatagaatagatggcctagaaatagatcaagacattctggtccgccatattagaaatttaaaccctcttcacaccctgtctgcatttctgcaggtctgtgtgagtccactttcttttttgttccctgctaggtagcacacagctgtgaggagcccaggactgctgcctgccgcagcccacctgtgcgctcagattcctaccagcttgatgagttagctgatgggccatttgtgcataccaactacccacagacatttctattacccaccctctggatgccagtgcattaatgattctagaattaggagaaaccaaagatcccttctctctccctcccacaaccagtgtcgtcgtgttcctagaaataagagtagaaacccctctatctgggttaaaacagcaaacctgccttctgtaactgtgcatgaggttcctctgtctcccacttacttcggattaacaccttcctctttccccttccctgtttgcagggtagcatttctaggtttaaggcaatatgcaaaaagacccaaagttaggccctggctcaaacactgtgggtagcagatttgaaataaatttaaattgca

SEQ ID NO: 121739 - DNA, 120 bp, Homo sapiens
  Payload ID: 3866
  Gene Symbol: COMMD6
  Gene Name: COMM domain containing 6
  ENST ID: ENST00000626103
  CDS Start-End: 1-120
atggaggcgtccagcgagccgccgctggatgctaagtccgatgtgagttccaacctggaaggagaattttcagtggaaactgggtatggctgtgagctcagacacttgcagatctcttaa

SEQ ID NO: 121740 - DNA, 1900 bp, Homo sapiens
  Payload ID: 3867
  Gene Symbol: COMMD7
  Gene Name: COMM domain containing 7
  Uniprot ID: Q86VX2
  ENST ID: ENST00000278980
  CDS Start-End: 607-1209
gtgatgctggggtgatgctgatgcccttccaaggttgagacctagtctctactctgatgtcagctctccgagagacactctggcctgctttgttcccttccctgtccccagtgtctggcatcgagtaggctgccataaatatctctggagtgcatagtaacagtgatgatgataatagcagctagccattgattgaagacctcttgtgtgccggtctctgcgttaaacatttctggaggcttaactcatttaaggagctaccccagccatcattttctcagatggtgaaactgaggttcagagaggccaagcgccgtacccaaaggtcactcagcgggagagctggcaggaaacctcgcgtctgccggtgccggcgccgcccctgcccctccccggagcccggcggccgcgcgtgtccgcggccctgcgagggctccccggctccggacagcccagggcggccgggggaggagtgcgctgcgacggccgtggcgaaagtgcggttgtggatgcgcggagaggccggcagcggtggcagcggcagcggaggaggaagctgagcagggcggcggcggcggtggaacctgcggggctggggcgcgcgccatgggccgcctgcactgcactgaggacccggtgccggaggccgtgggcggcgacatgcagcagctgaaccagctgggcgcgcagcagttctcagccctgacagaggtgcttttccacttcctaactgagccaaaagaggtggaaagatttctggctcagctctctgaatttgccaccaccaatcagatcagtcttggctccctcagaagcatcgtgaaaagcctccttctggttccaaatggtgctttgaagaagagtctcacagccaagcaggtccaggcggatttcataactctgggtcttagtgaggagaaagccacttacttttctgaaaagtggaagcagaatgctcccacccttgctcgatgggccataggtcagactctgatgattaaccagctcatagatatggagtggaaatttggagtgacatctgggagcagcgaattggagaaagtgggaagtatatttttacaactaaagttggtggttaagaaaggaaatcaaaccgaaaatgtgtatatagaattaaccttgcctcagttctacagcttcctgcacgagatggagcgagtcagaaccagcatggagtgtttctgctgatttctgtccctgcatctcccctggccccgttccctgccctcctcccttccctgggtgactgctctgagaggcacttcactcacaggcctgtgggatgctccatggggccctgctggctccatggggcccaggtgcaaagggtttctgaaaaacagcaggattaagtactgaaagagcccaacacaattaccctgtaaactctctgttagggcaaccaccaccacctgtcttccaggacacatttttagatactctgacaggccactgcatctcagattcaggggagaaaataagttgtcacctccccttcaaagttccagagtaaacaaatggtgccatcattcaagataacatgctgatcaccctcctcccaaaaagcaagagcttgtttatggctgaggaatcggcggattgtctgaatgacacatatacagagcccccacggatttctgcacactctgggtctgtgctggtggaacattgccaatcagttcttaatgaggcacctgtgtgtaaatacatgcttggtcttctctgcagagaactgaggctaaactctgtccctacttctggttttgccctgtcatgtcgtaacgaggtgggccttttgaggccattttagtttgagttcgagccaaccacctctgttggttagatgatgaataaaaaggttctgaagaaaaggtctgga

SEQ ID NO: 121741 - DNA, 1343 bp, Homo sapiens
  Payload ID: 3867
  Gene Symbol: COMMD7
  Gene Name: COMM domain containing 7
  Uniprot ID: Q86VX2
  ENST ID: ENST00000446419
  CDS Start-End: 65-664
agcggaggaggaagctgagcagggcggcggcggcggtggaacctgcggggctggggcgcgcgccatgggccgcctgcactgcactgaggacccggtgccggaggccgtgggcggcgacatgcagcagctgaaccagctgggcgcgcagttctcagccctgacagaggtgcttttccacttcctaactgagccaaaagaggtggaaagatttctggctcagctctctgaatttgccaccaccaatcagatcagtcttggctccctcagaagcatcgtgaaaagcctccttctggttccaaatggtgctttgaagaagagtctcacagccaagcaggtccaggcggatttcataactctgggtcttagtgaggagaaagccacttacttttctgaaaagtggaagcagaatgctcccacccttgctcgatgggccataggtcagactctgatgattaaccagctcatagatatggagtggaaatttggagtgacatctgggagcagcgaattggagaaagtgggaagtatatttttacaactaaagttggtggttaagaaaggaaatcaaaccgaaaatgtgtatatagaattaaccttgcctcagttctacagcttcctgcacgagatggagcgagtcagaaccagcatggagtgtttctgctgatttctgtccctgcatctcccctggccccgttccctgccctcctcccttccctgggtgactgctctgagaggcacttcactcacaggcctgtgggatgctccatggggccctgctggctccatggggcccaggtgcaaagggtttctgaaaaacagcaggattaagtactgaaagagcccaacacaattaccctgtaaactctctgttagggcaaccaccaccacctgtcttccaggacacatttttagatactctgacaggccactgcatctcagattcaggggagaaaataagttgtcacctccccttcaaagttccagagtaaacaaatggtgccatcattcaagataacatgctgatcaccctcctcccaaaaagcaagagcttgtttatggctgaggaatcggcggattgtctgaatgacacatatacagagcccccacggatttctgcacactctgggtctgtgctggtggaacattgccaatcagttcttaatgaggcacctgtgtgtaaatacatgcttggtcttctctgcagagaactgaggctaaactctgtccctacttctggttttgccctgtcatgtcgtaacgaggtgggccttttgaggccattttagtttgagttcgagccaaccacctctgttggttagatgatgaataaaaaggttctgaag

SEQ ID NO: 121742 - DNA, 488 bp, Homo sapiens
  Payload ID: 3867
  Gene Symbol: COMMD7
  Gene Name: COMM domain containing 7
  ENST ID: ENST00000474815
  CDS Start-End: 16-488
gctggggcgcgcgccatgggccgcctgcactgcactgaggacccggtgccggaggccgtgggcggcgacatgcagcagctgaaccagctgggcgcgcagcagttctcagccctgacagaggtgcttttccacttcctaactgagccaaaagaggcccgggttttcactgttctctctctgcaggtggaaagatttctggctcagctctctgaatttgccaccaccaatcagatcagtcttggctccctcagaagcatcgtgaaaagcctccttctggttccaaatggtgctttgaagaagagtctcacagccaagcaggtccaggcggatttcataactctgggtcttagtgaggagaaagccacttacttttctgaaaagtggaagcagaatgctcccacccttgctcgatgggccataggtcagactctgatgattaaccagctcatagatatggagtggaaatttggagtgacatctgggagcag

SEQ ID NO: 121743 - DNA, 1987 bp, Homo sapiens
  Payload ID: 3867
  Gene Symbol: COMMD7
  Gene Name: COMM domain containing 7
  ENST ID: ENST00000610160
  CDS Start-End: 55-228
gaagctgagcagggcggcggcggcggtggaacctgcggggctggggcgcgcgccatgggccgcctgcactgcactgaggacccggtgccggaggccgtgggcggcgacatgcagcagctgaaccagctgggcgcgcaggctgcaggtgccaaccaaggcagtcttggaggcatcctgcttctgtgctggttgggatgccttttcataccaccaaggctgctgaaatagttctcagccctgacagaggtgcttttccacttcctaactgagccaaaagaggtggaaagatttctggctcagctctctgaatttgccaccaccaatcagatcagtcttggctccctcagaagcatcgtgaaaagcctccttctggttccaaatggtgctttgaagaagagtctcacagccaagcaggtccaggcggatttcataactctgggtcttagtgaggagaaagccacttacttttctgaaaagtggaagcagaatgctcccacccttgctcgatgggccataggtcagactctgatgattaaccagctcatagatatggagtggaaatttggagtgacatctgggagcagcgaattggagaaagtgggaagtatatttttacaactaaagttggtggttaagaaaggaaatcaaaccgaaaatgtgtatataggtgagtctgaattcccacttgagcctcttcaccttttttgtgttctctgcaatcaggggctggtgacgctcaccacaaatcatgtcttctataaaaacagtcattgccagctgtggagtagctgttccactgcctttcctctcctgaaagatggcacaaggagtgttagaaagccactggcaggttggagcccccacagttgaagagccgttttgaaaaagggaaagggtgggaacggaatggctgggattgaagaagaaggttgacgagcaagaagctcttgccatagaagtcacattgaacatcccgaatgataccctttcatctctttgtgccatggagctgtgccatttgaacactcactccccttttttttcctttggagcagagaaccttctgcattcaagtctctcagttctttattatgatcagttacccatcaagagctgcttagatgtattaagccaaaaaagaaaaaaaaaatcctccgggtggaaattaattttcttggatgattctgtggagttggaaacatttatctgaagctgaattttctctccccagaattaaccttgcctcagttctacagcttcctgcacgagatggagcgagtcagaaccagcatggagtgtttctgctgatttctgtccctgcatctcccctggccccgttccctgccctcctcccttccctgggtgactgctctgagaggcacttcactcacaggcctgtgggatgctccatggggccctgctggctccatggggcccaggtgcaaagggtttctgaaaaacagcaggattaagtactgaaagagcccaacacaattaccctgtaaactctctgttagggcaaccaccaccacctgtcttccaggacacatttttagatactctgacaggccactgcatctcagattcaggggagaaaataagttgtcacctccccttcaaagttccagagtaaacaaatggtgccatcattcaagataacatgctgatcaccctcctcccaaaaagcaagagcttgtttatggctgaggaatcggcggattgtctgaatgacacatatacagagcccccacggatttctgcacactctgggtctgtgctggtggaacattgccaatcagttcttaatgaggcacctgtgtgtaaatacatgcttggtcttctctgcagagaactgaggctaaactctgtccctacttctggttttgccctgtcatgtcgtaacgaggtgggccttttgaggccattttagtttgagttcgagccaaccacctctgttggttagatgatgaataaaaaggttctgaag

SEQ ID NO: 121744 - DNA, 1469 bp, Homo sapiens
  Payload ID: 3868
  Gene Symbol: COMMD8
  Gene Name: COMM domain containing 8
  Uniprot ID: Q9NX08
  ENST ID: ENST00000381571
  CDS Start-End: 69-620
gggcgagtcgtagctttagacaagcggccagccttgacacgtgacccaagccccagcttcgcgcagggatggagccggaagaggggacgcccttgtggcggctgcagaagctgccggccgagctgggcccgcagcttcttcacaaaataattgatggcatttgtggtcgagcttatcctgtgtaccaagattatcacactgtttgggaatcagaagaatggatgcacgttttagaagatattgccaaatttttcaaagccatagttggtaaaaacttacctgatgaagagatatttcagcagttgaatcagttgaattcacttcatcaagaaactatcatgaaatgcgtgaaaagtaggaaagatgaaatcaaacaggctctgtcaagagaaatagttgctatttcctctgcacagctacaggattttgattggcaggtaaagcttgcactttccagtgacaagattgctgcattacgaatgccacttttaagcctgcatctagatgtaaaagaaaatggtgaagtaaaaccttattctattgaaatgagtagagaggagctgcagaatctaatacagtccttggaagcagcgaataaggtggtcctgcagttgaaataactggaaatgatgaataccagtcctatcagattttattgctccaacttatatggcagagtgaatactgcgtgttcagaaaccttgtgatgtcttgactgttgcaccaggctgagaaagcagcaatattgatattataaagataaaaatttatcaacattccttaacaggaaattacatggttgagaggaaatgcataaaatgaaagatgaaaaatctatagtagcagtttatattttcatgattgttttgcctcatttattaaatatttgagaaatctttggagatacatagttttattgaaagctaaaaataggttctaaagtaatgtaaaaatataaagcacaaatatacttgaatattgcttaaagaattgtgtgaatagcaacatatattatggatatatactttgtgatatttttaaaaaataattttttcaaagaatgtataagctgcatatataactcaggagattccatgtctttctcatatttcagaggaaagattataaaatataaaatttcttagagaacacctctttgtcagagataaacaagaacaaatactctaaacttatgtgaacagttttgagtttatgaattctagaaactaaaatcaagaatacagaaaaatgaaaataacattttacttctgcgcttctatgtttgggaaacattgctctgataaaaaatagctgtcattatgcagtgtgtatattcaaatatgagataagactatgtacacatccacttttgttaataaactcaatattgaatactttgggatgttaaattcattggaaaaacaaaccatttgtaacctcagttaactttaacaacaagcattctgagc

SEQ ID NO: 121745 - DNA, 2954 bp, Homo sapiens
  Payload ID: 3869
  Gene Symbol: COMMD9
  Gene Name: COMM domain containing 9
  Uniprot ID: Q9P000
  ENST ID: ENST00000263401
  CDS Start-End: 18-614
catgtgacttcggcaagatggctgccctgacagcggagcattttgcagcactccagagcctgctcaaggcctcctcgaaagatgttgtcagacagctgtgtcaagaaagcttttccagttcagcccttggcttgaaaaaactcttggatgttacatgttccagcttgtctgtgacccaggaggaggcagaggaactgctccaggctctgcaccgcctcactaggctggtggcattccgtgacctgtcctctgccgaggcaattctggctctctttccagaaaatttccaccaaaacctcaaaaacctgctgacaaagatcatcctagaacatgtgtctacttggagaaccgaagcccaggcaaatcagatctctctgccacgcctggtcgatctggactggagagtggatatcaaaacctcctcagacagcatcagccgcatggccgtccccacctgcctgctccagatgaagatccaagaagatcccagcctatgcggagacaaaccctccatctcagctgtcaccgtggagctgagcaaagaaacactggacaccatgttagatggcctgggccgcatccgagaccaactctctgccgtggccagtaaatgatccagccagctgccagggccactgccatgacccagctgctcatgagtgataaatgtctccccatatgcaggctgcccttgcagctgcagctgacaacaggcaggatggtggggacagcagggggctactgccatccagaagttacagttggattgggaagaagcagccagatcccccgctgttctcactcatcttctttctctttctgaagctggagagcagaagcccccatctttgaaaagctcctgagtgcaacttaattaccaccatggcagggtgagggaacatttgcatcgtcagctgcctctgcatagctgtttgagaaattcaggcccaaatcatgcagcctatccaataagtaagtttatttccaacattagctctaattagttcatttccaatcccagaacacatggagggaatcggacaggtgatgccagcagttcctgctcctctgtcagggaagccaggcagagcccacagagcatggtccatccagagtgttccctgagccccctccaccatactggaacccctcttcagtgtaggaagtctgaaatgggtgctaattcccttcttcatgaaaccagggccctcttccttcatctaatgcagccactcctaggtgaagaagtgggaataattggaactaaacaacagttctaaaacttccatgatttttgtagcttcttttgtccccaagttgaagcttttggccagtaccttctctagtttttaaagatgatcccaacttcctaattcccagctaagcccttgacccatggtgtgacatgaaatcaggcaattgaatcgcaccactttctgtgttttcacctgttacgtagaacaaaaggaagcaaggtggccaggcgcaatggctcacgcctgtaatcccagcactttgggaggccgaggcaggcagatcatgaggtcaggagatcgagaccatggtgaaaccccatctctactaaaaatacaaaaaattagctgggcgcggtggcgggcatctgtagtcccagctcctcgggaggctgaggcaggagaatggcgtgaacctgggaggcagagcttgcagtgagccgagatcgtgccactgcactccagtctgggtgacagagaaggactcgtctcaaaaaataaaaataaataaaaaggaagcaaggctaatcatcagtatgtgcttgttacaagagctatgatgaaggcactccttcgagtttaaccaaatgagatcatctctgtcatgtgcctcacgcctcacagggactccatgtgtgaagattcccccttcactcaccagatcatctccatggcaacagcttgcagcctgctcttggagtgctttgttttggcagcttctctgctagtttgtgtatggagtgaatggaggaggtaaatccacagattaagaatatgctgtcaggagtcaggcagccaaggtcagaagccagctctgcttctcagtggtaaggtgcttgacttctacatctcaattttcacccactttgtacttttttcctaaattaaatgagtataatagtagtacctacttgataggacttttgtgaaaattaaatgatataatgcacctaaaaacagtactgttacaactaataggaaaggctttgattattaatggatgagagtagaaagcttggtgcatttattgtctcatctactataacagagttggtgtgagaattagtattatcatcctccctttattgaccaggaaaccagctcattgagattgagtcatctgctggtaaatggtctcattaagaggtggacccatatttctctagctttctctttacaacacaggactttgcaaggaacatataattctgtgactagcgccatttggaaaatgttgaaactgaagtagagatgagagatcttacgtctgcctacccagtgagatacgaggaaggtcaagggaaaaaaaattccaagctcttctttatctgctataggaaatgaacattcaattttttgcatgcaacgacaagaggtcaaggaccccagaagccagcccgctacttccaagttgagagcccctggtcataccctccagttgagctcagatttgtcacaaatttacccctctcctttccttccattccccatgacctgcagagagagatgtcagataccttcctcttggcctcccatgggcatccataagaaacttacttgaagcaagaagcccagtataggtgtctgggcagttggacatttcctctagccagatctgtccgaatagagccatctgggtacatgacgcagagggcatttgataaataactggaaaagtcaataaatctttgctacccttca

SEQ ID NO: 121746 - DNA, 917 bp, Homo sapiens
  Payload ID: 3869
  Gene Symbol: COMMD9
  Gene Name: COMM domain containing 9
  Uniprot ID: Q9P000
  ENST ID: ENST00000452374
  CDS Start-End: 38-508
gcttccctgggtgccacggtcatgtgacttcggcaagatggctgccctgacagcggagcattttgcagcactccagagcctgctcaagctgctccaggctctgcaccgcctcactaggctggtggcattccgtgacctgtcctctgccgaggcaattctggctctctttccagaaaatttccaccaaaacctcaaaaacctgctgacaaagatcatcctagaacatgtgtctacttggagaaccgaagcccaggcaaatcagatctctctgccacgcctggtcgatctggactggagagtggatatcaaaacctcctcagacagcatcagccgcatggccgtccccacctgcctgctccagatgaagatccaagaagatcccagcctatgcggagacaaaccctccatctcagctgtcaccgtggagctgagcaaagaaacactggacaccatgttagatggcctgggccgcatccgagaccaactctctgccgtggccagtaaatgatccagccagctgccagggccactgccatgacccagctgctcatgagtgataaatgtctccccatatgcaggctgcccttgcagctgcagctgacaacaggcaggatggtggggacagcagggggctactgccatccagaagttacagttggattgggaagaagcagccagatcccccgctgttctcactcatcttctttctctttctgaagctggagagcagaagcccccatctttgaaaagctcctgagtgcaacttaattaccaccatggcagggtgagggaacatttgcatcgtcagctgcctctgcatagctgtttgagaaattcaggcccaaatcatgcagcctatccaataagtaagtttatttccaacattagctctaattagttcatttccaatcccagaa

SEQ ID NO: 121747 - DNA, 881 bp, Homo sapiens
  Payload ID: 3869
  Gene Symbol: COMMD9
  Gene Name: COMM domain containing 9
  ENST ID: ENST00000532705
  CDS Start-End: 13-570
gacttcggcaagatggctgccctgacagcggagcattttgcagcactccagagcctgctcaaggcctcctcgaaagatgttgtcagacagctgtgtcaagaaagcttttccagttcagcccttggcttgaaaaaactcttggatgttacatgttccagcttgtctgtgacccaggaggaggcagaggaactgctccaggctctgcaccgcctcactaggctggtggcattccgtgacctgtcctctgccgaggcaattctggctctctttccagaaaatttccaccaaaacctcaaaaacctgctgacaaagatcatcctagaacatgttctctctgccacgcctggtcgatctggactggagagtggatatcaaaacctcctcagacagcatcagccgcatggccgtccccacctgcctgctccagatgaagatccaagaagatcccagcctatgcggagacaaaccctccatctcagctgtcaccgtggagctgagcaaagaaacactggacaccatgttagatggcctgggccgcatccgagaccaactctctgccgtggccagtaaatgatccagccagctgccagggccactgccatgacccagctgctcatgagtgataaatgtctccccatatgcaggctgcccttgcagctgcagctgacaacaggcaggatggtggggacagcagggggctactgccatccagaagttacagttggattgggaagaagcagccagatcccccgctgttctcactcatcttctttctctttctgaagctggagagcagaagcccccatctttgaaaagctcctgagtgcaacttaattaccaccatggcagggtgagggaacatttgcatcgtcagctgcctc

SEQ ID NO: 121748 - DNA, 745 bp, Homo sapiens
  Payload ID: 3870
  Gene Symbol: COMMD3-BMI1
  Gene Name: COMMD3-BMI1 readthrough
  ENST ID: ENST00000417470
  CDS Start-End: 1-161
agatgctggcggatccccgctccttcgactccaacgccttcacgcttctcctccgggcggcattccagagtctgctggacgcccaggcggacgaggccgtgttaggattttttatcaagcagaaatgcatcgaacaacgagaatcaagatcactgagctaaatccccacctgatgtgtgtgctttgtggagggtacttcattgatgccacaaccataatagaatgtctacattccttctgtaaaacgtgtattgttcgttacctggagaccagcaagtattgtcctatttgtgatgtccaagttcacaagaccagaccactactgaatataaggtcagataaaactctccaagatattgtatacaaattagttccagggcttttcaaaaatgaaatgaagagaagaagggatttttatgcagctcatccttctgctgatgctgccaatggctctaatgaagatagaggagaggttgcagatgaagataagagaattataactgatgatgagataataagcttatccattgaattctttgaccagaacagattggatcggaaagtaaacaaagacaaagagaaatctaaggaggaggtgaatgataaaagatacttacgatgcccagcagcaatgactgtgatgcacttaagaaagtttctcagaagtaaaatggacatacctaatactttccagattgatgtcatgtatgaggaggaacctttaaaggattattatacactaatg

SEQ ID NO: 121749 - DNA, 508 bp, Homo sapiens
  Payload ID: 3870
  Gene Symbol: COMMD3-BMI1
  Gene Name: COMMD3-BMI1 readthrough
  ENST ID: ENST00000475460
  CDS Start-End: 31-508
gtgcgtgtcgaaggtcacggcgcgctcacaatggagctctcggagtctgtgcagaaaggcttccagatgctggcggatccccgctccttcgactccaacgccttcacgcttctcctccgggcggcattccagagtctgctggacgcccaggcggacgaggccgtgttagatcatccagacttgaaacatatcgacccagtggttttaaaacattgtcatgcagcagctgcaacttacatactagaggcaggaaagcaccgagctgacaagtcaactctaagcacttatctagaagactgtaaatttgacagagagcgaatagaactgttttgcacggaatatcagaataataagaattccctagaaatcctactgggaaggattttttatcaagcagaaatgcatcgaacaacgagaatcaagatcactgagctaaatccccacctgatgtgtgtgctttgtggagggtacttcattgatgccacaaccataatagaatgtctacatt

SEQ ID NO: 121750 - DNA, 1419 bp, Homo sapiens
  Payload ID: 3870
  Gene Symbol: COMMD3-BMI1
  Gene Name: COMMD3-BMI1 readthrough
  ENST ID: ENST00000602390
  CDS Start-End: 10-1419
gcgctcacaatggagctctcggagtctgtgcagaaaggcttccagatgctggcggatccccgctccttcgactccaacgccttcacgcttctcctccgggcggcattccagagtctgctggacgcccaggcggacgaggccgtgttagatcatccagacttgaaacatatcgacccagtggttttaaaacattgtcatgcagcagctgcaacttacatactagaggcaggaaagcaccgagctgacaagtcaactctaagcacttatctagaagactgtaaatttgacagagagcgaatagaactgttttgcacggaatatcagaataataagaattccctagaaatcctactgggaagaacactgattccccatcctatccagagattagttttagttgcagcatggaacaattacaggattttttatcaagcagaaatgcatcgaacaacgagaatcaagatcactgagctaaatccccacctgatgtgtgtgctttgtggagggtacttcattgatgccacaaccataatagaatgtctacattccttctgtaaaacgtgtattgttcgttacctggagaccagcaagtattgtcctatttgtgatgtccaagttcacaagaccagaccactactgaatataaggtcagataaaactctccaagatattgtatacaaattagttccagggcttttcaaaaatgaaatgaagagaagaagggatttttatgcagctcatccttctgctgatgctgccaatggctctaatgaagatagaggagaggttgcagatgaagataagagaattataactgatgatgagataataagcttatccattgaattctttgaccagaacagattggatcggaaagtaaacaaagacaaagagaaatctaaggaggaggtgaatgataaaagatacttacgatgcccagcagcaatgactgtgatgcacttaagaaagtttctcagaagtaaaatggacatacctaatactttccagattgatgtcatgtatgaggaggaacctttaaaggattattatacactaatggatattgcctacatttatacctggagaaggaatggtccacttccattgaaatacagagttcgacctacttgtaaaagaatgaagatcagtcaccagagagatggactgacaaatgctggagaactggaaagtgactctgggagtgacaaggccaacagcccagcaggaggtattccctccacctcttcttgtttgcctagccccagtactccagtgcagtctcctcatccacagtttcctcacatttccagtactatgaatggaaccagcaacagccccagcggtaaccaccaatcttcttttgccaatagacctcgaaaatcatcagtaaatgggtcatcagcaacttcttctggttga

SEQ ID NO: 121751 - DNA, 329 bp, Homo sapiens
  Payload ID: 3870
  Gene Symbol: COMMD3-BMI1
  Gene Name: COMMD3-BMI1 readthrough
  ENST ID: ENST00000489125
  CDS Start-End: 1-329
agtctgtgcagaaaggcttccagatgctggcggatccccgctccttcgactccaacgccttcacgcttctcctccgggcggcattccagagtctgctggacgcccaggcggacgaggccgtgttagatcatccagacttgaaacatatcgacccagtggttttaaaacattgtcatgcagcagctgcaacttacatactagaggcaggaaagcaccgagctgacaagtcaactctaaggattttttatcaagcagaaatgcatcgaacaacgagaatcaagatcactgagctaaatccccacctgatgtgtgtgctttgtggagggtac

SEQ ID NO: 121752 - DNA, 7470 bp, Homo sapiens
  Payload ID: 3871
  Gene Symbol: CR1
  Gene Name: complement component (3b/4b) receptor 1 (Knops blood group)
  ENST ID: ENST00000367049
  CDS Start-End: 1-7470
atgggggcctcttctccaagaagcccggagcctgtcgggccgccggcgcccggtctccccttctgctgcggaggatccctgctggcggttgtggtgctgcttgcgctgccggtggcctggggtcaatgcaatgccccagaatggcttccatttgccaggcctaccaacctaactgatgaatttgagtttcccattgggacatatctgaactatgaatgccgccctggttattccggaagaccgttttctatcatctgcctaaaaaactcagtctggactggtgctaaggacaggtgcagacgtaaatcatgtcgtaatcctccagatcctgtgaatggcatggtgcatgtgatcaaaggcatccagttcggatcccaaattaaatattcttgtactaaaggataccgactcattggttcctcgtctgccacatgcatcatctcaggtgatactgtcatttgggataatgaaacacctatttgtgacagaattccttgtgggctaccccccaccatcaccaatggagatttcattagcaccaacagagagaattttcactatggatcagtggtgacctaccgctgcaatcctggaagcggagggagaaaggtgtttgagcttgtgggtgagccctccatatactgcaccagcaatgacgatcaagtgggcatctggagcggccccgcccctcagtgcattatacctaacaaatgcacgcctccaaatgtggaaaatggaatattggtatctgacaacagaagcttattttccttaaatgaagttgtggagtttaggtgtcagcctggctttgtcatgaaaggaccccgccgtgtgaagtgccaggccctgaacaaatgggagccggagctaccaagctgctccagggtatgtcagccacctccagatgtcctgcatgctgagcgtacccaaagggacaaggacaacttttcacctgggcaggaagtgttctacagctgtgagcccggctacgacctcagaggggctgcgtctatgcgctgcacaccccagggagactggagccctgcagcccccacatgtgaagtgaaatcctgtgatgacttcatgggccaacttcttaatggccgtgtgctatttccagtaaatctccagcttggagcaaaagtggattttgtttgtgatgaaggatttcaattaaaaggcagctctgctagttactgtgtcttggctggaatggaaagcctttggaatagcagtgttccagtgtgtgaacaaatcttttgtccaagtcctccagttattcctaatgggagacacacaggaaaacctctggaagtctttccctttgggaaaacagtaaattacacatgcgacccccacccagacagagggacgagcttcgacctcattggagagagcaccatccgctgcacaagtgaccctcaagggaatggggtttggagcagccctgcccctcgctgtggaattctgggtcactgtcaagccccagatcattttctgtttgccaagttgaaaacccaaaccaatgcatctgactttcccattgggacatctttaaagtacgaatgccgtcctgagtactacgggaggccattctctatcacatgtctagataacctggtctggtcaagtcccaaagatgtctgtaaacgtaaatcatgtaaaactcctccagatccagtgaatggcatggtgcatgtgatcacagacatccaggttggatccagaatcaactattcttgtactacagggcaccgactcattggtcactcatctgctgaatgtatcctctcgggcaatgctgcccattggagcacgaagccgccaatttgtcaacgaattccttgtgggctaccccccaccatcgccaatggagatttcattagcaccaacagagagaattttcactatggatcagtggtgacctaccgctgcaatcctggaagcggagggagaaaggtgtttgagcttgtgggtgagccctccatatactgcaccagcaatgacgatcaagtgggcatctggagcggcccggcccctcagtgcattatacctaacaaatgcacgcctccaaatgtggaaaatggaatattggtatctgacaacagaagcttattttccttaaatgaagttgtggagtttaggtgtcagcctggctttgtcatgaaaggaccccgccgtgtgaagtgccaggccctgaacaaatgggagccggagctaccaagctgctccagggtatgtcagccacctccagatgtcctgcatgctgagcgtacccaaagggacaaggacaacttttcacccgggcaggaagtgttctacagctgtgagcccggctacgacctcagaggggctgcgtctatgcgctgcacaccccagggagactggagccctgcagcccccacatgtgaagtgaaatcctgtgatgacttcatgggccaacttcttaatggccgtgtgctatttccagtaaatctccagcttggagcaaaagtggattttgtttgtgatgaaggatttcaattaaaaggcagctctgctagttactgtgtcttggctggaatggaaagcctttggaatagcagtgttccagtgtgtgaacaaatcttttgtccaagtcctccagttattcctaatgggagacacacaggaaaacctctggaagtctttccctttgggaaaacagtaaattacacatgcgacccccacccagacagagggacgagcttcgacctcattggagagagcaccatccgctgcacaagtgaccctcaagggaatggggtttggagcagccctgcccctcgctgtggaattctgggtcactgtcaagccccagatcattttctgtttgccaagttgaaaacccaaaccaatgcatctgactttcccattgggacatctttaaagtacgaatgccgtcctgagtactacgggaggccattctctatcacatgtctagataacctggtctggtcaagtcccaaagatgtctgtaaacgtaaatcatgtaaaactcctccagatccagtgaatggcatggtgcatgtgatcacagacatccaggttggatccagaatcaactattcttgtactacagggcaccgactcattggtcactcatctgctgaatgtatcctctcgggcaatgctgcccattggagcacgaagccgccaatttgtcaacgaattccttgtgggctaccccccaccatcgccaatggagatttcattagcaccaacagagagaattttcactatggatcagtggtgacctaccgctgcaatcctggaagcggagggagaaaggtgtttgagcttgtgggtgagccctccatatactgcaccagcaatgacgatcaagtgggcatctggagcggcccggcccctcagtgcattatacctaacaaatgcacgcctccaaatgtggaaaatggaatattggtatctgacaacagaagcttattttccttaaatgaagttgtggagtttaggtgtcagcctggctttgtcatgaaaggaccccgccgtgtgaagtgccaggccctgaacaaatgggagccggagctaccaagctgctccagggtatgtcagccacctccagatgtcctgcatgctgagcgtacccaaagggacaaggacaacttttcacccgggcaggaagtgttctacagctgtgagcccggctatgacctcagaggggctgcgtctatgcgctgcacaccccagggagactggagccctgcagcccccacatgtgaagtgaaatcctgtgatgacttcatgggccaacttcttaatggccgtgtgctatttccagtaaatctccagcttggagcaaaagtggattttgtttgtgatgaaggatttcaattaaaaggcagctctgctagttattgtgtcttggctggaatggaaagcctttggaatagcagtgttccagtgtgtgaacaaatcttttgtccaagtcctccagttattcctaatgggagacacacaggaaaacctctggaagtctttccctttggaaaagcagtaaattacacatgcgacccccacccagacagagggacgagcttcgacctcattggagagagcaccatccgctgcacaagtgaccctcaagggaatggggtttggagcagccctgcccctcgctgtggaattctgggtcactgtcaagccccagatcattttctgtttgccaagttgaaaacccaaaccaatgcatctgactttcccattgggacatctttaaagtacgaatgccgtcctgagtactacgggaggccattctctatcacatgtctagataacctggtctggtcaagtcccaaagatgtctgtaaacgtaaatcatgtaaaactcctccagatccagtgaatggcatggtgcatgtgatcacagacatccaggttggatccagaatcaactattcttgtactacagggcaccgactcattggtcactcatctgctgaatgtatcctctcaggcaatactgcccattggagcacgaagccgccaatttgtcaacgaattccttgtgggctacccccaaccatcgccaatggagatttcattagcaccaacagagagaattttcactatggatcagtggtgacctaccgctgcaatcttggaagcagagggagaaaggtgtttgagcttgtgggtgagccctccatatactgcaccagcaatgacgatcaagtgggcatctggagcggccccgcccctcagtgcattatacctaacaaatgcacgcctccaaatgtggaaaatggaatattggtatctgacaacagaagcttattttccttaaatgaagttgtggagtttaggtgtcagcctggctttgtcatgaaaggaccccgccgtgtgaagtgccaggccctgaacaaatgggagccagagttaccaagctgctccagggtgtgtcagccgcctccagaaatcctgcatggtgagcataccccaagccatcaggacaacttttcacctgggcaggaagtgttctacagctgtgagcctggctatgacctcagaggggctgcgtctctgcactgcacaccccagggagactggagccctgaagccccgagatgtgcagtgaaatcctgtgatgacttcttgggtcaactccctcatggccgtgtgctatttccacttaatctccagcttggggcaaaggtgtcctttgtctgtgatgaagggtttcgcttaaagggcagttccgttagtcattgtgtcttggttggaatgagaagcctttggaataacagtgttcctgtgtgtgaacatatcttttgtccaaatcctccagctatccttaatgggagacacacaggaactccctctggagatattccctatggaaaagaaatatcttacacatgtgacccccacccagacagagggatgaccttcaacctcattggggagagcaccatccgctgcacaagtgaccctcatgggaatggggtttggagcagccctgcccctcgctgtgaactttctgttcgtgctggtcactgtaaaaccccagagcagtttccatttgccagtcctacgatcccaattaatgactttgagtttccagtcgggacatctttgaattatgaatgccgtcctgggtattttgggaaaatgttctctatctcctgcctagaaaacttggtctggtcaagtgttgaagacaactgtagacgaaaatcatgtggacctccaccagaacccttcaatggaatggtgcatataaacacagatacacagtttggatcaacagttaattattcttgtaatgaagggtttcgactcattggttccccatctactacttgtctcgtctcaggcaataatgtcacatgggataagaaggcacctatttgtgagatcatatcttgtgagccacctccaaccatatccaatggagacttctacagcaacaatagaacatcttttcacaatggaacggtggtaacttaccagtgccacactggaccagatggagaacagctgtttgagcttgtgggagaacggtcaatatattgcaccagcaaagatgatcaagttggtgtttggagcagccctccccctcggtgtatttctactaataaatgcacagctccagaagttgaaaatgcaattagagtaccaggaaacaggagtttctttaccctcactgagatcatcagatttagatgtcagcccgggtttgtcatggtagggtcccacactgtgcagtgccagaccaatggcagatgggggcccaagctgccacactgctccagggtgtgtcagccgcctccagaaatcctgcatggtgagcataccctaagccatcaggacaacttttcacctgggcaggaagtgttctacagctgtgagcccagctatgacctcagaggggctgcgtctctgcactgcacgccccagggagactggagccctgaagcccctagatgtacagtgaaatcctgtgatgacttcctgggccaactccctcatggccgtgtgctacttccacttaatctccagcttggggcaaaggtgtcctttgtttgcgatgaagggttccgattaaaaggcaggtctgctagtcattgtgtcttggctggaatgaaagccctttggaatagcagtgttccagtgtgtgaacaaatcttttgtccaaatcctccagctatccttaatgggagacacacaggaactccctttggagatattccctatggaaaagaaatatcttacgcatgcgacacccacccagacagagggatgaccttcaacctcattggggagagctccatccgctgcacaagtgaccctcaagggaatggggtttggagcagccctgcccctcgctgtgaactttctgttcctgctgcctgcccacatccacccaagatccaaaacgggcattacattggaggacacgtatctctatatcttcctgggatgacaatcagctacatttgtgaccccggctacctgttagtgggaaagggcttcattttctgtacagaccagggaatctggagccaattggatcattattgcaaagaagtaaattgtagcttcccactgtttatgaatggaatctcgaaggagttagaaatgaaaaaagtatatcactatggagattatgtgactttgaagtgtgaagatgggtatactctggaaggcagtccctggagccagtgccaggcggatgacagatgggaccctcctctggccaaatgtacctctcgtacacatgatgctctcatagttggcactttatctggtacgatcttctttattttactcatcattttcctctcttggataattctaaagcacagaaaaggcaataatgcacatgaaaaccctaaagaagtggctatccatttacattctcaaggaggcagcagcgttcatccccgaactctgcaaacaaatgaagaaaatagcagggtccttccttga

SEQ ID NO: 121753 - DNA, 7469 bp, Homo sapiens
  Payload ID: 3871
  Gene Symbol: CR1
  Gene Name: complement component (3b/4b) receptor 1 (Knops blood group)
  Uniprot ID: P17927
  ENST ID: ENST00000367051
  CDS Start-End: 112-6231
acactctgggcgcggagcacaatgattggtcactcctattttcgctgagcttttcctcttatttcagttttcttcgagatcaaatctggtttgtagatgtgcttggggagaatgggggcctcttctccaagaagcccggagcctgtcgggccgccggcgcccggtctccccttctgctgcggaggatccctgctggcggttgtggtgctgcttgcgctgccggtggcctggggtcaatgcaatgccccagaatggcttccatttgccaggcctaccaacctaactgatgaatttgagtttcccattgggacatatctgaactatgaatgccgccctggttattccggaagaccgttttctatcatctgcctaaaaaactcagtctggactggtgctaaggacaggtgcagacgtaaatcatgtcgtaatcctccagatcctgtgaatggcatggtgcatgtgatcaaaggcatccagttcggatcccaaattaaatattcttgtactaaaggataccgactcattggttcctcgtctgccacatgcatcatctcaggtgatactgtcatttgggataatgaaacacctatttgtgacagaattccttgtgggctaccccccaccatcgccaatggagatttcattagcaccaacagagagaattttcactatggatcagtggtgacctaccgctgcaatcctggaagcggagggagaaaggtgtttgagcttgtgggtgagccctccatatactgcaccagcaatgacgatcaagtgggcatctggagcggcccggcccctcagtgcattatacctaacaaatgcacgcctccaaatgtggaaaatggaatattggtatctgacaacagaagcttattttccttaaatgaagttgtggagtttaggtgtcagcctggctttgtcatgaaaggaccccgccgtgtgaagtgccaggccctgaacaaatgggagccggagctaccaagctgctccagggtatgtcagccacctccagatgtcctgcatgctgagcgtacccaaagggacaaggacaacttttcacccgggcaggaagtgttctacagctgtgagcccggctacgacctcagaggggctgcgtctatgcgctgcacaccccagggagactggagccctgcagcccccacatgtgaagtgaaatcctgtgatgacttcatgggccaacttcttaatggccgtgtgctatttccagtaaatctccagcttggagcaaaagtggattttgtttgtgatgaaggatttcaattaaaaggcagctctgctagttactgtgtcttggctggaatggaaagcctttggaatagcagtgttccagtgtgtgaacaaatcttttgtccaagtcctccagttattcctaatgggagacacacaggaaaacctctggaagtctttccctttgggaaaacagtaaattacacatgcgacccccacccagacagagggacgagcttcgacctcattggagagagcaccatccgctgcacaagtgaccctcaagggaatggggtttggagcagccctgcccctcgctgtggaattctgggtcactgtcaagccccagatcattttctgtttgccaagttgaaaacccaaaccaatgcatctgactttcccattgggacatctttaaagtacgaatgccgtcctgagtactacgggaggccattctctatcacatgtctagataacctggtctggtcaagtcccaaagatgtctgtaaacgtaaatcatgtaaaactcctccagatccagtgaatggcatggtgcatgtgatcacagacatccaggttggatccagaatcaactattcttgtactacagggcaccgactcattggtcactcatctgctgaatgtatcctctcgggcaatgctgcccattggagcacgaagccgccaatttgtcaacgaattccttgtgggctaccccccaccatcgccaatggagatttcattagcaccaacagagagaattttcactatggatcagtggtgacctaccgctgcaatcctggaagcggagggagaaaggtgtttgagcttgtgggtgagccctccatatactgcaccagcaatgacgatcaagtgggcatctggagcggcccggcccctcagtgcattatacctaacaaatgcacgcctccaaatgtggaaaatggaatattggtatctgacaacagaagcttattttccttaaatgaagttgtggagtttaggtgtcagcctggctttgtcatgaaaggaccccgccgtgtgaagtgccaggccctgaacaaatgggagccggagctaccaagctgctccagggtatgtcagccacctccagatgtcctgcatgctgagcgtacccaaagggacaaggacaacttttcacccgggcaggaagtgttctacagctgtgagcccggctatgacctcagaggggctgcgtctatgcgctgcacaccccagggagactggagccctgcagcccccacatgtgaagtgaaatcctgtgatgacttcatgggccaacttcttaatggccgtgtgctatttccagtaaatctccagcttggagcaaaagtggattttgtttgtgatgaaggatttcaattaaaaggcagctctgctagttattgtgtcttggctggaatggaaagcctttggaatagcagtgttccagtgtgtgaacaaatcttttgtccaagtcctccagttattcctaatgggagacacacaggaaaacctctggaagtctttccctttggaaaagcagtaaattacacatgcgacccccacccagacagagggacgagcttcgacctcattggagagagcaccatccgctgcacaagtgaccctcaagggaatggggtttggagcagccctgcccctcgctgtggaattctgggtcactgtcaagccccagatcattttctgtttgccaagttgaaaacccaaaccaatgcatctgactttcccattgggacatctttaaagtacgaatgccgtcctgagtactacgggaggccattctctatcacatgtctagataacctggtctggtcaagtcccaaagatgtctgtaaacgtaaatcatgtaaaactcctccagatccagtgaatggcatggtgcatgtgatcacagacatccaggttggatccagaatcaactattcttgtactacagggcaccgactcattggtcactcatctgctgaatgtatcctctcaggcaatactgcccattggagcacgaagccgccaatttgtcaacgaattccttgtgggctacccccaaccatcgccaatggagatttcattagcaccaacagagagaattttcactatggatcagtggtgacctaccgctgcaatcttggaagcagagggagaaaggtgtttgagcttgtgggtgagccctccatatactgcaccagcaatgacgatcaagtgggcatctggagcggccccgcccctcagtgcattatacctaacaaatgcacgcctccaaatgtggaaaatggaatattggtatctgacaacagaagcttattttccttaaatgaagttgtggagtttaggtgtcagcctggctttgtcatgaaaggaccccgccgtgtgaagtgccaggccctgaacaaatgggagccagagttaccaagctgctccagggtgtgtcagccgcctccagaaatcctgcatggtgagcataccccaagccatcaggacaacttttcacctgggcaggaagtgttctacagctgtgagcctggctatgacctcagaggggctgcgtctctgcactgcacaccccagggagactggagccctgaagccccgagatgtgcagtgaaatcctgtgatgacttcttgggtcaactccctcatggccgtgtgctatttccacttaatctccagcttggggcaaaggtgtcctttgtctgtgatgaagggtttcgcttaaagggcagttccgttagtcattgtgtcttggttggaatgagaagcctttggaataacagtgttcctgtgtgtgaacatatcttttgtccaaatcctccagctatccttaatgggagacacacaggaactccctctggagatattccctatggaaaagaaatatcttacacatgtgacccccacccagacagagggatgaccttcaacctcattggggagagcaccatccgctgcacaagtgaccctcatgggaatggggtttggagcagccctgcccctcgctgtgaactttctgttcgtgctggtcactgtaaaaccccagagcagtttccatttgccagtcctacgatcccaattaatgactttgagtttccagtcgggacatctttgaattatgaatgccgtcctgggtattttgggaaaatgttctctatctcctgcctagaaaacttggtctggtcaagtgttgaagacaactgtagacgaaaatcatgtggacctccaccagaacccttcaatggaatggtgcatataaacacagatacacagtttggatcaacagttaattattcttgtaatgaagggtttcgactcattggttccccatctactacttgtctcgtctcaggcaataatgtcacatgggataagaaggcacctatttgtgagatcatatcttgtgagccacctccaaccatatccaatggagacttctacagcaacaatagaacatcttttcacaatggaacggtggtaacttaccagtgccacactggaccagatggagaacagctgtttgagcttgtgggagaacggtcaatatattgcaccagcaaagatgatcaagttggtgtttggagcagccctccccctcggtgtatttctactaataaatgcacagctccagaagttgaaaatgcaattagagtaccaggaaacaggagtttctttaccctcactgagatcatcagatttagatgtcagcccgggtttgtcatggtagggtcccacactgtgcagtgccagaccaatggcagatgggggcccaagctgccacactgctccagggtgtgtcagccgcctccagaaatcctgcatggtgagcataccctaagccatcaggacaacttttcacctgggcaggaagtgttctacagctgtgagcccagctatgacctcagaggggctgcgtctctgcactgcacgccccagggagactggagccctgaagcccctagatgtacagtgaaatcctgtgatgacttcctgggccaactccctcatggccgtgtgctacttccacttaatctccagcttggggcaaaggtgtcctttgtttgcgatgaagggttccgattaaaaggcaggtctgctagtcattgtgtcttggctggaatgaaagccctttggaatagcagtgttccagtgtgtgaacaaatcttttgtccaaatcctccagctatccttaatgggagacacacaggaactccctttggagatattccctatggaaaagaaatatcttacgcatgcgacacccacccagacagagggatgaccttcaacctcattggggagagctccatccgctgcacaagtgaccctcaagggaatggggtttggagcagccctgcccctcgctgtgaactttctgttcctgctgcctgcccacatccacccaagatccaaaacgggcattacattggaggacacgtatctctatatcttcctgggatgacaatcagctacatttgtgaccccggctacctgttagtgggaaagggcttcattttctgtacagaccagggaatctggagccaattggatcattattgcaaagaagtaaattgtagcttcccactgtttatgaatggaatctcgaaggagttagaaatgaaaaaagtatatcactatggagattatgtgactttgaagtgtgaagatgggtatactctggaaggcagtccctggagccagtgccaggcggatgacagatgggaccctcctctggccaaatgtacctctcgtacacatgatgctctcatagttggcactttatctggtacgatcttctttattttactcatcattttcctctcttggataattctaaagcacagaaaaggcaataatgcacatgaaaaccctaaagaagtggctatccatttacattctcaaggaggcagcagcgttcatccccgaactctgcaaacaaatgaagaaaatagcagggtccttccttgacaaagtactatacagctgaagaacatctcgaatacaattttggtgggaaaggagccaattgatttcaacagaatcagatctgagcttcataaagtctttgaagtgacttcacagagacgcagacatgtgcacttgaagatgctgccccttccctggtacctagcaaagctcctgcctctttgtgtgcgtcactgtgaaacccccacccttctgcctcgtgctaaacgcacacagtatctagtcaggggaaaagactgcatttaggagatagaaaatagtttggattacttaaaggaataaggtgttgcctggaatttctggtttgtaaggtggtcactgttcttttttaaaatatttgtaatatggaatgggctcagtaagaagagcttggaaaatgcagaaagttatgaaaaataagtcacttataattatgctacctactgataaccactcctaatattttgattcattttctgcctatcttctttcacatatgtgtttttttacatacgtacttttcccccttagtttgtttccttttattttatagagcagaaccctagtcttttaaacagtttagagtgaaatatatgctatatcagtttttactttctctagggagaaaaattaatttactagaaaggcatgaaatgatcatgggaagagtggttaagactactgaagagaaatatttggaaaataagatttcgatatcttctttttttttgagatggagtctggctctgtctcccaggctggagtgcagtggcgtaatctcggctcactgcaagctccgcctcccgggttgacaccattttcctgcctcagcctcctgagtagttgggattaccagtagatgggactacaggcacctgccaacacgcccggctaatttttttgtatttttagtagagacggggtttcaccatgttagccaggatggtctggatctcctgacctcgtgatccacctgcctcggcctcccaaagtgctgcgattacaggcatgagccaccgcgcctggccgctttcgatattttctaaactttaattcaaaagcactttgtgctgtgttctatataaaaaacataataaaaattgaaatgaaagaataattgttattataaaagtactagcttacttttgtatggattcagaatatactaaattaactttttaaaacacaacttttaaaaaatgtatcaaaataataaacgtgttctgatatttttaaaataa

SEQ ID NO: 121754 - DNA, 7469 bp, Homo sapiens
  Payload ID: 3871
  Gene Symbol: CR1
  Gene Name: complement component (3b/4b) receptor 1 (Knops blood group)
  ENST ID: ENST00000367052
  CDS Start-End: 112-6231
acactctgggcgcggagcacaatgattggtcactcctattttcgctgagcttttcctcttatttcagttttcttcgagatcaaatctggtttgtagatgtgcttggggagaatgggggcctcttctccaagaagcccggagcctgtcgggccgccggcgcccggtctccccttctgctgcggaggatccctgctggcggttgtggtgctgcttgcgctgccggtggcctggggtcaatgcaatgccccagaatggcttccatttgccaggcctaccaacctaactgatgaatttgagtttcccattgggacatatctgaactatgaatgccgccctggttattccggaagaccgttttctatcatctgcctaaaaaactcagtctggactggtgctaaggacaggtgcagacgtaaatcatgtcgtaatcctccagatcctgtgaatggcatggtgcatgtgatcaaaggcatccagttcggatcccaaattaaatattcttgtactaaaggataccgactcattggttcctcgtctgccacatgcatcatctcaggtgatactgtcatttgggataatgaaacacctatttgtgacagaattccttgtgggctaccccccaccatcaccaatggagatttcattagcaccaacagagagaattttcactatggatcagtggtgacctaccgctgcaatcctggaagcggagggagaaaggtgtttgagcttgtgggtgagccctccatatactgcaccagcaatgacgatcaagtgggcatctggagcggccccgcccctcagtgcattatacctaacaaatgcacgcctccaaatgtggaaaatggaatattggtatctgacaacagaagcttattttccttaaatgaagttgtggagtttaggtgtcagcctggctttgtcatgaaaggaccccgccgtgtgaagtgccaggccctgaacaaatgggagccggagctaccaagctgctccagggtatgtcagccacctccagatgtcctgcatgctgagcgtacccaaagggacaaggacaacttttcacctgggcaggaagtgttctacagctgtgagcccggctacgacctcagaggggctgcgtctatgcgctgcacaccccagggagactggagccctgcagcccccacatgtgaagtgaaatcctgtgatgacttcatgggccaacttcttaatggccgtgtgctatttccagtaaatctccagcttggagcaaaagtggattttgtttgtgatgaaggatttcaattaaaaggcagctctgctagttactgtgtcttggctggaatggaaagcctttggaatagcagtgttccagtgtgtgaacaaatcttttgtccaagtcctccagttattcctaatgggagacacacaggaaaacctctggaagtctttccctttgggaaaacagtaaattacacatgcgacccccacccagacagagggacgagcttcgacctcattggagagagcaccatccgctgcacaagtgaccctcaagggaatggggtttggagcagccctgcccctcgctgtggaattctgggtcactgtcaagccccagatcattttctgtttgccaagttgaaaacccaaaccaatgcatctgactttcccattgggacatctttaaagtacgaatgccgtcctgagtactacgggaggccattctctatcacatgtctagataacctggtctggtcaagtcccaaagatgtctgtaaacgtaaatcatgtaaaactcctccagatccagtgaatggcatggtgcatgtgatcacagacatccaggttggatccagaatcaactattcttgtactacagggcaccgactcattggtcactcatctgctgaatgtatcctctcgggcaatgctgcccattggagcacgaagccgccaatttgtcaacgaattccttgtgggctaccccccaccatcgccaatggagatttcattagcaccaacagagagaattttcactatggatcagtggtgacctaccgctgcaatcctggaagcggagggagaaaggtgtttgagcttgtgggtgagccctccatatactgcaccagcaatgacgatcaagtgggcatctggagcggcccggcccctcagtgcattatacctaacaaatgcacgcctccaaatgtggaaaatggaatattggtatctgacaacagaagcttattttccttaaatgaagttgtggagtttaggtgtcagcctggctttgtcatgaaaggaccccgccgtgtgaagtgccaggccctgaacaaatgggagccggagctaccaagctgctccagggtatgtcagccacctccagatgtcctgcatgctgagcgtacccaaagggacaaggacaacttttcacccgggcaggaagtgttctacagctgtgagcccggctacgacctcagaggggctgcgtctatgcgctgcacaccccagggagactggagccctgcagcccccacatgtgaagtgaaatcctgtgatgacttcatgggccaacttcttaatggccgtgtgctatttccagtaaatctccagcttggagcaaaagtggattttgtttgtgatgaaggatttcaattaaaaggcagctctgctagttactgtgtcttggctggaatggaaagcctttggaatagcagtgttccagtgtgtgaacaaatcttttgtccaagtcctccagttattcctaatgggagacacacaggaaaacctctggaagtctttccctttgggaaaacagtaaattacacatgcgacccccacccagacagagggacgagcttcgacctcattggagagagcaccatccgctgcacaagtgaccctcaagggaatggggtttggagcagccctgcccctcgctgtggaattctgggtcactgtcaagccccagatcattttctgtttgccaagttgaaaacccaaaccaatgcatctgactttcccattgggacatctttaaagtacgaatgccgtcctgagtactacgggaggccattctctatcacatgtctagataacctggtctggtcaagtcccaaagatgtctgtaaacgtaaatcatgtaaaactcctccagatccagtgaatggcatggtgcatgtgatcacagacatccaggttggatccagaatcaactattcttgtactacagggcaccgactcattggtcactcatctgctgaatgtatcctctcaggcaatactgcccattggagcacgaagccgccaatttgtcaacgaattccttgtgggctacccccaaccatcgccaatggagatttcattagcaccaacagagagaattttcactatggatcagtggtgacctaccgctgcaatcttggaagcagagggagaaaggtgtttgagcttgtgggtgagccctccatatactgcaccagcaatgacgatcaagtgggcatctggagcggccccgcccctcagtgcattatacctaacaaatgcacgcctccaaatgtggaaaatggaatattggtatctgacaacagaagcttattttccttaaatgaagttgtggagtttaggtgtcagcctggctttgtcatgaaaggaccccgccgtgtgaagtgccaggccctgaacaaatgggagccagagttaccaagctgctccagggtgtgtcagccgcctccagaaatcctgcatggtgagcataccccaagccatcaggacaacttttcacctgggcaggaagtgttctacagctgtgagcctggctatgacctcagaggggctgcgtctctgcactgcacaccccagggagactggagccctgaagccccgagatgtgcagtgaaatcctgtgatgacttcttgggtcaactccctcatggccgtgtgctatttccacttaatctccagcttggggcaaaggtgtcctttgtctgtgatgaagggtttcgcttaaagggcagttccgttagtcattgtgtcttggttggaatgagaagcctttggaataacagtgttcctgtgtgtgaacatatcttttgtccaaatcctccagctatccttaatgggagacacacaggaactccctctggagatattccctatggaaaagaaatatcttacacatgtgacccccacccagacagagggatgaccttcaacctcattggggagagcaccatccgctgcacaagtgaccctcatgggaatggggtttggagcagccctgcccctcgctgtgaactttctgttcgtgctggtcactgtaaaaccccagagcagtttccatttgccagtcctacgatcccaattaatgactttgagtttccagtcgggacatctttgaattatgaatgccgtcctgggtattttgggaaaatgttctctatctcctgcctagaaaacttggtctggtcaagtgttgaagacaactgtagacgaaaatcatgtggacctccaccagaacccttcaatggaatggtgcatataaacacagatacacagtttggatcaacagttaattattcttgtaatgaagggtttcgactcattggttccccatctactacttgtctcgtctcaggcaataatgtcacatgggataagaaggcacctatttgtgagatcatatcttgtgagccacctccaaccatatccaatggagacttctacagcaacaatagaacatcttttcacaatggaacggtggtaacttaccagtgccacactggaccagatggagaacagctgtttgagcttgtgggagaacggtcaatatattgcaccagcaaagatgatcaagttggtgtttggagcagccctccccctcggtgtatttctactaataaatgcacagctccagaagttgaaaatgcaattagagtaccaggaaacaggagtttctttaccctcactgagatcatcagatttagatgtcagcccgggtttgtcatggtagggtcccacactgtgcagtgccagaccaatggcagatgggggcccaagctgccacactgctccagggtgtgtcagccgcctccagaaatcctgcatggtgagcataccctaagccatcaggacaacttttcacctgggcaggaagtgttctacagctgtgagcccagctatgacctcagaggggctgcgtctctgcactgcacgccccagggagactggagccctgaagcccctagatgtacagtgaaatcctgtgatgacttcctgggccaactccctcatggccgtgtgctacttccacttaatctccagcttggggcaaaggtgtcctttgtttgcgatgaagggttccgattaaaaggcaggtctgctagtcattgtgtcttggctggaatgaaagccctttggaatagcagtgttccagtgtgtgaacaaatcttttgtccaaatcctccagctatccttaatgggagacacacaggaactccctttggagatattccctatggaaaagaaatatcttacgcatgcgacacccacccagacagagggatgaccttcaacctcattggggagagctccatccgctgcacaagtgaccctcaagggaatggggtttggagcagccctgcccctcgctgtgaactttctgttcctgctgcctgcccacatccacccaagatccaaaacgggcattacattggaggacacgtatctctatatcttcctgggatgacaatcagctacatttgtgaccccggctacctgttagtgggaaagggcttcattttctgtacagaccagggaatctggagccaattggatcattattgcaaagaagtaaattgtagcttcccactgtttatgaatggaatctcgaaggagttagaaatgaaaaaagtatatcactatggagattatgtgactttgaagtgtgaagatgggtatactctggaaggcagtccctggagccagtgccaggcggatgacagatgggaccctcctctggccaaatgtacctctcgtacacatgatgctctcatagttggcactttatctggtacgatcttctttattttactcatcattttcctctcttggataattctaaagcacagaaaaggcaataatgcacatgaaaaccctaaagaagtggctatccatttacattctcaaggaggcagcagcgttcatccccgaactctgcaaacaaatgaagaaaatagcagggtccttccttgacaaagtactatacagctgaagaacatctcgaatacaattttggtgggaaaggagccaattgatttcaacagaatcagatctgagcttcataaagtctttgaagtgacttcacagagacgcagacatgtgcacttgaagatgctgccccttccctggtacctagcaaagctcctgcctctttgtgtgcgtcactgtgaaacccccacccttctgcctcgtgctaaacgcacacagtatctagtcaggggaaaagactgcatttaggagatagaaaatagtttggattacttaaaggaataaggtgttgcctggaatttctggtttgtaaggtggtcactgttcttttttaaaatatttgtaatatggaatgggctcagtaagaagagcttggaaaatgcagaaagttatgaaaaataagtcacttataattatgctacctactgataaccactcctaatattttgattcattttctgcctatcttctttcacatatgtgtttttttacatacgtacttttcccccttagtttgtttccttttattttatagagcagaaccctagtcttttaaacagtttagagtgaaatatatgctatatcagtttttactttctctagggagaaaaattaatttactagaaaggcatgaaatgatcatgggaagagtggttaagactactgaagagaaatatttggaaaataagatttcgatatcttctttttttttgagatggagtctggctctgtctcccaggctggagtgcagtggcgtaatctcggctcactgcaagctccgcctcccgggttgacaccattttcctgcctcagcctcctgagtagttgggattaccagtagatgggactacaggcacctgccaacacgcccggctaatttttttgtatttttagtagagacggggtttcaccatgttagccaggatggtctggatctcctgacctcgtgatccacctgcctcggcctcccaaagtgctgcgattacaggcatgagccaccgcgcctggccgctttcgatattttctaaactttaattcaaaagcactttgtgctgtgttctatataaaaaacataataaaaattgaaatgaaagaataattgttattataaaagtactagcttacttttgtatggattcagaatatactaaattaactttttaaaacacaacttttaaaaaatgtatcaaaataataaacgtgttctgatatttttaaaataa

SEQ ID NO: 121755 - DNA, 7469 bp, Homo sapiens
  Payload ID: 3871
  Gene Symbol: CR1
  Gene Name: complement component (3b/4b) receptor 1 (Knops blood group)
  Uniprot ID: P17927
  ENST ID: ENST00000367053
  CDS Start-End: 112-6231
acactctgggcgcggagcacaatgattggtcactcctattttcgctgagcttttcctcttatttcagttttcttcgagatcaaatctggtttgtagatgtgcttggggagaatgggggcctcttctccaagaagcccggagcctgtcgggccgccggcgcccggtctccccttctgctgcggaggatccctgctggcggttgtggtgctgcttgcgctgccggtggcctggggtcaatgcaatgccccagaatggcttccatttgccaggcctaccaacctaactgatgaatttgagtttcccattgggacatatctgaactatgaatgccgccctggttattccggaagaccgttttctatcatctgcctaaaaaactcagtctggactggtgctaaggacaggtgcagacgtaaatcatgtcgtaatcctccagatcctgtgaatggcatggtgcatgtgatcaaaggcatccagttcggatcccaaattaaatattcttgtactaaaggataccgactcattggttcctcgtctgccacatgcatcatctcaggtgatactgtcatttgggataatgaaacacctatttgtgacagaattccttgtgggctaccccccaccatcaccaatggagatttcattagcaccaacagagagaattttcactatggatcagtggtgacctaccgctgcaatcctggaagcggagggagaaaggtgtttgagcttgtgggtgagccctccatatactgcaccagcaatgacgatcaagtgggcatctggagcggccccgcccctcagtgcattatacctaacaaatgcacgcctccaaatgtggaaaatggaatattggtatctgacaacagaagcttattttccttaaatgaagttgtggagtttaggtgtcagcctggctttgtcatgaaaggaccccgccgtgtgaagtgccaggccctgaacaaatgggagccggagctaccaagctgctccagggtatgtcagccacctccagatgtcctgcatgctgagcgtacccaaagggacaaggacaacttttcacctgggcaggaagtgttctacagctgtgagcccggctacgacctcagaggggctgcgtctatgcgctgcacaccccagggagactggagccctgcagcccccacatgtgaagtgaaatcctgtgatgacttcatgggccaacttcttaatggccgtgtgctatttccagtaaatctccagcttggagcaaaagtggattttgtttgtgatgaaggatttcaattaaaaggcagctctgctagttactgtgtcttggctggaatggaaagcctttggaatagcagtgttccagtgtgtgaacaaatcttttgtccaagtcctccagttattcctaatgggagacacacaggaaaacctctggaagtctttccctttgggaaaacagtaaattacacatgcgacccccacccagacagagggacgagcttcgacctcattggagagagcaccatccgctgcacaagtgaccctcaagggaatggggtttggagcagccctgcccctcgctgtggaattctgggtcactgtcaagccccagatcattttctgtttgccaagttgaaaacccaaaccaatgcatctgactttcccattgggacatctttaaagtacgaatgccgtcctgagtactacgggaggccattctctatcacatgtctagataacctggtctggtcaagtcccaaagatgtctgtaaacgtaaatcatgtaaaactcctccagatccagtgaatggcatggtgcatgtgatcacagacatccaggttggatccagaatcaactattcttgtactacagggcaccgactcattggtcactcatctgctgaatgtatcctctcgggcaatgctgcccattggagcacgaagccgccaatttgtcaacgaattccttgtgggctaccccccaccatcgccaatggagatttcattagcaccaacagagagaattttcactatggatcagtggtgacctaccgctgcaatcctggaagcggagggagaaaggtgtttgagcttgtgggtgagccctccatatactgcaccagcaatgacgatcaagtgggcatctggagcggcccggcccctcagtgcattatacctaacaaatgcacgcctccaaatgtggaaaatggaatattggtatctgacaacagaagcttattttccttaaatgaagttgtggagtttaggtgtcagcctggctttgtcatgaaaggaccccgccgtgtgaagtgccaggccctgaacaaatgggagccggagctaccaagctgctccagggtatgtcagccacctccagatgtcctgcatgctgagcgtacccaaagggacaaggacaacttttcacccgggcaggaagtgttctacagctgtgagcccggctatgacctcagaggggctgcgtctatgcgctgcacaccccagggagactggagccctgcagcccccacatgtgaagtgaaatcctgtgatgacttcatgggccaacttcttaatggccgtgtgctatttccagtaaatctccagcttggagcaaaagtggattttgtttgtgatgaaggatttcaattaaaaggcagctctgctagttattgtgtcttggctggaatggaaagcctttggaatagcagtgttccagtgtgtgaacaaatcttttgtccaagtcctccagttattcctaatgggagacacacaggaaaacctctggaagtctttccctttggaaaagcagtaaattacacatgcgacccccacccagacagagggacgagcttcgacctcattggagagagcaccatccgctgcacaagtgaccctcaagggaatggggtttggagcagccctgcccctcgctgtggaattctgggtcactgtcaagccccagatcattttctgtttgccaagttgaaaacccaaaccaatgcatctgactttcccattgggacatctttaaagtacgaatgccgtcctgagtactacgggaggccattctctatcacatgtctagataacctggtctggtcaagtcccaaagatgtctgtaaacgtaaatcatgtaaaactcctccagatccagtgaatggcatggtgcatgtgatcacagacatccaggttggatccagaatcaactattcttgtactacagggcaccgactcattggtcactcatctgctgaatgtatcctctcaggcaatactgcccattggagcacgaagccgccaatttgtcaacgaattccttgtgggctacccccaaccatcgccaatggagatttcattagcaccaacagagagaattttcactatggatcagtggtgacctaccgctgcaatcttggaagcagagggagaaaggtgtttgagcttgtgggtgagccctccatatactgcaccagcaatgacgatcaagtgggcatctggagcggccccgcccctcagtgcattatacctaacaaatgcacgcctccaaatgtggaaaatggaatattggtatctgacaacagaagcttattttccttaaatgaagttgtggagtttaggtgtcagcctggctttgtcatgaaaggaccccgccgtgtgaagtgccaggccctgaacaaatgggagccagagttaccaagctgctccagggtgtgtcagccgcctccagaaatcctgcatggtgagcataccccaagccatcaggacaacttttcacctgggcaggaagtgttctacagctgtgagcctggctatgacctcagaggggctgcgtctctgcactgcacaccccagggagactggagccctgaagccccgagatgtgcagtgaaatcctgtgatgacttcttgggtcaactccctcatggccgtgtgctatttccacttaatctccagcttggggcaaaggtgtcctttgtctgtgatgaagggtttcgcttaaagggcagttccgttagtcattgtgtcttggttggaatgagaagcctttggaataacagtgttcctgtgtgtgaacatatcttttgtccaaatcctccagctatccttaatgggagacacacaggaactccctctggagatattccctatggaaaagaaatatcttacacatgtgacccccacccagacagagggatgaccttcaacctcattggggagagcaccatccgctgcacaagtgaccctcatgggaatggggtttggagcagccctgcccctcgctgtgaactttctgttcgtgctggtcactgtaaaaccccagagcagtttccatttgccagtcctacgatcccaattaatgactttgagtttccagtcgggacatctttgaattatgaatgccgtcctgggtattttgggaaaatgttctctatctcctgcctagaaaacttggtctggtcaagtgttgaagacaactgtagacgaaaatcatgtggacctccaccagaacccttcaatggaatggtgcatataaacacagatacacagtttggatcaacagttaattattcttgtaatgaagggtttcgactcattggttccccatctactacttgtctcgtctcaggcaataatgtcacatgggataagaaggcacctatttgtgagatcatatcttgtgagccacctccaaccatatccaatggagacttctacagcaacaatagaacatcttttcacaatggaacggtggtaacttaccagtgccacactggaccagatggagaacagctgtttgagcttgtgggagaacggtcaatatattgcaccagcaaagatgatcaagttggtgtttggagcagccctccccctcggtgtatttctactaataaatgcacagctccagaagttgaaaatgcaattagagtaccaggaaacaggagtttctttaccctcactgagatcatcagatttagatgtcagcccgggtttgtcatggtagggtcccacactgtgcagtgccagaccaatggcagatgggggcccaagctgccacactgctccagggtgtgtcagccgcctccagaaatcctgcatggtgagcataccctaagccatcaggacaacttttcacctgggcaggaagtgttctacagctgtgagcccagctatgacctcagaggggctgcgtctctgcactgcacgccccagggagactggagccctgaagcccctagatgtacagtgaaatcctgtgatgacttcctgggccaactccctcatggccgtgtgctacttccacttaatctccagcttggggcaaaggtgtcctttgtttgcgatgaagggttccgattaaaaggcaggtctgctagtcattgtgtcttggctggaatgaaagccctttggaatagcagtgttccagtgtgtgaacaaatcttttgtccaaatcctccagctatccttaatgggagacacacaggaactccctttggagatattccctatggaaaagaaatatcttacgcatgcgacacccacccagacagagggatgaccttcaacctcattggggagagctccatccgctgcacaagtgaccctcaagggaatggggtttggagcagccctgcccctcgctgtgaactttctgttcctgctgcctgcccacatccacccaagatccaaaacgggcattacattggaggacacgtatctctatatcttcctgggatgacaatcagctacatttgtgaccccggctacctgttagtgggaaagggcttcattttctgtacagaccagggaatctggagccaattggatcattattgcaaagaagtaaattgtagcttcccactgtttatgaatggaatctcgaaggagttagaaatgaaaaaagtatatcactatggagattatgtgactttgaagtgtgaagatgggtatactctggaaggcagtccctggagccagtgccaggcggatgacagatgggaccctcctctggccaaatgtacctctcgtacacatgatgctctcatagttggcactttatctggtacgatcttctttattttactcatcattttcctctcttggataattctaaagcacagaaaaggcaataatgcacatgaaaaccctaaagaagtggctatccatttacattctcaaggaggcagcagcgttcatccccgaactctgcaaacaaatgaagaaaatagcagggtccttccttgacaaagtactatacagctgaagaacatctcgaatacaattttggtgggaaaggagccaattgatttcaacagaatcagatctgagcttcataaagtctttgaagtgacttcacagagacgcagacatgtgcacttgaagatgctgccccttccctggtacctagcaaagctcctgcctctttgtgtgcgtcactgtgaaacccccacccttctgcctcgtgctaaacgcacacagtatctagtcaggggaaaagactgcatttaggagatagaaaatagtttggattacttaaaggaataaggtgttgcctggaatttctggtttgtaaggtggtcactgttcttttttaaaatatttgtaatatggaatgggctcagtaagaagagcttggaaaatgcagaaagttatgaaaaataagtcacttataattatgctacctactgataaccactcctaatattttgattcattttctgcctatcttctttcacatatgtgtttttttacatacgtacttttcccccttagtttgtttccttttattttatagagcagaaccctagtcttttaaacagtttagagtgaaatatatgctatatcagtttttactttctctagggagaaaaattaatttactagaaaggcatgaaatgatcatgggaagagtggttaagactactgaagagaaatatttggaaaataagatttcgatatcttctttttttttgagatggagtctggctctgtctcccaggctggagtgcagtggcgtaatctcggctcactgcaagctccgcctcccgggttgacaccattttcctgcctcagcctcctgagtagttgggattaccagtagatgggactacaggcacctgccaacacgcccggctaatttttttgtatttttagtagagacggggtttcaccatgttagccaggatggtctggatctcctgacctcgtgatccacctgcctcggcctcccaaagtgctgcgattacaggcatgagccaccgcgcctggccgctttcgatattttctaaactttaattcaaaagcactttgtgctgtgttctatataaaaaacataataaaaattgaaatgaaagaataattgttattataaaagtactagcttacttttgtatggattcagaatatactaaattaactttttaaaacacaacttttaaaaaatgtatcaaaataataaacgtgttctgatatttttaaaataa

SEQ ID NO: 121756 - DNA, 6959 bp, Homo sapiens
  Payload ID: 3871
  Gene Symbol: CR1
  Gene Name: complement component (3b/4b) receptor 1 (Knops blood group)
  Uniprot ID: P17927
  ENST ID: ENST00000400960
  CDS Start-End: 41-6160
cttcgagatcaaatctggtttgtagatgtgcttggggagaatgggggcctcttctccaagaagcccggagcctgtcgggccgccggcgcccggtctccccttctgctgcggaggatccctgctggcggttgtggtgctgcttgcgctgccggtggcctggggtcaatgcaatgccccagaatggcttccatttgccaggcctaccaacctaactgatgaatttgagtttcccattgggacatatctgaactatgaatgccgccctggttattccggaagaccgttttctatcatctgcctaaaaaactcagtctggactggtgctaaggacaggtgcagacgtaaatcatgtcgtaatcctccagatcctgtgaatggcatggtgcatgtgatcaaaggcatccagttcggatcccaaattaaatattcttgtactaaaggataccgactcattggttcctcgtctgccacatgcatcatctcaggtgatactgtcatttgggataatgaaacacctatttgtgacagaattccttgtgggctaccccccaccatcaccaatggagatttcattagcaccaacagagagaattttcactatggatcagtggtgacctaccgctgcaatcctggaagcggagggagaaaggtgtttgagcttgtgggtgagccctccatatactgcaccagcaatgacgatcaagtgggcatctggagcggccccgcccctcagtgcattatacctaacaaatgcacgcctccaaatgtggaaaatggaatattggtatctgacaacagaagcttattttccttaaatgaagttgtggagtttaggtgtcagcctggctttgtcatgaaaggaccccgccgtgtgaagtgccaggccctgaacaaatgggagccggagctaccaagctgctccagggtatgtcagccacctccagatgtcctgcatgctgagcgtacccaaagggacaaggacaacttttcacctgggcaggaagtgttctacagctgtgagcccggctacgacctcagaggggctgcgtctatgcgctgcacaccccagggagactggagccctgcagcccccacatgtgaagtgaaatcctgtgatgacttcatgggccaacttcttaatggccgtgtgctatttccagtaaatctccagcttggagcaaaagtggattttgtttgtgatgaaggatttcaattaaaaggcagctctgctagttactgtgtcttggctggaatggaaagcctttggaatagcagtgttccagtgtgtgaacaaatcttttgtccaagtcctccagttattcctaatgggagacacacaggaaaacctctggaagtctttccctttgggaaaacagtaaattacacatgcgacccccacccagacagagggacgagcttcgacctcattggagagagcaccatccgctgcacaagtgaccctcaagggaatggggtttggagcagccctgcccctcgctgtggaattctgggtcactgtcaagccccagatcattttctgtttgccaagttgaaaacccaaaccaatgcatctgactttcccattgggacatctttaaagtacgaatgccgtcctgagtactacgggaggccattctctatcacatgtctagataacctggtctggtcaagtcccaaagatgtctgtaaacgtaaatcatgtaaaactcctccagatccagtgaatggcatggtgcatgtgatcacagacatccaggttggatccagaatcaactattcttgtactacagggcaccgactcattggtcactcatctgctgaatgtatcctctcgggcaatgctgcccattggagcacgaagccgccaatttgtcaacgaattccttgtgggctaccccccaccatcgccaatggagatttcattagcaccaacagagagaattttcactatggatcagtggtgacctaccgctgcaatcctggaagcggagggagaaaggtgtttgagcttgtgggtgagccctccatatactgcaccagcaatgacgatcaagtgggcatctggagcggcccggcccctcagtgcattatacctaacaaatgcacgcctccaaatgtggaaaatggaatattggtatctgacaacagaagcttattttccttaaatgaagttgtggagtttaggtgtcagcctggctttgtcatgaaaggaccccgccgtgtgaagtgccaggccctgaacaaatgggagccggagctaccaagctgctccagggtatgtcagccacctccagatgtcctgcatgctgagcgtacccaaagggacaaggacaacttttcacccgggcaggaagtgttctacagctgtgagcccggctatgacctcagaggggctgcgtctatgcgctgcacaccccagggagactggagccctgcagcccccacatgtgaagtgaaatcctgtgatgacttcatgggccaacttcttaatggccgtgtgctatttccagtaaatctccagcttggagcaaaagtggattttgtttgtgatgaaggatttcaattaaaaggcagctctgctagttattgtgtcttggctggaatggaaagcctttggaatagcagtgttccagtgtgtgaacaaatcttttgtccaagtcctccagttattcctaatgggagacacacaggaaaacctctggaagtctttccctttggaaaagcagtaaattacacatgcgacccccacccagacagagggacgagcttcgacctcattggagagagcaccatccgctgcacaagtgaccctcaagggaatggggtttggagcagccctgcccctcgctgtggaattctgggtcactgtcaagccccagatcattttctgtttgccaagttgaaaacccaaaccaatgcatctgactttcccattgggacatctttaaagtacgaatgccgtcctgagtactacgggaggccattctctatcacatgtctagataacctggtctggtcaagtcccaaagatgtctgtaaacgtaaatcatgtaaaactcctccagatccagtgaatggcatggtgcatgtgatcacagacatccaggttggatccagaatcaactattcttgtactacagggcaccgactcattggtcactcatctgctgaatgtatcctctcaggcaatactgcccattggagcacgaagccgccaatttgtcaacgaattccttgtgggctacccccaaccatcgccaatggagatttcattagcaccaacagagagaattttcactatggatcagtggtgacctaccgctgcaatcttggaagcagagggagaaaggtgtttgagcttgtgggtgagccctccatatactgcaccagcaatgacgatcaagtgggcatctggagcggccccgcccctcagtgcattatacctaacaaatgcacgcctccaaatgtggaaaatggaatattggtatctgacaacagaagcttattttccttaaatgaagttgtggagtttaggtgtcagcctggctttgtcatgaaaggaccccgccgtgtgaagtgccaggccctgaacaaatgggagccagagttaccaagctgctccagggtgtgtcagccgcctccagaaatcctgcatggtgagcataccccaagccatcaggacaacttttcacctgggcaggaagtgttctacagctgtgagcctggctatgacctcagaggggctgcgtctctgcactgcacaccccagggagactggagccctgaagccccgagatgtgcagtgaaatcctgtgatgacttcttgggtcaactccctcatggccgtgtgctatttccacttaatctccagcttggggcaaaggtgtcctttgtctgtgatgaagggtttcgcttaaagggcagttccgttagtcattgtgtcttggttggaatgagaagcctttggaataacagtgttcctgtgtgtgaacatatcttttgtccaaatcctccagctatccttaatgggagacacacaggaactccctctggagatattccctatggaaaagaaatatcttacacatgtgacccccacccagacagagggatgaccttcaacctcattggggagagcaccatccgctgcacaagtgaccctcatgggaatggggtttggagcagccctgcccctcgctgtgaactttctgttcgtgctggtcactgtaaaaccccagagcagtttccatttgccagtcctacgatcccaattaatgactttgagtttccagtcgggacatctttgaattatgaatgccgtcctgggtattttgggaaaatgttctctatctcctgcctagaaaacttggtctggtcaagtgttgaagacaactgtagacgaaaatcatgtggacctccaccagaacccttcaatggaatggtgcatataaacacagatacacagtttggatcaacagttaattattcttgtaatgaagggtttcgactcattggttccccatctactacttgtctcgtctcaggcaataatgtcacatgggataagaaggcacctatttgtgagatcatatcttgtgagccacctccaaccatatccaatggagacttctacagcaacaatagaacatcttttcacaatggaacggtggtaacttaccagtgccacactggaccagatggagaacagctgtttgagcttgtgggagaacggtcaatatattgcaccagcaaagatgatcaagttggtgtttggagcagccctccccctcggtgtatttctactaataaatgcacagctccagaagttgaaaatgcaattagagtaccaggaaacaggagtttctttaccctcactgagatcatcagatttagatgtcagcccgggtttgtcatggtagggtcccacactgtgcagtgccagaccaatggcagatgggggcccaagctgccacactgctccagggtgtgtcagccgcctccagaaatcctgcatggtgagcataccctaagccatcaggacaacttttcacctgggcaggaagtgttctacagctgtgagcccagctatgacctcagaggggctgcgtctctgcactgcacgccccagggagactggagccctgaagcccctagatgtacagtgaaatcctgtgatgacttcctgggccaactccctcatggccgtgtgctacttccacttaatctccagcttggggcaaaggtgtcctttgtttgcgatgaagggttccgattaaaaggcaggtctgctagtcattgtgtcttggctggaatgaaagccctttggaatagcagtgttccagtgtgtgaacaaatcttttgtccaaatcctccagctatccttaatgggagacacacaggaactccctttggagatattccctatggaaaagaaatatcttacgcatgcgacacccacccagacagagggatgaccttcaacctcattggggagagctccatccgctgcacaagtgaccctcaagggaatggggtttggagcagccctgcccctcgctgtgaactttctgttcctgctgcctgcccacatccacccaagatccaaaacgggcattacattggaggacacgtatctctatatcttcctgggatgacaatcagctacatttgtgaccccggctacctgttagtgggaaagggcttcattttctgtacagaccagggaatctggagccaattggatcattattgcaaagaagtaaattgtagcttcccactgtttatgaatggaatctcgaaggagttagaaatgaaaaaagtatatcactatggagattatgtgactttgaagtgtgaagatgggtatactctggaaggcagtccctggagccagtgccaggcggatgacagatgggaccctcctctggccaaatgtacctctcgtacacatgatgctctcatagttggcactttatctggtacgatcttctttattttactcatcattttcctctcttggataattctaaagcacagaaaaggcaataatgcacatgaaaaccctaaagaagtggctatccatttacattctcaaggaggcagcagcgttcatccccgaactctgcaaacaaatgaagaaaatagcagggtccttccttgacaaagtactatacagctgaagaacatctcgaatacaattttggtgggaaaggagccaattgatttcaacagaatcagatctgagcttcataaagtctttgaagtgacttcacagagacgcagacatgtgcacttgaagatgctgccccttccctggtacctagcaaagctcctgcctctttgtgtgcgtcactgtgaaacccccacccttctgcctcgtgctaaacgcacacagtatctagtcaggggaaaagactgcatttaggagatagaaaatagtttggattacttaaaggaataaggtgttgcctggaatttctggtttgtaaggtggtcactgttcttttttaaaatatttgtaatatggaatgggctcagtaagaagagcttggaaaatgcagaaagttatgaaaaataagtcacttataattatgctacctactgataaccactcctaatattttgattcattttctgcctatcttctttcacatatgtgtttttttacatacgtacttttcccccttagtttgtttccttttattttatagagcagaaccctagtcttttaaacagtttagagtgaaatatatgctatatcagtttttactttctctagggagaaaaattaatttactagaaaggcatgaaatgatcatgggaagagtggttaagactactgaagagaaatatttggaaaataagatttcgatatcttctttttttttgagatggagtctggctctgtctcccaggctggagtgcagtggcgtaatctcggctcactgcaagctccgcct

SEQ ID NO: 121757 - DNA, 1981 bp, Homo sapiens
  Payload ID: 3871
  Gene Symbol: CR1
  Gene Name: complement component (3b/4b) receptor 1 (Knops blood group)
  ENST ID: ENST00000529814
  CDS Start-End: 1-1981
gatccctgctggcggttgtggtgctgcttgcgctgccggtggcctggggtcaatgcaatgccccagaatggcttccatttgccaggcctaccaacctaactgatgaatttgagtttcccattgggacatatctgaactatgaatgccgccctggttattccggaagaccgttttctatcatctgcctaaaaaactcagtctggactggtgctaaggacaggtgcagacgtaaatcatgtcgtaatcctccagatcctgtgaatggcatggtgcatgtgatcaaaggcatccagttcggatcccaaattaaatattcttgtactaaaggataccgactcattggttcctcgtctgccacatgcatcatctcaggtgatactgtcatttgggataatgaaacacctatttgtgacagaattccttgtgggctaccccccaccatcaccaatggagatttcattagcaccaacagagagaattttcactatggatcagtggtgacctaccgctgcaatcctggaagcggagggagaaaggtgtttgagcttgtgggtgagccctccatatactgcaccagcaatgacgatcaagtgggcatctggagcggccccgcccctcagtgcattatacctaacaaatgcacgcctccaaatgtggaaaatggaatattggtatctgacaacagaagcttattttccttaaatgaagttgtggagtttaggtgtcagcctggctttgtcatgaaaggaccccgccgtgtgaagtgccaggccctgaacaaatgggagccggagctaccaagctgctccagggtatgtcagccacctccagatgtcctgcatgctgagcgtacccaaagggacaaggacaacttttcacccgggcaggaagtgttctacagctgtgagcccggctacgacctcagaggggctgcgtctatgcgctgcacaccccagggagactggagccctgcagcccccacatgtgaagtgaaatcctgtgatgacttcatgggccaacttcttaatggccgtgtgctatttccagtaaatctccagcttggagcaaaagtggattttgtttgtgatgaaggatttcaattaaaaggcagctctgctagttattgtgtcttggctggaatggaaagcctttggaatagcagtgttccagtgtgtgaacaaatcttttgtccaaatcctccagctatccttaatgggagacacacaggaactccctttggagatattccctatggaaaagaaatatcttacgcatgcgacacccacccagacagagggatgaccttcaacctcattggggagagctccatccgctgcacaagtgaccctcaagggaatggggtttggagcagccctgcccctcgctgtgaactttctgttcctgctgcctgcccacatccacccaagatccaaaacgggcattacattggaggacacgtatctctatatcttcctgggatgacaatcagctacatttgtgaccccggctacctgttagtgggaaagggcttcattttctgtacagaccagggaatctggagccaattggatcattattgcaaagaagtaaattgtagcttcccactgtttatgaatggaatctcgaaggagttagaaatgaaaaaagtatatcactatggagattatgtgactttgaagtgtgaagatgggtatactctggaaggcagtccctggagccagtgccaggcggatgacagatgggaccctcctctggccaaatgtacctctcgtacacatgatgctctcatagttggcactttatctggtacgatcttctttattttactcatcattttcctctcttggataattctaaagcacagaaaaggcaataatgcacatgaaaaccctaaagaagtggctatccatttacattctcaaggaggcagcagcgttcatccccgaactctgcaaacaaatgaagaaaatagcaggtacct

SEQ ID NO: 121758 - DNA, 3740 bp, Homo sapiens
  Payload ID: 3871
  Gene Symbol: CR1
  Gene Name: complement component (3b/4b) receptor 1 (Knops blood group)
  ENST ID: ENST00000534202
  CDS Start-End: 8-1822
ggggagaatgggggcctcttctccaagaagcccggagcctgtcgggccgccggcgcccggtctccccttctgctgcggaggatccctgctggcggttgtggtgctgcttgcgctgccggtggcctggggtcaatgcaatgccccagaatggcttccatttgccaggcctaccaacctaactgatgaatttgagtttcccattgggacatatctgaactatgaatgccgccctggttattccggaagaccgttttctatcatctgcctaaaaaactcagtctggactggtgctaaggacaggtgcagacgtaaatcatgtcgtaatcctccagatcctgtgaatggcatggtgcatgtgatcaaaggcatccagttcggatcccaaattaaatattcttgtactaaaggataccgactcattggttcctcgtctgccacatgcatcatctcaggtgatactgtcatttgggataatgaaacacctatttgtgacagaattccttgtgggctaccccccaccatcaccaatggagatttcattagcaccaacagagagaattttcactatggatcagtggtgacctaccgctgcaatcctggaagcggagggagaaaggtgtttgagcttgtgggtgagccctccatatactgcaccagcaatgacgatcaagtgggcatctggagcggccccgcccctcagtgcattatacctaacaaatgcacgcctccaaatgtggaaaatggaatattggtatctgacaacagaagcttattttccttaaatgaagttgtggagtttaggtgtcagcctggctttgtcatgaaaggaccccgccgtgtgaagtgccaggccctgaacaaatgggagccggagctaccaagctgctccagggtatgtcagccacctccagatgtcctgcatgctgagcgtacccaaagggacaaggacaacttttcacccgggcaggaagtgttctacagctgtgagcccggctacgacctcagaggggctgcgtctatgcgctgcacaccccagggagactggagccctgcagcccccacatgtgaagtgaaatcctgtgatgacttcatgggccaacttcttaatggccgtgtgctatttccagtaaatctccagcttggagcaaaagtggattttgtttgtgatgaaggatttcaattaaaaggcagctctgctagttactgtgtcttggctggaatggaaagcctttggaatagcagtgttccagtgtgtgaacaaatcttttgtccaagtcctccagttattcctaatgggagacacacaggaaaacctctggaagtctttccctttgggaaaacagtaaattacacatgcgacccccacccagacagagggacgagcttcgacctcattggagagagcaccatccgctgcacaagtgaccctcaagggaatggggtttggagcagccctgcccctcgctgtggaattctgggtcactgtcaagccccagatcattttctgtttgccaagttgaaaacccaaaccaatgcatctgactttcccattgggacatctttaaagtacgaatgccgtcctgagtactacgggaggccattctctatcacatgtctagataacctggtctggtcaagtcccaaagatgtctgtaaacgtaaatcatgtaaaactcctccagatccagtgaatggcatggtgcatgtgatcacagacatccaggttggatccagaatcaactattcttgtactacagggtcactgtcaagccccagatcattttctgtttgccaagttgaaaacccaaaccaatgcatctgactttcccattgggacatctttaaagtacgaatgccgtcctgagtactacgggaggccattctctatcacatgtctagataacctggtctggtcaagtcccaaagatgtctgtaaacgtaaatcatgtaaaactcctccagatccagtgaatggcatggtgcatgtgatcacagacatccaggttggatccagaatcaactattcttgtactacagggcaccgactcattggtcactcatctgctgaatgtatcctctcaggcaatactgcccattggagcacgaagccgccaatttgtcaacgaattccttgtgggctacccccaaccatcgccaatggagatttcattagcaccaacagagagaattttcactatggatcagtggtgacctaccgctgcaatcttggaagcagagggagaaaggtgtttgagcttgtgggtgagccctccatatactgcaccagcaatgacgatcaagtgggcatctggagcggccccgcccctcagtgcattatacctaacaaatgcacgcctccaaatgtggaaaatggaatattggtatctgacaacagaagcttattttccttaaatgaagttgtggagtttaggtgtcagcctggctttgtcatgaaaggaccccgccgtgtgaagtgccaggccctgaacaaatgggagccagagttaccaagctgctccagggtgtgtcagccgcctccagaaatcctgcatggtgagcataccccaagccatcaggacaacttttcacctgggcaggaagtgttctacagctgtgagcctggctatgacctcagaggggctgcgtctctgcactgcacaccccagggagactggagccctgaagccccgagatgtgcagtgaaatcctgtgatgacttcttgggtcaactccctcatggccgtgtgctatttccacttaatctccagcttggggcaaaggtgtcctttgtctgtgatgaagggtttcgcttaaagggcagttccgttagtcattgtgtcttggttggaatgagaagcctttggaataacagtgttcctgtgtgtgaacatatcttttgtccaaatcctccagctatccttaatgggagacacacaggaactccctctggagatattccctatggaaaagaaatatcttacacatgtgacccccacccagacagagggatgaccttcaacctcattggggagagcaccatccgctgcacaagtgaccctcatgggaatggggtttggagcagccctgcccctcgctgtgaactttctgttcgtgctggtcactgtaaaaccccagagcagtttccatttgccagtcctacgatcccaattaatgactttgagtttccagtcgggacatctttgaattatgaatgccgtcctgggtattttgggaaaatgttctctatctcctgcctagaaaacttggtctggtcaagtgttgaagacaactgtagacgaaaatcatgtggacctccaccagaacccttcaatggaatggtgcatataaacacagatacacagtttggatcaacagttaattattcttgtaatgaagggtttcgactcattggttccccatctactacttgtctcgtctcaggcaataatgtcacatgggataagaaggcacctatttgtgagatcatatcttgtgagccacctccaaccatatccaatggagacttctacagcaacaatagaacatcttttcacaatggaacggtggtaacttaccagtgccacactggaccagatggagaacagctgtttgagcttgtgggagaacggtcaatatattgcaccagcaaagatgatcaagttggtgtttggagcagccctccccctcggtgtatttctactaataaatgcacagctccagaagttgaaaatgcaattaga

SEQ ID NO: 121759 - DNA, 1788 bp, Homo sapiens
  Payload ID: 3872
  Gene Symbol: CR1L
  Gene Name: complement component (3b/4b) receptor 1-like
  Uniprot ID: Q2VPA4
  ENST ID: ENST00000508064
  CDS Start-End: 61-1770
ggctggctttcggtttctctgctcacctccggataaatcacggggtctcccgcgccgctcatggcgcctcccgtccgtctcgagcgtccctttccttcccggcgctttcctgggttgcttctggcggccctggtgttgctgctgtcctccttctccgatcaatgcaatgtcccggaatggcttccatttgccaggcctaccaacctaactgatgactttgagtttcccattgggacatatctgaactatgaatgccgccctggttattccggaagaccgttttctatcatctgcctaaaaaactcagtctggacaagtgctaaggacaagtgcaaacgtaaatcatgtcgtaatcctccagatcctgtgaatggcatggcacatgtgatcaaagacatccagttcagatcccaaattaaatattcttgtcctaaaggataccgactcattggttcctcgtctgccacatgcatcatctcaggcaacactgtcatttgggataataaaacacctgtttgtgacagaattatttgtgggctaccccccaccatcgccaatggagatttcactagcatcagcagagagtattttcactatggatcagtggtgacctaccactgcaatcttggaagcagagggaaaaaggtgtttgagcttgtgggtgagccctccatatactgcaccagcaaagatgatcaagtgggcatctggagtggcccagcccctcagtgcattatacctaacaaatgcacgcctccaaatgtggaaaatggaatattggtatctgacaacagaagcttattttccttaaatgaagttgtggagtttaggtgtcagcctggctttggcatgaaagggccctcccatgtgaagtgccaggccctgaacaaatgggagccagagttaccaagctgctccagggtatgtcagccacctccagatgtcctgcatgctgagcgtacccaaagggacaaggacaacttttcacccgggcaggaagtgttctacagctgtgagcccggctacgacctcagaggatctacgtatttgcactgcacaccccagggagactggagccctgcagcccccagatgtgaagtgaaatcctgtgatgacttcctgggccaacttcctaatggccatgtgctatttccacttaatctccagcttggagcaaaagtggattttgtttgtgatgaaggatttcaattaaaaggcagctctgctagttactgtgttttggctggaatggaaagcctttggaatagcagtgttccagtgtgtgaacgtaaatcatgtgaaactcctccagttccagtgaatggcatggtgcatgtgatcacagacatccatgttggatccagaatcaactattcttgtactacagggcaccgactcattggtcactcatctgctgaatgtatcctctcgggcaatactgcccattggagcatgaagccaccaatttgtcaacaaatcttttgtccaaatcctccagctatccttaatgggagacacacaggaactccccttggagatattccctatggaaaagaagtatcttacacatgtgacccccacccagacagagggatgaccttcaacctcattggggagagcaccatccgccgcacaagtgaacctcatgggaatggggtttggagcagccctgcccctcgctgtgaacttcctgttggtgctggttcacatgatgctcttatagttggtaagttttatgaagtgtttgctgaggaattctgtcatctttaacagtaagtacctacttat

SEQ ID NO: 121760 - DNA, 1587 bp, Homo sapiens
  Payload ID: 3872
  Gene Symbol: CR1L
  Gene Name: complement component (3b/4b) receptor 1-like
  ENST ID: ENST00000294997
  CDS Start-End: 1-1167
attgggacatatctgaactatgaatgccgccctggttattccggaagaccgttttctatcatctgcctaaaaaactcagtctggacaagtgctaaggacaagtgcaaacgtaaatcatgtcgtaatcctccagatcctgtgaatggcatggcacatgtgatcaaagacatccagttcagatcccaaattaaatattcttgtcctaaaggataccgactcattggttcctcgtctgccacatgcatcatctcaggcaacactgtcatttgggataataaaacacctgtttgtgacagaattatttgtgggctaccccccaccatcgccaatggagatttcactagcatcagcagagagtattttcactatggatcagtggtgacctaccactgcaatcttggaagcagagggaaaaaggtgtttgagcttgtgggtgagccctccatatactgcaccagcaaagatgatcaagtgggcatctggagtggcccagcccctcagtgcattatacctaacaaatgcacgcctccaaatgtggaaaatggaatattggtatctgacaacagaagcttattttccttaaatgaagttgtggagtttaggtgtcagcctggctttggcatgaaagggccctcccatgtgaagtgccaggccctgaacaaatgggagccagagttaccaagctgctccagggtatgtcagccacctccagatgtcctgcatgctgagcgtacccaaagggacaaggacaacttttcacccgggcaggaagtgttctacagctgtgagcccggctacgacctcagaggatctacgtatttgcactgcacaccccagggagactggagccctgcagcccccagatgtgaagtgaaatcctgtgatgacttcctgggccaacttcctaatggccatgtgctatttccacttaatctccagcttggagcaaaagtggattttgtttgtgatgaaggatttcaattaaaaggcagctctgctagttactgtgttttggctggaatggaaagcctttggaatagcagtgttccagtgtgtgaacgtaaatcatgtgaaactcctccagttccagtgaatggcatggtgcatgtgatcacagacatccatgttggatccagaatcaactattcttgtactacagggttctgattaaaaggcaggtctgctagtcattgtgtcttggctggaatgaaagccctttggaatagcagtgttccagtgtgtgaacaaatcttttgtccaaatcctccagctatccttaatgggagacacacaggaactccccttggagatattccctatggaaaagaagtatcttacacatgtgacccccacccagacagagggatgaccttcaacctcattggggagagcaccatccgccgcacaagtgaacctcatgggaatggggtttggagcagccctgcccctcgctgtgaacttcctgttggtgctggttcacatgatgctcttatagttggcactttacttggtacgatcatctttattttaatcatcattttcctctattggataattttcaagcacagaaaaagggaccttccttga

SEQ ID NO: 121761 - DNA, 4240 bp, Homo sapiens
  Payload ID: 3873
  Gene Symbol: CR2
  Gene Name: complement component (3d/Epstein Barr virus) receptor 2
  Uniprot ID: P20023
  ENST ID: ENST00000367057
  CDS Start-End: 190-3468
caccggcgccgcgtcagcccccaggccgcctgcaggtgtgcgctcagaactagcacgtgtgccggacactatttaagggcccgcctctcctggctcacagctgcttgctgctccagccttgccctcccagagctgccggacgctcgcgggtctcggaacgcatcccgccgcgggggcttcggccgtggcatgggcgccgcgggcctgctcggggttttcttggctctcgtcgcaccgggggtcctcgggatttcttgtggctctcctccgcctatcctaaatggccggattagttattattctacccccattgctgttggtaccgtgataaggtacagttgttcaggtaccttccgcctcattggagaaaaaagtctattatgcataactaaagacaaagtggatggaacctgggataaacctgctcctaaatgtgaatatttcaataaatattcttcttgccctgagcccatagtaccaggaggatacaaaattagaggctctacaccctacagacatggtgattctgtgacatttgcctgtaaaaccaacttctccatgaacggaaacaagtctgtttggtgtcaagcaaataatatgtgggggccgacacgactaccaacctgtgtaagtgttttccctctcgagtgtccagcacttcctatgatccacaatggacatcacacaagtgagaatgttggctccattgctccaggattgtctgtgacttacagctgtgaatctggttacttgcttgttggagaaaagatcattaactgtttgtcttcgggaaaatggagtgctgtcccccccacatgtgaagaggcacgctgtaaatctctaggacgatttcccaatgggaaggtaaaggagcctccaattctccgggttggtgtaactgcaaactttttctgtgatgaagggtatcgactgcaaggcccaccttctagtcggtgtgtaattgctggacagggagttgcttggaccaaaatgccagtatgtgaagaaattttttgcccatcacctccccctattctcaatggaagacatataggcaactcactagcaaatgtctcatatggaagcatagtcacttacacttgtgacccggacccagaggaaggagtgaacttcatccttattggagagagcactctccgttgtacagttgatagtcagaagactgggacctggagtggccctgccccacgctgtgaactttctacttctgcggttcagtgtccacatccccagatcctaagaggccgaatggtatctgggcagaaagatcgatatacctataacgacactgtgatatttgcttgcatgtttggcttcaccttgaagggcagcaagcaaatccgatgcaatgcccaaggcacatgggagccatctgcaccagtctgtgaaaaggaatgccaggcccctcctaacatcctcaatgggcaaaaggaagatagacacatggtccgctttgaccctggaacatctataaaatatagctgtaaccctggctatgtgctggtgggagaagaatccatacagtgtacctctgagggggtgtggacaccccctgtaccccaatgcaaagtggcagcgtgtgaagctacaggaaggcaactcttgacaaaaccccagcaccaatttgttagaccagatgtcaactcttcttgtggtgaagggtacaagttaagtgggagtgtttatcaggagtgtcaaggcacaattccttggtttatggagattcgtctttgtaaagaaatcacctgcccaccaccccctgttatctacaatggggcacacaccgggagttccttagaagattttccatatggaaccacggtcacttacacatgtaaccctgggccagaaagaggagtggaattcagcctcattggagagagcaccatccgttgtacaagcaatgatcaagaaagaggcacctggagtggccctgctcccctgtgtaaactttccctccttgctgtccagtgctcacatgtccatattgcaaatggatacaagatatctggcaaggaagccccatatttctacaatgacactgtgacattcaagtgttatagtggatttactttgaagggcagtagtcagattcgttgcaaagctgataacacctgggatcctgaaataccagtttgtgaaaaaggctgccagtcacctcctgggctccaccatggtcgtcatacaggtggaaatacggtcttctttgtctctgggatgactgtagactacacttgtgaccctggctatttgcttgtgggaaacaaatccattcactgtatgccttcaggaaattggagtccttctgccccacggtgtgaagaaacatgccagcatgtgagacagagtcttcaagaacttccagctggttcacgtgtggagctagttaatacgtcctgccaagatgggtaccagttgactggacatgcttatcagatgtgtcaagatgctgaaaatggaatttggttcaaaaagattccactttgtaaagttattcactgtcaccctccaccagtgattgtcaatgggaagcacacaggcatgatggcagaaaactttctatatggaaatgaagtctcttatgaatgtgaccaaggattctatctcctgggagagaaaaaattgcagtgcagaagtgattctaaaggacatggatcttggagcgggccttccccacagtgcttacgatctcctcctgtgactcgctgccctaatccagaagtcaaacatgggtacaagctcaataaaacacattctgcatattcccacaatgacatagtgtatgttgactgcaatcctggcttcatcatgaatggtagtcgcgtgattaggtgtcatactgataacacatgggtgccaggtgtgccaacttgtatcaaaaaagccttcatagggtgtccacctccgcctaagacccctaacgggaaccatactggtggaaacatagctcgattttctcctggaatgtcaatcctgtacagctgtgaccaaggctacctgctggtgggagaggcactccttctttgcacacatgagggaacctggagccaacctgcccctcattgtaaagaggtaaactgtagctcaccagcagatatggatggaatccagaaagggctggaaccaaggaaaatgtatcagtatggagctgttgtaactctggagtgtgaagatgggtatatgctggaaggcagtccccagagccagtgccaatcggatcaccaatggaaccctcccctggcggtttgcagatcccgttcacttgctcctgtcctttgtggtattgctgcaggtttgatacttcttaccttcttgattgtcattaccttatacgtgatatcaaaacacagagcacgcaattattatacagatacaagccagaaagaagcttttcatttagaagcacgagaagtatattctgttgatccatacaacccagccagctgatcagaagacaaactggtgtgtgcctcattgcttggaattcagcggaatattgattagaaagaaactgctctaatatcagcaagtctctttatatggcctcaagatcaatgaaatgatgtcataagcgatcacttcctatatgcacttattctcaagaagaacatctttatggtaaagatgggagcccagtttcactgccatatactcttcaaggactttctgaagcctcacttatgagatgcctgaagccaggccatggctataaacaattacatggctctaaaaagttttgccctttttaaggaaggcactaaaaagagctgtcctggtatctagacccatcttctttttgaaatcagcatactcaatgttactatctgcttttggttataatgtgtttttaattatctaaagtatgaagcattttctggggttatgatggctttacctttattaggaagtatggttttattttgatagtagcttcctcctctggtggtgttaatcatttcatttttacccttacttggtttgagtttctctcacattactgtatatactttgcctttccataatcactcagtgattgcaatttgcacaagtttttttaaattatgggaatcaagatttaatcctagagatttggtgtacaattcaggctttggatgtttctttagcagttttgtgataagttctagttgcttgtaaaatttcacttaataatgtgtacattagtcattcaataaattgtaattgtaaagaaaacatacaa

SEQ ID NO: 121762 - DNA, 4063 bp, Homo sapiens
  Payload ID: 3873
  Gene Symbol: CR2
  Gene Name: complement component (3d/Epstein Barr virus) receptor 2
  Uniprot ID: P20023
  ENST ID: ENST00000367058
  CDS Start-End: 190-3291
caccggcgccgcgtcagcccccaggccgcctgcaggtgtgcgctcagaactagcacgtgtgccggacactatttaagggcccgcctctcctggctcacagctgcttgctgctccagccttgccctcccagagctgccggacgctcgcgggtctcggaacgcatcccgccgcgggggcttcggccgtggcatgggcgccgcgggcctgctcggggttttcttggctctcgtcgcaccgggggtcctcgggatttcttgtggctctcctccgcctatcctaaatggccggattagttattattctacccccattgctgttggtaccgtgataaggtacagttgttcaggtaccttccgcctcattggagaaaaaagtctattatgcataactaaagacaaagtggatggaacctgggataaacctgctcctaaatgtgaatatttcaataaatattcttcttgccctgagcccatagtaccaggaggatacaaaattagaggctctacaccctacagacatggtgattctgtgacatttgcctgtaaaaccaacttctccatgaacggaaacaagtctgtttggtgtcaagcaaataatatgtgggggccgacacgactaccaacctgtgtaagtgttttccctctcgagtgtccagcacttcctatgatccacaatggacatcacacaagtgagaatgttggctccattgctccaggattgtctgtgacttacagctgtgaatctggttacttgcttgttggagaaaagatcattaactgtttgtcttcgggaaaatggagtgctgtcccccccacatgtgaagaggcacgctgtaaatctctaggacgatttcccaatgggaaggtaaaggagcctccaattctccgggttggtgtaactgcaaactttttctgtgatgaagggtatcgactgcaaggcccaccttctagtcggtgtgtaattgctggacagggagttgcttggaccaaaatgccagtatgtgaagaaattttttgcccatcacctccccctattctcaatggaagacatataggcaactcactagcaaatgtctcatatggaagcatagtcacttacacttgtgacccggacccagaggaaggagtgaacttcatccttattggagagagcactctccgttgtacagttgatagtcagaagactgggacctggagtggccctgccccacgctgtgaactttctacttctgcggttcagtgtccacatccccagatcctaagaggccgaatggtatctgggcagaaagatcgatatacctataacgacactgtgatatttgcttgcatgtttggcttcaccttgaagggcagcaagcaaatccgatgcaatgcccaaggcacatgggagccatctgcaccagtctgtgaaaaggaatgccaggcccctcctaacatcctcaatgggcaaaaggaagatagacacatggtccgctttgaccctggaacatctataaaatatagctgtaaccctggctatgtgctggtgggagaagaatccatacagtgtacctctgagggggtgtggacaccccctgtaccccaatgcaaagtggcagcgtgtgaagctacaggaaggcaactcttgacaaaaccccagcaccaatttgttagaccagatgtcaactcttcttgtggtgaagggtacaagttaagtgggagtgtttatcaggagtgtcaaggcacaattccttggtttatggagattcgtctttgtaaagaaatcacctgcccaccaccccctgttatctacaatggggcacacaccgggagttccttagaagattttccatatggaaccacggtcacttacacatgtaaccctgggccagaaagaggagtggaattcagcctcattggagagagcaccatccgttgtacaagcaatgatcaagaaagaggcacctggagtggccctgctcccctgtgtaaactttccctccttgctgtccagtgctcacatgtccatattgcaaatggatacaagatatctggcaaggaagccccatatttctacaatgacactgtgacattcaagtgttatagtggatttactttgaagggcagtagtcagattcgttgcaaagctgataacacctgggatcctgaaataccagtttgtgaaaaagaaacatgccagcatgtgagacagagtcttcaagaacttccagctggttcacgtgtggagctagttaatacgtcctgccaagatgggtaccagttgactggacatgcttatcagatgtgtcaagatgctgaaaatggaatttggttcaaaaagattccactttgtaaagttattcactgtcaccctccaccagtgattgtcaatgggaagcacacaggcatgatggcagaaaactttctatatggaaatgaagtctcttatgaatgtgaccaaggattctatctcctgggagagaaaaaattgcagtgcagaagtgattctaaaggacatggatcttggagcgggccttccccacagtgcttacgatctcctcctgtgactcgctgccctaatccagaagtcaaacatgggtacaagctcaataaaacacattctgcatattcccacaatgacatagtgtatgttgactgcaatcctggcttcatcatgaatggtagtcgcgtgattaggtgtcatactgataacacatgggtgccaggtgtgccaacttgtatcaaaaaagccttcatagggtgtccacctccgcctaagacccctaacgggaaccatactggtggaaacatagctcgattttctcctggaatgtcaatcctgtacagctgtgaccaaggctacctgctggtgggagaggcactccttctttgcacacatgagggaacctggagccaacctgcccctcattgtaaagaggtaaactgtagctcaccagcagatatggatggaatccagaaagggctggaaccaaggaaaatgtatcagtatggagctgttgtaactctggagtgtgaagatgggtatatgctggaaggcagtccccagagccagtgccaatcggatcaccaatggaaccctcccctggcggtttgcagatcccgttcacttgctcctgtcctttgtggtattgctgcaggtttgatacttcttaccttcttgattgtcattaccttatacgtgatatcaaaacacagagcacgcaattattatacagatacaagccagaaagaagcttttcatttagaagcacgagaagtatattctgttgatccatacaacccagccagctgatcagaagacaaactggtgtgtgcctcattgcttggaattcagcggaatattgattagaaagaaactgctctaatatcagcaagtctctttatatggcctcaagatcaatgaaatgatgtcataagcgatcacttcctatatgcacttattctcaagaagaacatctttatggtaaagatgggagcccagtttcactgccatatactcttcaaggactttctgaagcctcacttatgagatgcctgaagccaggccatggctataaacaattacatggctctaaaaagttttgccctttttaaggaaggcactaaaaagagctgtcctggtatctagacccatcttctttttgaaatcagcatactcaatgttactatctgcttttggttataatgtgtttttaattatctaaagtatgaagcattttctggggttatgatggctttacctttattaggaagtatggttttattttgatagtagcttcctcctctggtggtgttaatcatttcatttttacccttacttggtttgagtttctctcacattactgtatatactttgcctttccataatcactcagtgattgcaatttgcacaagtttttttaaattatgggaatcaagatttaatcctagagatttggtgtacaattcaggctttggatgtttctttagcagttttgtgataagttctagttgcttgtaaaatttcacttaataatgtgtacattagtcattcaataaattgtaattgtaaagaaaacatacaa

SEQ ID NO: 121763 - DNA, 3877 bp, Homo sapiens
  Payload ID: 3873
  Gene Symbol: CR2
  Gene Name: complement component (3d/Epstein Barr virus) receptor 2
  ENST ID: ENST00000367059
  CDS Start-End: 190-3105
caccggcgccgcgtcagcccccaggccgcctgcaggtgtgcgctcagaactagcacgtgtgccggacactatttaagggcccgcctctcctggctcacagctgcttgctgctccagccttgccctcccagagctgccggacgctcgcgggtctcggaacgcatcccgccgcgggggcttcggccgtggcatgggcgccgcgggcctgctcggggttttcttggctctcgtcgcaccgggggtcctcgggatttcttgtggctctcctccgcctatcctaaatggccggattagttattattctacccccattgctgttggtaccgtgataaggtacagttgttcaggtaccttccgcctcattggagaaaaaagtctattatgcataactaaagacaaagtggatggaacctgggataaacctgctcctaaatgtgaatatttcaataaatattcttcttgccctgagcccatagtaccaggaggatacaaaattagaggctctacaccctacagacatggtgattctgtgacatttgcctgtaaaaccaacttctccatgaacggaaacaagtctgtttggtgtcaagcaaataatatgtgggggccgacacgactaccaacctgtgtaagtgttttccctctcgagtgtccagcacttcctatgatccacaatggacatcacacaagtgagaatgttggctccattgctccaggattgtctgtgacttacagctgtgaatctggttacttgcttgttggagaaaagatcattaactgtttgtcttcgggaaaatggagtgctgtcccccccacatgtgaagaggcacgctgtaaatctctaggacgatttcccaatgggaaggtaaaggagcctccaattctccgggttggtgtaactgcaaactttttctgtgatgaagggtatcgactgcaaggcccaccttctagtcggtgtgtaattgctggacagggagttgcttggaccaaaatgccagtatgtgaagaaattttttgcccatcacctccccctattctcaatggaagacatataggcaactcactagcaaatgtctcatatggaagcatagtcacttacacttgtgacccggacccagaggaaggagtgaacttcatccttattggagagagcactctccgttgtacagttgatagtcagaagactgggacctggagtggccctgccccacgctgtgaactttctacttctgcggttcagtgtccacatccccagatcctaagaggccgaatggtatctgggcagaaagatcgatatacctataacgacactgtgatatttgcttgcatgtttggcttcaccttgaagggcagcaagcaaatccgatgcaatgcccaaggcacatgggagccatctgcaccagtctgtgaaaaggaatgccaggcccctcctaacatcctcaatgggcaaaaggaagatagacacatggtccgctttgaccctggaacatctataaaatatagctgtaaccctggctatgtgctggtgggagaagaatccatacagtgtacctctgagggggtgtggacaccccctgtaccccaatgcaaagtggcagcgtgtgaagctacaggaaggcaactcttgacaaaaccccagcaccaatttgttagaccagatgtcaactcttcttgtggtgaagggtacaagttaagtgggagtgtttatcaggagtgtcaaggcacaattccttggtttatggagattcgtctttgtaaagaaatcacctgcccaccaccccctgttatctacaatggggcacacaccgggagttccttagaagattttccatatggaaccacggtcacttacacatgtaaccctgggccagaaagaggagtggaattcagcctcattggagagagcaccatccgttgtacaagcaatgatcaagaaagaggcacctggagtggccctgctcccctgtgtaaactttccctccttgctgtccagtgctcacatgtccatattgcaaatggatacaagatatctggcaaggaagccccatatttctacaatgacactgtgacattcaagtgttatagtggatttactttgaagggcagtagtcagattcgttgcaaagctgataacacctgggatcctgaaataccagtttgtgaaaaagaaacatgccagcatgtgagacagagtcttcaagaacttccagctggttcacgtgtggagctagttaatacgtcctgccaagatgggtaccagttgactggacatgcttatcagatgtgtcaagatgctgaaaatggaatttggttcaaaaagattccactttgtaaagttattcactgtcaccctccaccagtgattgtcaatgggaagcacacaggcatgatggcagaaaactttctatatggaaatgaagtctcttatgaatgtgaccaaggattctatctcctgggagagaaaaaattgcagtgcagaagtgattctaaaggacatggatcttggagcgggccttccccacagtgcttacgatctcctcctgtgactcgctgccctaatccagaagtcaaacatgggtacaagctcaataaaacacattctgcatattcccacaatgacatagtgtatgttgactgcaatcctggcttcatcatgaatggtagtcgcgtgattaggtgtcatactgataacacatgggtgccaggtgtgccaacttgtatcaaaaaagaggtaaactgtagctcaccagcagatatggatggaatccagaaagggctggaaccaaggaaaatgtatcagtatggagctgttgtaactctggagtgtgaagatgggtatatgctggaaggcagtccccagagccagtgccaatcggatcaccaatggaaccctcccctggcggtttgcagatcccgttcacttgctcctgtcctttgtggtattgctgcaggtttgatacttcttaccttcttgattgtcattaccttatacgtgatatcaaaacacagagcacgcaattattatacagatacaagccagaaagaagcttttcatttagaagcacgagaagtatattctgttgatccatacaacccagccagctgatcagaagacaaactggtgtgtgcctcattgcttggaattcagcggaatattgattagaaagaaactgctctaatatcagcaagtctctttatatggcctcaagatcaatgaaatgatgtcataagcgatcacttcctatatgcacttattctcaagaagaacatctttatggtaaagatgggagcccagtttcactgccatatactcttcaaggactttctgaagcctcacttatgagatgcctgaagccaggccatggctataaacaattacatggctctaaaaagttttgccctttttaaggaaggcactaaaaagagctgtcctggtatctagacccatcttctttttgaaatcagcatactcaatgttactatctgcttttggttataatgtgtttttaattatctaaagtatgaagcattttctggggttatgatggctttacctttattaggaagtatggttttattttgatagtagcttcctcctctggtggtgttaatcatttcatttttacccttacttggtttgagtttctctcacattactgtatatactttgcctttccataatcactcagtgattgcaatttgcacaagtttttttaaattatgggaatcaagatttaatcctagagatttggtgtacaattcaggctttggatgtttctttagcagttttgtgataagttctagttgcttgtaaaatttcacttaataatgtgtacattagtcattcaataaattgtaattgtaaagaaaacatacaa

SEQ ID NO: 121764 - DNA, 1169 bp, Homo sapiens
  Payload ID: 3874
  Gene Symbol: C1QBP
  Gene Name: complement component 1, q subcomponent binding protein
  Uniprot ID: Q07021
  ENST ID: ENST00000225698
  CDS Start-End: 83-931
gcttccggcggcgcctcaggtcgcggggcgcctaggcctgggttgtcctttgcatctgcacgtgttcgcagtcgtttccgcgatgctgcctctgctgcgctgcgtgccccgtgtgctgggctcctccgtcgccggcctccgcgctgccgcgcccgcctcgcctttccggcagctcctgcagccggcaccccggctgtgcacccggcccttcgggctgctcagcgtgcgcgcaggttccgagcggcggccgggcctcctgcggcctcgcggaccctgcgcctgtggctgtggctgcggctcgctgcacaccgacggagacaaagcttttgttgatttcctgagtgatgaaattaaggaggaaagaaaaattcagaagcataaaaccctccctaagatgtctggaggttgggagctggaactgaatgggacagaagcgaaattagtgcggaaagttgccggggaaaaaatcacggtcactttcaacattaacaacagcatcccaccaacatttgatggtgaggaggaaccctcgcaagggcagaaggttgaagaacaggagcctgaactgacatcaactcccaatttcgtggttgaagttataaagaatgatgatggcaagaaggcccttgtgttggactgtcattatccagaggatgaggttggacaagaagacgaggctgagagtgacatcttctctatcagggaagttagctttcagtccactggcgagtctgaatggaaggatactaattatacactcaacacagattccttggactgggccttatatgaccacctaatggatttccttgccgaccgaggggtggacaacacttttgcagatgagctggtggagctcagcacagccctggagcaccaggagtacattacttttcttgaagacctcaagagttttgtcaagagccagtagagcagacagatgctgaaagccatagtttcatggcaggctttggccagtgaacaaatcctactctgaagctagacatgtgctttgaaatgattatcatcctaatatcatgggggaaaaaataccaaatttaaattatatgttttgtgttctcatttattatcatttttttctgtacaaatctattatttctagatttttgtataacatgatagacataaaattggtttatctcctccaa

SEQ ID NO: 121765 - DNA, 383 bp, Homo sapiens
  Payload ID: 3874
  Gene Symbol: C1QBP
  Gene Name: complement component 1, q subcomponent binding protein
  ENST ID: ENST00000576122
  CDS Start-End: 357-383
ccgacctctgaggtctgggacatttttccattgattggcaaccagcgggctaaacccacgtatgatcatatttcccccacctcccctatccagcagtttcgttttcttttggtagggggtgaataaaattaaatactagggtacctttttccttagtcttattctatcgaaagtggacctttgggaaggcccatggtcgtggttgaaaatagcatagttatatcgtttggcaagtggaagaggattggaaattctcctggtttatagcggaaagtggagacaaagcttttgttgatttcctgagtgatgaaattaaggaggaaagaaaaattcagaagcataaaaccctccctaagatgtctggaggttgggagctggaactg

SEQ ID NO: 121766 - DNA, 901 bp, Homo sapiens
  Payload ID: 3874
  Gene Symbol: C1QBP
  Gene Name: complement component 1, q subcomponent binding protein
  ENST ID: ENST00000574444
  CDS Start-End: 151-687
agggcctgcaaccgacctctgaggtctgggacatttttccattgattggcaaccagcgggctaaacccacgagacaaagcttttgttgatttcctgagtgatgaaattaaggaggaaagaaaaattcagaagcataaaaccctccctaagatgtctggaggttgggagctggaactgaatgggacagaagcgaaattagtgcggaaagttgccggggaaaaaatcacggtcactttcaacattaacaacagcatcccaccaacatttgatggtgaggaggaaccctcgcaagggcagaaggttgaagaacaggagcctgaactgacatcaactcccaatttcgtggttgaagttataaagaatgatgatggcaagaaggcccttgtgttggactgtcattatccagaggatgaggttggacaagaagacgaggctgagagtgacatcttctctatcagggaagttagctttcagtccactggcgagtctgaatggaaggatactaattatacactcaacacagattccttggactgggccttatatgaccacctaatggatttccttgccgaccgaggggtggacaacacttttgcagatgagctggtggagctcagcacagccctggagcaccaggagtacattacttttcttgaagacctcaagagttttgtcaagagccagtagagcagacagatgctgaaagccatagtttcatggcaggctttggccagtgaacaaatcctactctgaagctagacatgtgctttgaaatgattatcatcctaatatcatgggggaaaaaataccaaatttaaattatatgttttgtgttctcatttattatcatttttttctgtacaaatctattatttctagatttttgtataacatgatagac

SEQ ID NO: 121767 - DNA, 688 bp, Homo sapiens
  Payload ID: 3874
  Gene Symbol: C1QBP
  Gene Name: complement component 1, q subcomponent binding protein
  ENST ID: ENST00000570805
  CDS Start-End: 156-688
gctgagggacatctgcttaaaggtatcgtctggtcctagtgttctgtgggtgacaaagctgtcactttgttcaaggagacaaagcttttgttgatttcctgagtgatgaaattaaggaggaaagaaaaattcagaagcataaaaccctccctaagatgtctggaggttgggagctggaactgaatgggacagaagcgaaattagtgcggaaagttgccggggaaaaaatcacggtcactttcaacattaacaacagcatcccaccaacatttgatggtgaggaggaaccctcgcaagggcagaaggttgaagaacaggagcctgaactgacatcaactcccaatttcgtggttgaagttataaagaatgatgatggcaagaaggcccttgtgttggactgtcattatccagaggatgaggttggacaagaagacgaggctgagagtgacatcttctctatcagggaagttagctttcagtccactggcgagtctgaatggaaggatactaattatacactcaacacagattccttggactgggccttatatgaccacctaatggatttccttgccgaccgaggggtggacaacacttttgcagatgagctggtggagctcagcacagccctggagcaccaggagtacattacttttcttgaagacctcaagagttttgtcaagagcca

SEQ ID NO: 121768 - DNA, 1143 bp, Homo sapiens
  Payload ID: 3875
  Gene Symbol: C1QA
  Gene Name: complement component 1, q subcomponent, A chain
  Uniprot ID: P02745
  ENST ID: ENST00000374642
  CDS Start-End: 205-942
agtcttgctgaagtctgcttgaaatgtccctggtgagcttctggccactggggaagttcagggggcaggtctgaagaaggggaagtaggaagggatgtgaaacttggccacagcctggagccactcctgctgggcagcccacagggtccctgggcggagggcaggagcatccagttggagttgacaacaggaggcagaggcatcatggagggtccccggggatggctggtgctctgtgtgctggccatatcgctggcctctatggtgaccgaggacttgtgccgagcaccagacgggaagaaaggggaggcaggaagacctggcagacgggggcggccaggcctcaagggggagcaaggggagccgggggcccctggcatccggacaggcatccaaggccttaaaggagaccagggggaacctgggccctctggaaaccccggcaaggtgggctacccagggcccagcggccccctcggagcccgtggcatcccgggaattaaaggcaccaagggcagcccaggaaacatcaaggaccagccgaggccagccttctccgccattcggcggaaccccccaatggggggcaacgtggtcatcttcgacacggtcatcaccaaccaggaagaaccgtaccagaaccactccggccgattcgtctgcactgtacccggctactactacttcaccttccaggtgctgtcccagtgggaaatctgcctgtccatcgtctcctcctcaaggggccaggtccgacgctccctgggcttctgtgacaccaccaacaaggggctcttccaggtggtgtcagggggcatggtgcttcagctgcagcagggtgaccaggtctgggttgaaaaagaccccaaaaagggtcacatttaccagggctctgaggccgacagcgtcttcagcggcttcctcatcttcccatctgcctgagccagggaaggaccccctcccccacccacctctctggcttccatgctccgcctgtaaaatgggggcgctattgcttcagctgctgaagggagggggctggctctgagagccccaggactggctgccccgtgacacatgctctaagaagctcgtttcttagacctcttcctggaataaacatctgtgtctgtgtctgctgaa

SEQ ID NO: 121769 - DNA, 976 bp, Homo sapiens
  Payload ID: 3875
  Gene Symbol: C1QA
  Gene Name: complement component 1, q subcomponent, A chain
  Uniprot ID: P02745
  ENST ID: ENST00000402322
  CDS Start-End: 38-775
acctgcccaggccctcccgtgtctccacagaggcatcatggagggtccccggggatggctggtgctctgtgtgctggccatatcgctggcctctatggtgaccgaggacttgtgccgagcaccagacgggaagaaaggggaggcaggaagacctggcagacgggggcggccaggcctcaagggggagcaaggggagccgggggcccctggcatccggacaggcatccaaggccttaaaggagaccagggggaacctgggccctctggaaaccccggcaaggtgggctacccagggcccagcggccccctcggagcccgtggcatcccgggaattaaaggcaccaagggcagcccaggaaacatcaaggaccagccgaggccagccttctccgccattcggcggaaccccccaatggggggcaacgtggtcatcttcgacacggtcatcaccaaccaggaagaaccgtaccagaaccactccggccgattcgtctgcactgtacccggctactactacttcaccttccaggtgctgtcccagtgggaaatctgcctgtccatcgtctcctcctcaaggggccaggtccgacgctccctgggcttctgtgacaccaccaacaaggggctcttccaggtggtgtcagggggcatggtgcttcagctgcagcagggtgaccaggtctgggttgaaaaagaccccaaaaagggtcacatttaccagggctctgaggccgacagcgtcttcagcggcttcctcatcttcccatctgcctgagccagggaaggaccccctcccccacccacctctctggcttccatgctccgcctgtaaaatgggggcgctattgcttcagctgctgaagggagggggctggctctgagagccccaggactggctgccccgtgacacatgctctaagaagctcgtttcttagacctcttcctggaataaacatctgtgtctgtgtctgctgaa

SEQ ID NO: 121770 - DNA, 768 bp, Homo sapiens
  Payload ID: 3875
  Gene Symbol: C1QA
  Gene Name: complement component 1, q subcomponent, A chain
  ENST ID: ENST00000438241
  CDS Start-End: 107-768
ccaggaggctgggcagctgaggcagggagggagggaaataactgtgcctgattctaggacagggatgggggtgcagcactgatccaggacccagaatggaggcatcatggagggtccccggggatggctggtgctctgtgtgctggccatatcgctggcctctatggtgaccgaggacttgtgccgagcaccagacgggaagaaaggggaggcaggaagacctggcagacgggggcggccaggcctcaagggggagcaaggggagccgggggcccctggcatccggacaggcatccaaggccttaaaggagaccagggggaacctgggccctctggaaaccccggcaaggtgggctacccagggcccagcggccccctcggagcccgtggcatcccgggaattaaaggcaccaagggcagcccaggaaacatcaaggaccagccgaggccagccttctccgccattcggcggaaccccccaatggggggcaacgtggtcatcttcgacacggtcatcaccaaccaggaagaaccgtaccagaaccactccggccgattcgtctgcactgtacccggctactactacttcaccttccaggtgctgtcccagtgggaaatctgcctgtccatcgtctcctcctcaaggggccaggtccgacgctccctgggcttctgtgacaccaccaacaaggggctcttccaggtggtgtcagggggcatggtgcttcagctgcagcagggtgaccaggtctgggttgaaaaagaccc

SEQ ID NO: 121771 - DNA, 1044 bp, Homo sapiens
  Payload ID: 3876
  Gene Symbol: C1QB
  Gene Name: complement component 1, q subcomponent, B chain
  Uniprot ID: P02746
  ENST ID: ENST00000314933
  CDS Start-End: 133-894
gcccttcccgcctctggggaagggaacttccgcttcggaccgagggcagtaggctctcggctcctggtcccactgctgctcagcccagtggcctcacaggacaccagcttcccaggaggcgtctgacacagtatgatgatgaagatcccatggggcagcatcccagtactgatgttgctcctgctcctgggcctaatcgatatctcccaggcccagctcagctgcaccgggcccccagccatccctggcatcccgggtatccctgggacacctggccccgatggccaacctgggaccccagggataaaaggagagaaagggcttccagggctggctggagaccatggtgagttcggagagaagggagacccagggattcctgggaatccaggaaaagtcggccccaagggccccatgggccctaaaggtggcccaggggcccctggagccccaggccccaaaggtgaatcgggagactacaaggccacccagaaaatcgccttctctgccacaagaaccatcaacgtccccctgcgccgggaccagaccatccgcttcgaccacgtgatcaccaacatgaacaacaattatgagccccgcagtggcaagttcacctgcaaggtgcccggtctctactacttcacctaccacgccagctctcgagggaacctgtgcgtgaacctcatgcgtggccgggagcgtgcacagaaggtggtcaccttctgtgactatgcctacaacaccttccaggtcaccaccggtggcatggtcctcaagctggagcagggggagaacgtcttcctgcaggccaccgacaagaactcactactgggcatggagggtgccaacagcatcttttccgggttcctgctctttccagatatggaggcctgacctgtgggctgcttcacatccaccccggctccccctgccagcaacgctcactctacccccaacaccaccccttgcccaaccaatgcacacagtagggcttggtgaatgctgctgagtgaatgagtaaataaactcttcaaggccaaggga

SEQ ID NO: 121772 - DNA, 977 bp, Homo sapiens
  Payload ID: 3876
  Gene Symbol: C1QB
  Gene Name: complement component 1, q subcomponent, B chain
  ENST ID: ENST00000432749
  CDS Start-End: 292-977
gcccttcccgcctctggggaagggaacttccgcttcggaccgagggcagtaggctctcggctcctggtcccactgctgctcagcccagtggcctcacaggacaccagcttcccagccctgtcaggttgaaatcagcattgccaagaggctcagagaggttaaggcacttgcctgaggttatgcagccggtagcagatggggctttaaagtcaagtgggcctgactccatgttgcggaaagggactgctggaccgaaggagatggaaaggaggcgtctgacacagtatgatgatgaagatcccatggggcagcatcccagtactgatgttgctcctgctcctgggcctaatcgatatctcccaggcccagctcagctgcaccgggcccccagccatccctggcatcccgggtatccctgggacacctggccccgatggccaacctgggaccccagggataaaaggagagaaagggcttccagggctggctggagaccatggtgagttcggagagaagggagacccagggattcctgggaatccaggaaaagtcggccccaagggccccatgggccctaaaggtggcccaggggcccctggagccccaggccccaaaggtgaatcgggagactacaaggccacccagaaaatcgccttctctgccacaagaaccatcaacgtccccctgcgccgggaccagaccatccgcttcgaccacgtgatcaccaacatgaacaacaattatgagccccgcagtggcaagttcacctgcaaggtgcccggtctctactacttcacctaccacgccagctctcgagggaacctgtgcgtgaacctcatgcgtggccgggagcgtgcacagaaggtggtcaccttctgtgactatgcctacaacaccttccaggtcaccaccggtggcatggtcctcaagctggagcagggggagaacgtcttcctgcaggccaccgacaagaactc

SEQ ID NO: 121773 - DNA, 1254 bp, Homo sapiens
  Payload ID: 3876
  Gene Symbol: C1QB
  Gene Name: complement component 1, q subcomponent, B chain
  ENST ID: ENST00000509305
  CDS Start-End: 347-1102
gtggatgttcccccaggacagcgtgttctccccacagctgctgagttggcagaaccaaacttgccacccacccgtctcatttacagtaaatccagtgggttgcagaaataggacctgaaactgcctgagggcagcagggtggggggacagtgaggggacgggaaaggggccagcctgctggtccatgggaggggaccgtcaggggaaagcccttcccgcctctggggaagggaacttccgcttcggaccgagggcagtaggctctcggctcctggtcccactgctgctcagcccagtggcctcacaggacaccagcttcccaggaggcgtctgacacagtatgatgatgaagatcccatggggcagcatcccagtactgatgttgctcctgctcctgggcctaatcgatatctcccaggcccagctcagctgcaccgggcccccagccatccctggcatcccgggtatccctgggacacctggccccgatggccaacctgggaccccagggataaaaggagagaaagggcttccagggctggctggagaccatggtgagttcggagagaagggagacccagggattcctgggaatccaggaaaagtcggccccaagggccccatgggccctaaaggtggcccaggggcccctggagccccaggccccaaaggtgaatcgggagactacaaggccacccagaaaatcgccttctctgccacaagaaccatcaacgtccccctgcgccgggaccagaccatccgcttcgaccacgtgatcaccaacatgaacaacaattatgagccccgcagtggcaagttcacctgcaaggtgcccggtctctactacttcacctaccacgccagctctcgagggaacctgtgcgtgaacctcatgcgtggccgggagcgtgcacagaaggtggtcaccttctgtgactatgcctacaacaccttccaggtcaccaccggtggcatggtcctcaagctggagcagggggagaacgtcttcctgcaggccaccgacaagaactcactactgggcatggagggtgccaacagcatcttttccgggttcctgctctttccagatatggaggcctgacctgtgggctgcttcacatccaccccggctccccctgccagcaacgctcactctacccccaacaccaccccttgcccaaccaatgcacacagtagggcttggtgaatgctgctgagtgaatgagtaaataaactcttcaaggccaagggaca

SEQ ID NO: 121774 - DNA, 677 bp, Homo sapiens
  Payload ID: 3876
  Gene Symbol: C1QB
  Gene Name: complement component 1, q subcomponent, B chain
  ENST ID: ENST00000510260
  CDS Start-End: 218-677
agcaggtacaattatggtcccatcctatagcagagaaaattggggctcccttgactgacaacacatcaactggcaagtggcagaggcgggattggaatcaaaggctctgactgtaagccagcactcaggcagcgggcccgccacatgatgctcactgaggaacacccctgcccagtgtagaagaagatcacgaggaggcgtctgacacagtatgatgatgaagatcccatggggcagcatcccagtactgatgttgctcctgctcctgggcctaatcgatatctcccaggcccagctcagctgcaccgggcccccagccatccctggcatcccgggtatccctgggacacctggccccgatggccaacctgggaccccagggataaaaggagagaaagggcttccagggctggctggagaccatggtgagttcggagagaagggagacccagggattcctgggaatccaggaaaagtcggccccaagggccccatgggccctaaaggtggcccaggggcccctggagccccaggccccaaaggtgaatcgggagactacaaggccacccagaaaatcgccttctctgccacaagaaccatcaacgtccccctgcgccgggaccagaccatccgcttcgaccacgtgatcaccaacatgaacaacaattatgagcccc

SEQ ID NO: 121775 - DNA, 1089 bp, Homo sapiens
  Payload ID: 3877
  Gene Symbol: C1QC
  Gene Name: complement component 1, q subcomponent, C chain
  Uniprot ID: P02747
  ENST ID: ENST00000374637
  CDS Start-End: 248-985
tgggagaggggaagcagatctgaggacatctctgtgccaggccagaaaccgcccacctgcaggtgaggcccggacccctgcccaggtatgggcagatggccgtttcctccaccttccgccaccttcctgaaatgtggtgccaggggcagcttggtgtgtgaggggaaggagggttcccactcctgctgggccccggggcctgggctgaagaaaaggccccaccatccatccatgttccttctccgggatggacgtggggcccagctccctgccccaccttgggctgaagctgctgctgctcctgctgctgctgcccctcaggggccaagccaacacaggctgctacgggatcccagggatgcccggcctgcccggggcaccagggaaggatgggtacgacggactgccggggcccaagggggagccaggaatcccagccattcccgggatccgaggacccaaagggcagaagggagaacccggcttacccggccatcctgggaaaaatggccccatgggaccccctgggatgccaggggtgcccggccccatgggcatccctggagagccaggtgaggagggcagatacaagcagaaattccagtcagtgttcacggtcactcggcagacccaccagccccctgcacccaacagcctgatcagattcaacgcggtcctcaccaacccgcagggagattatgacacgagcactggcaagttcacctgcaaagtccccggcctctactactttgtctaccacgcgtcgcatacagccaacctgtgcgtgctgctgtaccgcagcggcgtcaaagtggtcaccttctgtggccacacgtccaaaaccaatcaggtcaactcgggcggtgtgctgctgaggttgcaggtgggcgaggaggtgtggctggctgtcaatgactactacgacatggtgggcatccagggctctgacagcgtcttctccggcttcctgctcttccccgactagggcgggcagatgcgctcgagccccacgggccttccacctccctcagcttcctgcatggacccaccttactggccagtctgcatccttgcctagaccattctccc

SEQ ID NO: 121776 - DNA, 1183 bp, Homo sapiens
  Payload ID: 3877
  Gene Symbol: C1QC
  Gene Name: complement component 1, q subcomponent, C chain
  Uniprot ID: P02747
  ENST ID: ENST00000374639
  CDS Start-End: 119-856
agacaccgtgtcctcttgcctgggagaggggaagcagatctgaggacatctctgtgccaggccagaaaccgcccacctgcaggtgaggcccggacccctgcccagttccttctccgggatggacgtggggcccagctccctgccccaccttgggctgaagctgctgctgctcctgctgctgctgcccctcaggggccaagccaacacaggctgctacgggatcccagggatgcccggcctgcccggggcaccagggaaggatgggtacgacggactgccggggcccaagggggagccaggaatcccagccattcccgggatccgaggacccaaagggcagaagggagaacccggcttacccggccatcctgggaaaaatggccccatgggaccccctgggatgccaggggtgcccggccccatgggcatccctggagagccaggtgaggagggcagatacaagcagaaattccagtcagtgttcacggtcactcggcagacccaccagccccctgcacccaacagcctgatcagattcaacgcggtcctcaccaacccgcagggagattatgacacgagcactggcaagttcacctgcaaagtccccggcctctactactttgtctaccacgcgtcgcatacagccaacctgtgcgtgctgctgtaccgcagcggcgtcaaagtggtcaccttctgtggccacacgtccaaaaccaatcaggtcaactcgggcggtgtgctgctgaggttgcaggtgggcgaggaggtgtggctggctgtcaatgactactacgacatggtgggcatccagggctctgacagcgtcttctccggcttcctgctcttccccgactagggcgggcagatgcgctcgagccccacgggccttccacctccctcagcttcctgcatggacccaccttactggccagtctgcatccttgcctagaccattctccccaccagatggacttctcctccagggagcccaccctgacccacccccactgcaccccctccccatgggttctctccttcctctgaacttctttaggagtcactgcttgtgtggttcctgggacacttaaccaatgccttctggtactgccattcttttttttttttttttcaagtattggaaggggtggggagatatataaataaatcatgaaatcaatacata

SEQ ID NO: 121777 - DNA, 1163 bp, Homo sapiens
  Payload ID: 3877
  Gene Symbol: C1QC
  Gene Name: complement component 1, q subcomponent, C chain
  Uniprot ID: P02747
  ENST ID: ENST00000374640
  CDS Start-End: 99-836
ctcagacaccgtgtcctcttgcctgggagaggggaagcagatctgaggacatctctgtgccaggccagaaaccgcccacctgcagttccttctccgggatggacgtggggcccagctccctgccccaccttgggctgaagctgctgctgctcctgctgctgctgcccctcaggggccaagccaacacaggctgctacgggatcccagggatgcccggcctgcccggggcaccagggaaggatgggtacgacggactgccggggcccaagggggagccaggaatcccagccattcccgggatccgaggacccaaagggcagaagggagaacccggcttacccggccatcctgggaaaaatggccccatgggaccccctgggatgccaggggtgcccggccccatgggcatccctggagagccaggtgaggagggcagatacaagcagaaattccagtcagtgttcacggtcactcggcagacccaccagccccctgcacccaacagcctgatcagattcaacgcggtcctcaccaacccgcagggagattatgacacgagcactggcaagttcacctgcaaagtccccggcctctactactttgtctaccacgcgtcgcatacagccaacctgtgcgtgctgctgtaccgcagcggcgtcaaagtggtcaccttctgtggccacacgtccaaaaccaatcaggtcaactcgggcggtgtgctgctgaggttgcaggtgggcgaggaggtgtggctggctgtcaatgactactacgacatggtgggcatccagggctctgacagcgtcttctccggcttcctgctcttccccgactagggcgggcagatgcgctcgagccccacgggccttccacctccctcagcttcctgcatggacccaccttactggccagtctgcatccttgcctagaccattctccccaccagatggacttctcctccagggagcccaccctgacccacccccactgcaccccctccccatgggttctctccttcctctgaacttctttaggagtcactgcttgtgtggttcctgggacacttaaccaatgccttctggtactgccattcttttttttttttttttcaagtattggaaggggtggggagatatataaataaatcatgaaatcaatacata

SEQ ID NO: 121778 - DNA, 1295 bp, Homo sapiens
  Payload ID: 3878
  Gene Symbol: C1QL1
  Gene Name: complement component 1, q subcomponent-like 1
  Uniprot ID: O75973
  ENST ID: ENST00000253407
  CDS Start-End: 24-800
tagcggccgccgcgggtgtggtgatgctgctggtgctggtggtgctcatccccgtgctggtgagctcgggcggcccggaaggccactatgagatgctgggcacctgccgcatggtgtgcgacccctaccccgcgcggggccccggcgccggcgcgcggaccgacggcggcgacgccctgagcgagcagagcggcgcgcccccgccttccacgctggtgcagggcccccaggggaagccgggccgcaccggcaagcccggccctccggggcctcccggggacccaggtcctcccggccctgtggggccgccgggggagaagggtgagccaggcaagccgggccctccggggctgccgggcgcggggggcagcggcgccatcagcactgccacctacaccacggtgccgcgcgtggccttctacgccggcctcaagaacccccacgagggttacgaggtactcaagtttgacgacgtggtcaccaacctaggcaacaactacgacgcggccagcggcaagtttacgtgcaacattcccggcacctactttttcacctaccatgtcctcatgcgcggcggcgacggcaccagtatgtgggcagacctctgcaagaatggccaggtgcgggccagtgctattgcccaggacgcggaccagaactacgactacgccagcaacagcgtgatcctgcacctggacgccggcgacgaggtcttcatcaagctggatggaggcaaagcacacggcggcaacagcaacaaatacagcacgttctctggcttcatcatctactccgactgagctccccacgtctccctccacccacgtccctcacccgccggggtcccctccgggcggggcagacgatgactcgcccctcgcccacccgctcgctgcccggccctccccggctatgacgcccccggcccgtgctcaacaccgcctgggccacagctaggccctcccaccggctcgctgcagagccgggcccagcgcgccctgtccccgtgccagggaaccggggttgaccgcccccgcccagcccgcgctatatatttgtacaataggactgtttactgcccacctccgcctgccagcccaccccagcctggggagaggtcgcggcggcgggtttgcttcctgcgctctgagatgagctgccctccgctccctccggggtggcgcgcccgggggaggggggagttgggggctggatagcttcccagcaccctcagagcccccgcccggctgtgccccgtctgaccaaagttataataaaaacattttcaccccgca

SEQ ID NO: 121779 - DNA, 2043 bp, Homo sapiens
  Payload ID: 3879
  Gene Symbol: C1QL2
  Gene Name: complement component 1, q subcomponent-like 2
  Uniprot ID: Q7Z5L3
  ENST ID: ENST00000272520
  CDS Start-End: 621-1484
gacatgagggctccgtctcccgagtgatggcagcgcgcgctgcttcgccgcctccgccgctcagccccggactccttacgtcagggtagcggggtcccccctccgcgcgggagccagcgaacagcgagagagcacagcagagcgcgccgcggagccggggcgccctcactgcgctaggagccccactaaacccagcggagcggagcctggcgggaggcagcgccgcggagccagcgccggacgccgcaagcagactccccggccagcgcaagcactccctggccggcgccggaccctcggggcgccggattcgtcttgtgtgccccacgtcatgcgcgcgggcgtccgcggctctcccgaccagccccagcgcggtgggcccaggctcagaggtcccggcgcctctcgctgaagtagttgggtagccggggctgggggtcgccacgtcgggggcgcggccaggacccgcggagccggtccccgagcgcggggagcggggccgcccgcgccgccccaccattacctccccgggcggcaaggaggagctggtggcggtcgcctcccggctgtggcagcggcggcggcgtgcctgcctggcggccgtcggcgtactcttggccatggcgctcgggctgctcatcgccgtgccgctgctgctgcaggcggcgccccgaggcgccgcgcactatgagatgatgggcacctgccgcatgatctgcgacccttacactgccgcgcccggcggggagcccccgggtgcaaaggcgcagccacccggacccagcaccgccgccctggaagtcatgcaggacctcagcgccaaccctcctcctcctttcatccagggacccaagggcgacccggggcgaccgggcaagccagggccgcgggggccccctggagagccgggcccgcctggacccaggggccctccgggagagaagggcgactcggggcggcccgggctgccagggctgcaactgacggcgggcacggccagcggcgtcggggtggtgggcggcggggccggggtaggtggcgattccgagggtgaagtgaccagtgcgctgagcgccaccttcagcggccccaagatcgccttctatgtgggtctcaagagcccccacgaaggctatgaggtgctgaagttcgatgacgtggtcaccaacctcggcaatcactatgaccccaccacgggcaagttcagctgccaggtacgcggcatctacttcttcacctaccacatcctcatgcgcggcggcgacggcaccagcatgtgggcggacctctgcaagaacgggcaggtccgggccagcgccattgcacaggacgccgaccagaactacgactacgccagtaacagcgtggtgctgcacttggattcaggggacgaagtgtatgtgaagctggatggcgggaaggctcacggaggcaataataacaagtacagcacgttctcgggctttcttctgtacccggattaggggcgcggggggtgcgaggcggggtggctgcaggccgcccggtctccgcccgggcgcggctccttggcaaaggccactctcgattcataacacttcctgacatctcctttggaaaagacaaatccctgcgtcctccctgccccgctcctggcctcagtgcgtctgcgacccaccacgctcagggctgtgctcctggtctccatccccatcccggcaagggaggaagggacgcccgagcccttgaggcggcggcacagactttgcaaacctgattagactggacaggcagggccgggagcctgccctcctcagacagcctcctcccagtgcctagaagcggagggctccgggccctggccagggaggtaggccagagggagcgcgggcttcctggggcgtccttctttgtgacccgaaatacttgtgcagatttccctgtccatcagccaaaaccccacccacagcagaattccagcaaacagaaaattcacctctccacaccgcattccctcctgactcagactcaccgcgatgcattaaattatgtttttagactatg

SEQ ID NO: 121780 - DNA, 2493 bp, Homo sapiens
  Payload ID: 3880
  Gene Symbol: C1QL3
  Gene Name: complement component 1, q subcomponent-like 3
  Uniprot ID: Q5VWW1
  ENST ID: ENST00000298943
  CDS Start-End: 941-1708
tcagagtaatgccaaactctctctgagtgggatgagcagagcagatgctgcaatgagatgccaaagcggctccccttcctctgtgccttgggtgcctataaattgctccggcgcgcgtttgtcagcctcctcttctcctggcaggtggtacccaggcagaattctgccttcagtctctctctcgctccgctcccggccgtgaggcgctcgccgctgctcgctcgctcctccgccccagctctgagcctcgccgtgccgaccgtgcccgccgccgccgccgctgggcgcacccgggggacgcccgggcccacgcggggctttggggtgcgcgtctattcgagttgtggtggtggcaaaggaggaagagagaaaggaggcaataaaaaaaaaaggcagcggacgggcgaactgagcgagcgaaagaagaggaggaggaggcagaaaaaggcaacttcagacggaaagttggtgcgaacaggcgcagtctgcaaaaacggaaaagtcgatcgcaggcggcggcggcataaaagtgtgagctgcccgggcgagctcaggaggcggcggctggctctgccctcccggtggccgcgccggcgccggctgcagccacaggtgcgaaggagctcgcggggggcgagggcgccccgcgcacccctcccccggcccccaccccgggctcgggacttcggctcaagtcactgggcgcccgcgctccctccccagccgcagcctccgcggggggagcaggagtcggcagcagcggccggcgcacgcacgcccaggggagttggggttcgcagggggttgttttcggctctgaagaggtccccgcccaaccttcaaaattctgtccaaaagcagacaagaggatcgccccgcgctgagccggctggtgggcagcaggaggcgcctgatcgccgccggggcgctgggggtggtgatggtgctgctgctggtgatcctcatcccggtgctggtgagctcggccggcacgtcggcgcactacgagatgctgggcacctgccgcatggtctgcgacccctacgggggcaccaaggcgcccagcaccgctgccacgcccgaccgcggcctcatgcagtccctgcccaccttcatccagggccccaaaggcgaggccggcaggcccgggaaggcgggtccgcgcgggccccccggagagcccgggccacccggccccatggggcccccgggcgagaagggcgagccgggccgccaaggcctgccgggcccgcccggggcgcccggcctgaacgcggccggggccatcagcgccgccacctacagcacggtgcccaagatcgccttctacgccggcctcaagcggcagcatgaaggctacgaggtgctcaagttcgacgacgtggtcaccaacctcggaaaccactacgaccccaccaccggcaagttcacctgctccatcccgggcatctacttcttcacctaccacgtcctgatgcgcggaggggacggcaccagcatgtgggctgatctctgcaaaaacaaccaggtgcgtgctagtgcaattgcccaagatgctgatcagaattacgactatgccagtaacagtgtggttcttcatttggagccgggagatgaagtctatatcaaattagatggcgggaaagcccatggaggaaacaacaacaaatacagcacgttttctggatttattatttatgctgactgataatgcagaaactaagcttattattctgagtttgaacactggattcgtatggctaacgtcagtgaatcaaggatcccaggggatgccaatggcagggcacctcagttgtgtatatgtggggaaatcaaatgctacctgactcacatctgtatcactcagaaacattatgtaaaaaatatcaaagcaagataagcagatgtgtgatccactaccgccaaagcaaatactccttatcgttagtgtccatgtgaatgaagtcctatatagatcacaaatttttatagacaaatctaagacattgaattatttcttctatatatatgatactttggtgtactgtgatcttgctgcttttatccatatgtcagctttggttcttgtgagtttacctgcttattatgatacttggagtccattcatagtgtggggaagaatgatttttgccctgcaggagaaggtctaattgaaataatgctgcttgtccccaaagaaattgtttgccttgtactcttgttaaccttagagctagacctgggaatgattcaacttcaagccttaacctggaattttctggatttgagggaattcccaagcctatgatctttttcacattttctttttcttatatgaattttcttttctctcttttctggtgatagtctttaaaaatagagattgacagtgtatcataggattaccctctaagtgtgaaaatgtgtaattatgtacggtatttagaaaaagcccttatgtgtccattttgtcaactgaatacatttagattc

SEQ ID NO: 121781 - DNA, 783 bp, Homo sapiens
  Payload ID: 3880
  Gene Symbol: C1QL3
  Gene Name: complement component 1, q subcomponent-like 3
  Uniprot ID: Q5VWW1
  ENST ID: ENST00000619991
  CDS Start-End: 81-722
gacaagaggatcgccccgcgctgagccggctggtgggcagcaggaggcgcctgatcgccgccggggcgctgggggtggtgatggtgctgctgctggtgatcctcatcccggtgctggtgagctcggccggcacgtcggcgcactacgagatgctgggcacctgccgcatggtctgcgacccctacgggggcaccaaggcgcccagcaccgctgccacgcccgaccgcggcctcatgcagtccctgcccaccttcatccagggcccgcccggggcgcccggcctgaacgcggccggggccatcagcgccgccacctacagcacggtgcccaagatcgccttctacgccggcctcaagcggcagcatgaaggctacgaggtgctcaagttcgacgacgtggtcaccaacctcggaaaccactacgaccccaccaccggcaagttcacctgctccatcccgggcatctacttcttcacctaccacgtcctgatgcgcggaggggacggcaccagcatgtgggctgatctctgcaaaaacaaccaggtgcgtgctagtgcaattgcccaagatgctgatcagaattacgactatgccagtaacagtgtggttcttcatttggagccgggagatgaagtctatatcaaattagatggcgggaaagcccatggaggaaacaacaacaaatacagcacgttttctggatttattatttatgctgactgataatgcagaaactaagcttattattctgagtttgaacactggattcgtatggctaacgtca

SEQ ID NO: 121782 - DNA, 2071 bp, Homo sapiens
  Payload ID: 3881
  Gene Symbol: C1QL4
  Gene Name: complement component 1, q subcomponent-like 4
  Uniprot ID: Q86Z23
  ENST ID: ENST00000334221
  CDS Start-End: 712-1428
ataccacccgcgcccgggagggaggggaggaaggttagggaggcggagagggaccgcgcccgcaggagagaggcgcgggccagggctctagcagggactggggccgcggcaggggtagcaaggtgagtcggtgcttgccaagaggcagagcgcaaaacctactaggagatcgcgcccggtgagcagcacccgcagctcagagcccgggacgtccggagcgcggggagcagtcccctctccatcagggagtggtctatctgggcagtctgggacccaggcaccgcgccatccctgagagagcagcagtctggagagcaggcatctcagatccctaagaaaccagccgtccgagaagccgcggatctcaggtgcccaggatcgttaggactgaacgggagggtactagaggaccactggctctggaccgtcgggagctgcccctgacgtaacccacgaggggcctccccttgacggacggcttggggagcggcaccgccgcggctggagcccgcagaggcagggtaaggggagcggggggcagccgtcgggggagtgcagacccaggcccaaggcgggtcaccgcctcctggcccgcggagagccccggccccggcagccattgcgcccaagagtgaggaagatttgctggccctggcagcgtcgcggctgagccgccgcaagagggtggcgggcgcggccgtcggagtggccatggtgctgctgctgctggtggccatcccgctgctggtgcacagctcccgcgggccagcgcactacgagatgctgggtcgctgccgcatggtgtgcgacccgcatgggccccgtggccctggtcccgacggcgcgcctgcttccgtgccccccttcccgccaggcgccaagggagaggtgggccggcgcgggaaagcaggcctgcgggggccccctggaccaccaggtccaagagggcccccaggagaacccggcaggccaggccccccgggccctcccggtccaggtccgggcggggtggcgcccgctgccggctacgtgcctcgcattgctttctacgcgggcctgcggcggccccacgagggttacgaggtgctgcgcttcgacgacgtggtgaccaacgtgggcaacgcctacgaggcagccagcggcaagtttacttgccccatgccaggcgtctacttcttcgcttaccacgtgctcatgcgcggcggcgacggcaccagcatgtgggccgacctcatgaagaacggacaggtccgggccagcgccattgctcaggacgcggaccagaactacgactacgccagcaacagcgtcattctgcacctggacgtgggcgacgaggtcttcatcaagctggacggcgggaaagtgcacggcggcaacaccaacaagtacagcaccttctccggcttcatcatctaccccgactgagccggccccgccccgtgcccccgctcgccccttctctcccgtcctcacccacctcctgcccgccccacccgaggcgccaccccaccctttgagagcctggcggtggggtggacccttccgttcccggaggcggcctaaatgggcgaactcttggtgctcaagggtataagtggccgggaagaggaggagacccggccagaggagcagagcgacttccggagggatcacccgcacccaagtgcgcgctggaccccataggggcagaggtcgtggctttctcttttgtacagagatggggagcagttttaatagcgggactcagaggcccagaaagccggagggaagcccccgcagcttgcgagggaaataacagaaacaggaggagcccatttaggcaagagaagacattaaaacagggtagtgcaggttctccgtcacaactttctctcgccaccctctcgtcccctcgtctccactttcaggctcaggctccagccttggcagccttcctgtgaactggaggaaccagtgaattctttcctggcatttaaaacgcattctgtacagtccccattcccccctatccggactaggccctggggctacagctgctgctgcctcttctaataaagtgaggttgggg

SEQ ID NO: 121783 - DNA, 2660 bp, Homo sapiens
  Payload ID: 3882
  Gene Symbol: C1R
  Gene Name: complement component 1, r subcomponent
  Uniprot ID: P00736
  ENST ID: ENST00000542285
  CDS Start-End: 220-2337
acaaacagggatttcaaaaccaaaactaaattaaagtggaaactcagatcttttgtttatgcaaatagttcattccctccaacattcctccgggaatggtcccccctccactccacagaaaaccctcccctccctgctgtgcatgacgcgggctccctctgcacacagtgcacgaagacgctgtcgggagagcccaggattcaacacgggccttgagaaatgtggctcttgtacctcctggtgccggccctgttctgcagggcaggaggctccattcccatccctcagaagttatttggggaggtgacttcccctctgttccccaagccttaccccaacaactttgaaacaaccactgtgatcacagtccccacgggatacagggtgaagctcgtcttccagcagtttgacctggagccttctgaaggctgcttctatgattatgtcaagatctctgctgataagaaaagcctggggaggttctgtgggcaactgggttctccactgggcaaccccccgggaaagaaggaatttatgtcccaagggaacaagatgctgctgaccttccacacagacttctccaacgaggagaatgggaccatcatgttctacaagggcttcctggcctactaccaagctgtggaccttgatgaatgtgcttcccggagcaaatcaggggaggaggatccccagccccagtgccagcacctgtgtcacaactacgttggaggctacttctgttcctgccgtccaggctatgagcttcaggaagacaggcattcctgccaggctgagtgcagcagcgagctgtacacggaggcatcaggctacatctccagcctggagtaccctcggtcctacccccctgacctgcgctgcaactacagcatccgggtggagcggggcctcaccctgcacctcaagttcctggagccttttgatattgatgaccaccagcaagtacactgcccctatgaccagctacagatctatgccaacgggaagaacattggcgagttctgtgggaagcaaaggccccccgacctcgacaccagcagcaatgctgtggatctgctgttcttcacagatgagtcgggggacagccggggctggaagctgcgctacaccaccgagatcatcaagtgcccccagcccaagaccctagacgagttcaccatcatccagaacctgcagcctcagtaccagttccgtgactacttcattgctacctgcaagcaaggctaccagctcatagaggggaaccaggtgctgcattccttcacagctgtctgccaggatgatggcacgtggcatcgtgccatgcccagatgcaagatcaaggactgtgggcagccccgaaacctgcctaatggtgacttccgttacaccaccacaatgggagtgaacacctacaaggcccgtatccagtactactgccatgagccatattacaagatgcagaccagagctggcagcagggagtctgagcaaggggtgtacacctgcacagcacagggcatttggaagaatgaacagaagggagagaagattcctcggtgcttgccagtgtgtgggaagcccgtgaaccccgtggaacagaggcagcgcatcatcggagggcaaaaagccaagatgggcaacttcccctggcaggtgttcaccaacatccacgggcgcgggggcggggccctgctgggcgaccgctggatcctcacagctgcccacaccctgtatcccaaggaacacgaagcgcaaagcaacgcctctttggatgtgttcctgggccacacaaatgtggaagagctcatgaagctaggaaatcaccccatccgcagggtcagcgtccacccggactaccgtcaggatgagtcctacaattttgagggggacatcgccctgctggagctggaaaatagtgtcaccctgggtcccaacctcctccccatctgcctccctgacaacgataccttctacgacctgggcttgatgggctatgtcagtggcttcggggtcatggaggagaagattgctcatgacctcaggtttgtccgtctgcccgtagctaatccacaggcctgtgagaactggctccggggaaagaataggatggatgtgttctctcaaaacatgttctgtgctggacacccatctctaaagcaggacgcctgccagggggatagtgggggcgtttttgcagtaagggacccgaacactgatcgctgggtggccacgggcatcgtgtcctggggcatcgggtgcagcaggggctatggcttctacaccaaagtgctcaactacgtggactggatcaagaaagagatggaggaggaggactgagcccagaattcactaggttcgaatccagagagcagtgtggaaaaaaaaaaacaaaaaacaactgaccagttgttgataaccactaagagtctctattaaaattactgatgcagaaagaccgtgtgtgaaattctctttcctgtagtcccattgatgtactttacctgaaacaacccaaagggcccctttctttcttctgaggattgcagaggatatagttatcaatctctagttgtcactttcctcttccactttgataccattgggtcattgaatataactttttccaaataaagttttatgagaaatgccagtgtgcaaaa

SEQ ID NO: 121784 - DNA, 2211 bp, Homo sapiens
  Payload ID: 3882
  Gene Symbol: C1R
  Gene Name: complement component 1, r subcomponent
  ENST ID: ENST00000535233
  CDS Start-End: 85-2100
gctgtgcatgacgcgggctccctctgcacacagtgcacgaagacgctgtcgggagagcccaggattcaacacgggccttgagaaatgtggctcttgtacctcctggtgccggccctgttctgcagggcaggaggctccattcccatccctcagaagttatttggggaggtgacttcccctctgttccccaagccttaccccaacaactttgaaacaaccactgtgatcacagtccccacgggatacagggtgaagctcgtcttccagcagtttgacctggagccttctgaaggctgcttctatgattatgtcaagatgctgctgaccttccacacagacttctccaacgaggagaatgggaccatcatgttctacaagggcttcctggcctactaccaagctgtggaccttgatgaatgtgcttcccggagcaaatcaggggaggaggatccccagccccagtgccagcacctgtgtcacaactacgttggaggctacttctgttcctgccgtccaggctatgagcttcaggaagacaggcattcctgccaggctgagtgcagcagcgagctgtacacggaggcatcaggctacatctccagcctggagtaccctcggtcctacccccctgacctgcgctgcaactacagcatccgggtggagcggggcctcaccctgcacctcaagttcctggagccttttgatattgatgaccaccagcaagtacactgcccctatgaccagctacagatctatgccaacgggaagaacattggcgagttctgtgggaagcaaaggccccccgacctcgacaccagcagcaatgctgtggatctgctgttcttcacagatgagtcgggggacagccggggctggaagctgcgctacaccaccgagatcatcaagtgcccccagcccaagaccctagacgagttcaccatcatccagaacctgcagcctcagtaccagttccgtgactacttcattgctacctgcaagcaaggctaccagctcatagaggggaaccaggtgctgcattccttcacagctgtctgccaggatgatggcacgtggcatcgtgccatgcccagatgcaagatcaaggactgtgggcagccccgaaacctgcctaatggtgacttccgttacaccaccacaatgggagtgaacacctacaaggcccgtatccagtactactgccatgagccatattacaagatgcagaccagagctggcagcagggagtctgagcaaggggtgtacacctgcacagcacagggcatttggaagaatgaacagaagggagagaagattcctcggtgcttgccagtgtgtgggaagcccgtgaaccccgtggaacagaggcagcgcatcatcggagggcaaaaagccaagatgggcaacttcccctggcaggtgttcaccaacatccacgggcgcgggggcggggccctgctgggcgaccgctggatcctcacagctgcccacaccctgtatcccaaggaacacgaagcgcaaagcaacgcctctttggatgtgttcctgggccacacaaatgtggaagagctcatgaagctaggaaatcaccccatccgcagggtcagcgtccacccggactaccgtcaggatgagtcctacaattttgagggggacatcgccctgctggagctggaaaatagtgtcaccctgggtcccaacctcctccccatctgcctccctgacaacgataccttctacgacctgggcttgatgggctatgtcagtggcttcggggtcatggaggagaagattgctcatgacctcaggtttgtccgtctgcccgtagctaatccacaggcctgtgagaactggctccggggaaagaataggatggatgtgttctctcaaaacatgttctgtgctggacacccatctctaaagcaggacgcctgccagggggatagtgggggcgtttttgcagtaagggacccgaacactgatcgctgggtggccacgggcatcgtgtcctggggcatcgggtgcagcaggggctatggcttctacaccaaagtgctcaactacgtggactggatcaagaaagagatggaggaggaggactgagcccagaattcactaggttcgaatccagagagcagtgtggaaaaaaaaaaacaaaaaacaactgaccagttgttgataaccactaagagtctctattaaaattactgatgc

SEQ ID NO: 121785 - DNA, 519 bp, Homo sapiens
  Payload ID: 3882
  Gene Symbol: C1R
  Gene Name: complement component 1, r subcomponent
  ENST ID: ENST00000540610
  CDS Start-End: 239-519
gttcattccctccaacattcctccgggaatggtcccccctccactccacagaaaaccctcccctccctgctgtgcatgacgcgggctccctctgcacacagtgcacgaagacgctgtcgggagagcccaggattcaacacgggccttgagaaatatctctgctgataagaaaagcctggggaggttctgtgggcaactgggttctccactgggcaaccccccgggaaagaaggaatttatgtcccaagggaacaagatgctgctgaccttccacacagacttctccaacgaggagaatgggaccatcatgttctacaagggcttcctggcctactaccaagctgtggaccttgatgaatgtgcttcccggagcaaatcaggggaggaggatccccagccccagtgccagcacctgtgtcacaactacgttggaggctacttctgttcctgccgtccaggctatgagcttcaggaagacaggcattcctgccaggctgagtgcagcagcgagctgtacac

SEQ ID NO: 121786 - DNA, 591 bp, Homo sapiens
  Payload ID: 3882
  Gene Symbol: C1R
  Gene Name: complement component 1, r subcomponent
  ENST ID: ENST00000541042
  CDS Start-End: 377-591
acagaaaaccctcccctccctgctgtgcatgacgcgggctccctctgcacacagtgcacgaagacgctgtcgggagagcccaggattcaacacgggccttgagaaatgaggctccattcccatccctcagaagttatttggggaggtgacttcccctctgttccccaagccttaccccaacaactttgaaacaaccactgtgatcacagtccccacgggatacagggtgaagctcgtcttccagcagtttgacctggagccttctgaaggctgcttctatgattatgtcaagatctctgctgataagaaaagcctggggaggttctgtgggcaactgggttctccactgggcaaccccccgggaaagaaggaatttatgtcccaagggaacaagatgctgctgaccttccacacagacttctccaacgaggagaatgggaccatcatgttctacaagggcttcctggcctactaccaagctgtggaccttgatgaatgtgcttcccggagcaaatcaggggaggaggatccccagccccagtgccagcacctgtgtcacaactacgttggaggctacttctgttcctgccg

SEQ ID NO: 121787 - DNA, 575 bp, Homo sapiens
  Payload ID: 3882
  Gene Symbol: C1R
  Gene Name: complement component 1, r subcomponent
  ENST ID: ENST00000540242
  CDS Start-End: 106-575
acagaaaaccctcccctccctgctgtgcatgacgcgggctccctctgcacacagtgcacgaagacgctgtcgggagagcccaggattcaacacgggccttgagaaatgtggctcttgtacctcctggtgccggccctgttctgcagggcaggaggctccattcccatccctcagaagttatttggggaggtgacttcccctctgttccccaagccttaccccaacaactttgaaacaaccactgtgatcacagtccccacgggatacagggtgaagctcgtcttccagcagtttgacctggagccttctgaaggctgcttctatgattatgtcaagatctctgctgataagaaaagcctggggaggttctgtgggcaactgggttctccactgggcaaccccccgggaaagaaggaatttatgtcccaagggaacaagatgctgctgaccttccacacagacttctccaacgaggagaatgggaccatcatgttctacaagggcttcctggcctactaccaagctgtgggggaggaggatccccagccccagtgccagcacctgtgtcacaacta

SEQ ID NO: 121788 - DNA, 553 bp, Homo sapiens
  Payload ID: 3882
  Gene Symbol: C1R
  Gene Name: complement component 1, r subcomponent
  ENST ID: ENST00000538050
  CDS Start-End: 407-553
acactgccctggagagtgacccgatgcagcagctgcacaggccatcctccccacccacgcacccctgctgagaacatgtctgtgaggttcagggtggctcttgtacctcctggtgccggccctgttctgcagggcaggaggctccattcccatccctcagaagttatttggggaggtgacttcccctctgttccccaagccttaccccaacaactttgaaacaaccactgtgatcacagtccccacgggatacagggtgaagctcgtcttccagcagtttgacctggagccttctgaaggctgcttctatgattatgtcaagatctctgctgataagaaaagcctggggaggttctgtgggcaactgggttctccactgggcaaccccccgggaaagaaggaatttatgtcccaagggaacaagatgctgctgaccttccacacagacttctccaacgaggagaatgggaccatcatgttctacaagggcttcctggcctactaccaagctgtggaccttgatgaatgtgcttcccggagcaaatcaggggag

SEQ ID NO: 121789 - DNA, 2347 bp, Homo sapiens
  Payload ID: 3882
  Gene Symbol: C1R
  Gene Name: complement component 1, r subcomponent
  ENST ID: ENST00000536053
  CDS Start-End: 77-2236
gacactgccctggagagtgacccgatgcagcagctgcacaggccatcctccccacccacgcacccctgctgagaacatgtctgtgaggttcagggtgggcagagaggagaatgcccagtggtggctcttgtacctcctggtgccggccctgttctgcagggcaggaggctccattcccatccctcagaagttatttggggaggtgacttcccctctgttccccaagccttaccccaacaactttgaaacaaccactgtgatcacagtccccacgggatacagggtgaagctcgtcttccagcagtttgacctggagccttctgaaggctgcttctatgattatgtcaagatctctgctgataagaaaagcctggggaggttctgtgggcaactgggttctccactgggcaaccccccgggaaagaaggaatttatgtcccaagggaacaagatgctgctgaccttccacacagacttctccaacgaggagaatgggaccatcatgttctacaagggcttcctggcctactaccaagctgtggaccttgatgaatgtgcttcccggagcaaatcaggggaggaggatccccagccccagtgccagcacctgtgtcacaactacgttggaggctacttctgttcctgccgtccaggctatgagcttcaggaagacaggcattcctgccaggctgagtgcagcagcgagctgtacacggaggcatcaggctacatctccagcctggagtaccctcggtcctacccccctgacctgcgctgcaactacagcatccgggtggagcggggcctcaccctgcacctcaagttcctggagccttttgatattgatgaccaccagcaagtacactgcccctatgaccagctacagatctatgccaacgggaagaacattggcgagttctgtgggaagcaaaggccccccgacctcgacaccagcagcaatgctgtggatctgctgttcttcacagatgagtcgggggacagccggggctggaagctgcgctacaccaccgagatcatcaagtgcccccagcccaagaccctagacgagttcaccatcatccagaacctgcagcctcagtaccagttccgtgactacttcattgctacctgcaagcaaggctaccagctcatagaggggaaccaggtgctgcattccttcacagctgtctgccaggatgatggcacgtggcatcgtgccatgcccagatgcaagatcaaggactgtgggcagccccgaaacctgcctaatggtgacttccgttacaccaccacaatgggagtgaacacctacaaggcccgtatccagtactactgccatgagccatattacaagatgcagaccagagctggcagcagggagtctgagcaaggggtgtacacctgcacagcacagggcatttggaagaatgaacagaagggagagaagattcctcggtgcttgccagtgtgtgggaagcccgtgaaccccgtggaacagaggcagcgcatcatcggagggcaaaaagccaagatgggcaacttcccctggcaggtgttcaccaacatccacgggcgcgggggcggggccctgctgggcgaccgctggatcctcacagctgcccacaccctgtatcccaaggaacacgaagcgcaaagcaacgcctctttggatgtgttcctgggccacacaaatgtggaagagctcatgaagctaggaaatcaccccatccgcagggtcagcgtccacccggactaccgtcaggatgagtcctacaattttgagggggacatcgccctgctggagctggaaaatagtgtcaccctgggtcccaacctcctccccatctgcctccctgacaacgataccttctacgacctgggcttgatgggctatgtcagtggcttcggggtcatggaggagaagattgctcatgacctcaggtttgtccgtctgcccgtagctaatccacaggcctgtgagaactggctccggggaaagaataggatggatgtgttctctcaaaacatgttctgtgctggacacccatctctaaagcaggacgcctgccagggggatagtgggggcgtttttgcagtaagggacccgaacactgatcgctgggtggccacgggcatcgtgtcctggggcatcgggtgcagcaggggctatggcttctacaccaaagtgctcaactacgtggactggatcaagaaagagatggaggaggaggactgagcccagaattcactaggttcgaatccagagagcagtgtggaaaaaaaaaaacaaaaaacaactgaccagttgttgataaccactaagagtctctattaaaattactgatgc

SEQ ID NO: 121790 - DNA, 521 bp, Homo sapiens
  Payload ID: 3882
  Gene Symbol: C1R
  Gene Name: complement component 1, r subcomponent
  ENST ID: ENST00000543835
  CDS Start-End: 54-521
agtgcacgaagacgctgtcgggagagcccaggattcaacacgggccttgagaaatgtggctcttgtacctcctggtgccggccctgttctgcagggcaggaggctccattcccatccctcagaagttatttggggaggtgacttcccctctgttccccaagccttaccccaacaactttgaaacaaccactgtgatcacagtccccacgggatacagggtgaagctcgtcttccagcagtttgacctggagccttctgaaggctgcttctatgattatgtcaagaaggaatttatgtcccaagggaacaagatgctgctgaccttccacacagacttctccaacgaggagaatgggaccatcatgttctacaagggcttcctggcctactaccaagctgtggaccttgatgaatgtgcttcccggagcaaatcaggggaggaggatccccagccccagtgccagcacctgtgtcacaactacgttggaggctacttctgttcctgccgtccaggctatgag

SEQ ID NO: 121791 - DNA, 832 bp, Homo sapiens
  Payload ID: 3882
  Gene Symbol: C1R
  Gene Name: complement component 1, r subcomponent
  ENST ID: ENST00000543362
  CDS Start-End: 43-477
acgctgtcgggagagcccaggattcaacacgggccttgagaaatgtggctcttgtacctcctggtgccggccctgttctgcagggcaggaggctccattcccatccctcagaagttatttggggaggtgacttcccctctgttccccaagccttaccccaacaactttgaaacaaccactgtgatcacagtccccacgggatacagggtgaagctcgtcttccagcagtttgacctggagccttctgaaggctgcttctatgattatgtcaagatctctgctgataagaaaagcctggggaggttctgtgggcaactgggttctccactgggcaaccccccgggaaagaaggaatttatgtcccaagggaacaagatgctgctgaccttccacacagacttctccaacgaggagaatgggaccatcatgttctacaagggcttcctggcctactaccaagctgtgggtctctggtgagtgacctccctaagatcagagccactactcaggtctcccagcagaagcttaaccctccttcctgaatgccttccagaccttgatgaatgtgcttcccggagcaaatcaggggaggaggatccccagccccagtgccagcacctgtgtcacaactacgttggaggctacttctgttcctgccgtccaggctatgagcttcaggaagacaggcattcctgccaggctgagtgcagcagcgagctgtacacggaggcatcaggctacatctccagcctggagtaccctcggtcctacccccctgacctgcgctgcaactacagcatccgggtggagcggggcctcaccctgcacctca

SEQ ID NO: 121792 - DNA, 3394 bp, Homo sapiens
  Payload ID: 3883
  Gene Symbol: C1RL
  Gene Name: complement component 1, r subcomponent-like
  Uniprot ID: Q9NZP8
  ENST ID: ENST00000266542
  CDS Start-End: 94-1557
atttccaggaacttcctcctcccccaccggccttcaccttttgttccctatcctgggccagttctctcgcaggtcccagatgtccagttccagatgcctggacccagagtgtgggggaaatatctctggagaagccctcactccaaaggctgtccaggcgcaatgtggtggctgcttctctggggagtcctccaggcttgcccaacccggggctccgtcctcttggcccaagagctaccccagcagctgacatcccccgggtacccagagccgtatggcaaaggccaagagagcagcacggacatcaaggctccagagggctttgctgtgaggctcgtcttccaggacttcgacctggagccgtcccaggactgtgcaggggactctgtcacaatctcattcgtcggttcggatccaagccagttctgtggtcagcaaggctcccctctgggcaggccccctggtcagagggagtttgtatcctcagggaggagtttgcggctgaccttccgcacacagccttcctcggagaacaagactgcccacctccacaagggcttcctggccctctaccaaaccgtggctgtgaactatagtcagcccatcagcgaggccagcaggggctctgaggccatcaacgcacctggagacaaccctgccaaggtccagaaccactgccaggagccctattatcaggccgcggcagcaggggcactcacctgtgcaaccccagggacctggaaagacagacaggatggggaggaggttcttcagtgtatgcctgtctgcggacggccagtcacccccattgcccagaatcagacgaccctcggttcttccagagccaagctgggcaacttcccctggcaagccttcaccagtatccacggccgtgggggcggggccctgctgggggacagatggatcctcactgctgcccacaccatctaccccaaggacagtgtttctctcaggaagaaccagagtgtgaatgtgttcttgggccacacagccatagatgagatgctgaaactggggaaccaccctgtccaccgtgtcgttgtgcaccccgactaccgtcagaatgagtcccataactttagcggggacatcgccctcctggagctgcagcacagcatccccctgggccccaacgtcctcccggtctgtctgcccgataatgagaccctctaccgcagcggcttgttgggctacgtcagtgggtttggcatggagatgggctggctaactactgagctgaagtactcgaggctgcctgtagctcccagggaggcctgcaacgcctggctccaaaagagacagagacccgaggtgttttctgacaatatgttctgtgttggggatgagacgcaaaggcacagtgtctgccagggggacagtggcagcgtctatgtggtatgggacaatcatgcccatcactgggtggccacgggcattgtgtcctggggcatagggtgtggcgaagggtatgacttctacaccaaggtgctcagctatgtggactggatcaagggagtgatgaatggcaagaattgaccctgggggcttgaacagggactgaccagcacagtggaggccccaggcaacagagggcctggagtgaggactgaacactggggtaggggttgggggtggggggttgggggaggcagggaaatcctattcacatcactgttgcaccaagccactgcaagagaaacccccacccggcaagcccgccccatcccagacaggaagcagagtcccacagaccgctcctcctcaccctctacctccctgtgctcatgcactaggccccgggaagcctgtacatctcaacaactttcgccttgaatgtccttagaaccgccttcccctacttcatctgttgacacagcttttatactcacctgtggaagagtcagctactcacccgctattagagtatggaggaaggggttttcattgcattgcatttctgaaacattcctaagaccctttagttgaccttcaaatattcaagctattctgcagctccaagatgcaattatagaaacagctccttttttattttatgtcctctatatgccaggtgcttcacctgttatttcacttaatcctcataccatatttgcaaaggatgtgttattatctatgtgtgacaaatgaggaaactgaggctcaggggataaagggacttgcccaagtcccacagctggtgtgtgactgcagagactgtgctcttcccagtgtgctgcaatacttctcaaccctcctctaacctgctgtgtcacccgctttccctcccagcccccacatccttaccattttccctccctgggaattcctgcttctgcgaaaatggtatcctctagctcacactttcctaatggccccatctcctgcagaagccaggtgagcccagcactggactgaagttcttgcagacaccccacctgtgcccctatcatcaggggaactgctccacctgagaggaccaactctttaatttttagtaaaacctggaggtgatgggccgggcgcagtggctcacgcctgtaatcccaacaccttaggagtccgaggtgggtggatcacgaggtcaggagatccagcccatcctggccaacatggtgaaaccccatctctactaaaaatacaaaaattagccgggcgtggtgacacgtgcctgtagtcccagctactcgggaggctgaggcaggagaatcacttgaacctgggaggcggaggttgcagtgagctaagatcacgccactgcactccagcctgcggacagaccaagacttcatcccccccaaaaaaaaaagattggaggtgatttacagtgaaagacacaaataaaatacaactgttcaatggaaatagaaaataaacaccataaaagagagaagagaggtaatttgttagcatcaagagtcaagttgctatatggtcaaaggttaaatttatctctaaaaaatggcaggattcaaagttgtacatacatgtgattacttctgttttttacacccacatacagtacaaaagattattaaaaatattcccaaaaggcaggtgcaatgatgcacacttatacccccagccactcaggaggctgatgcaagaggatcgcttgagcccaggagttgaagtccagcctaagcaacatagtgaaaccccatcgccaaaaatataataataattctctcaaaatactaaacagaggtggttttattgataagattttggctgtttggttttccactattctctattggctaaaatttgtttaatgagcatgaaatgtttttattttattttgcttatttttatgattgcaaaaaatgatatgagtttctccctgccaaggcaaaaaaatatatatatacctata

SEQ ID NO: 121793 - DNA, 592 bp, Homo sapiens
  Payload ID: 3883
  Gene Symbol: C1RL
  Gene Name: complement component 1, r subcomponent-like
  ENST ID: ENST00000543933
  CDS Start-End: 18-592
cagatgtccagttccagatgcctggacccagagtgtgggggaaatatctctggagaagccctcactccaaaggctgtccaggcgcaatgtggtggctgcttctctggggagtcctccaggcttgcccaacccggggctccgtcctcttggcccaagagctaccccagcagctgacatcccccgggtacccagagccgtatggcaaaggccaagagagcagcacggacatcaaggctccagagggctttgctgtgaggctcgtcttccaggacttcgacctggagccgtcccaggactgtgcaggggactctgtcacaatctcattcgtcggttcggatccaagccagttctgtggtcagcaaggctcccctctgggcaggccccctggtcagagggagtttgtatcctcagggaggagtttgcggctgaccttccgcacacagccttcctcggagaacaagactgcccacctccacaagggcttcctggccctctaccaaaccgtgggggcactcacctgtgcaaccccagggacctggaaagacagacaggatggggaggaggttcttcagtgtatgcctgtctgcggacg

SEQ ID NO: 121794 - DNA, 532 bp, Homo sapiens
  Payload ID: 3883
  Gene Symbol: C1RL
  Gene Name: complement component 1, r subcomponent-like
  ENST ID: ENST00000534969
  CDS Start-End: 1-252
ggacttcgacctggagccgtcccaggactgtgcaggggactctgtcacaatctcattcgtcggttcggatccaagccagttctgtggtcagcaaggctcccctctgggcaggccccctggtcagagggagtttgtatcctcagggaggagtttgcggctgaccttccgcacacagccttcctcggagaacaagactgcccacctccacaagggcttcctggccctctaccaaaccgtggctgtgaactatagtcagcccatcagcgaggccagcaggggctctgaggccatcaacgcacctggagacaaccctgccaaggtccagaaccactgccaggagccctattatcaggccgcggcagcaggggcactcacctgtgcaaccccagggacctggaaagacagacaggatggggaggaggttcttcagtgtatgcctgcagcagcaccaagttacatctcaccggcaatacatgagggttcaagcccaccatttttgagatccacgcttttgaatgaaagcattgccttc

SEQ ID NO: 121795 - DNA, 449 bp, Homo sapiens
  Payload ID: 3883
  Gene Symbol: C1RL
  Gene Name: complement component 1, r subcomponent-like
  ENST ID: ENST00000545280
  CDS Start-End: 18-350
cagatgtccagttccagatgcctggacccagagtgtgggggaaatatctctggagaagccctcactccaaaggctgtccaggcgcaatatctcattcgtcggttcggatccaagccagttctgtggtcagcaaggctcccctctgggcaggccccctggtcagagggagttttcagcccatcagcgaggccagcaggggctctgaggccatcaacgcacctggagacaaccctgccaaggtccagaaccactgccaggagccctattatcaggccgcggcagcaggctgtggatcatatgctgatcccatcacagaccagccctccgttaggttcagtcctcagctctgacacacaggcctgctggagaaaccctccaagcgttggtggatcttgcaccttctgtgtgcctgctgtctaactactgatgatgtggtcactgcctgatgg

SEQ ID NO: 121796 - DNA, 561 bp, Homo sapiens
  Payload ID: 3883
  Gene Symbol: C1RL
  Gene Name: complement component 1, r subcomponent-like
  ENST ID: ENST00000537833
  CDS Start-End: 1-256
tccaggacttcgacctggagccgtcccaggactgtgcaggggactctgtcacaatctcattcgtcggttcggatccaagccagttctgtggtcagcaaggctcccctctgggcaggccccctggtcagagggagtttgtatcctcagggaggagtttgcggctgaccttccgcacacagccttcctcggagaacaagactgcccacctccacaagggcttcctggccctctaccaaaccgtggctgtgaactatagtcagcccatcagcgaggccagcaggggctctgaggccatcaacgcacctggagacaaccctgccaaggtccagaaccactgccaggagccctattatcaggccgcggcagcaggggcactcacctgtgcaaccccagggacctggaaagacagacaggatggggaggaggttcttcagtgtatgcctggaaccaccaaactgtcttcaacagcagcagcaccaagttacatctcaccggcaatacatgagggttcaagcccaccatttttgagatccacgcttttgaatgaaagcattgccttct

SEQ ID NO: 121797 - DNA, 582 bp, Homo sapiens
  Payload ID: 3883
  Gene Symbol: C1RL
  Gene Name: complement component 1, r subcomponent-like
  ENST ID: ENST00000534950
  CDS Start-End: 1-582
ctcattcgtcggttcggatccaagccagttctgtggtcagcaaggctcccctctgggcaggccccctggtcagagggagtttgtatcctcagggaggagtttgcggctgaccttccgcacacagccttcctcggagaacaagactgcccacctccacaagggcttcctggccctctaccaaaccgtggtctgcggacggccagtcacccccattgcccagaatcagacgaccctcggttcttccagagccaagctgggcaacttcccctggcaagccttcaccagtatccacggccgtgggggcggggccctgctgggggacagatggatcctcactgctgcccacaccatctaccccaaggacagtgtttctctcaggaagaaccagagtgtgaatgtgttcttgggccacacagccatagatgagatgctgaaactggggaaccaccctgtccaccgtgtcgttgtgcaccccgactaccgtcagaatgagtcccataactttagcggggacatcgccctcctggagctgcagcacagcatccccctgggccccaacgtcctcccggtctgtctgcccga

SEQ ID NO: 121798 - DNA, 1569 bp, Homo sapiens
  Payload ID: 3883
  Gene Symbol: C1RL
  Gene Name: complement component 1, r subcomponent-like
  ENST ID: ENST00000544702
  CDS Start-End: 59-1003
accttttgttccctatcctgggccagttctctcgcaggtcccagatgtccagttccagatgcctggacccagagtgtgggggaaatatctctggagaagccctcactccaaaggctgtccaggcgcaatgtggtggctgcttctctggggagtcctccaggcttgcccaacccggggctccgtcctcttggcccaagagctaccccagcagctgacatcccccgggtacccagagccgtatggcaaaggccaagagagcagcacggacatcaaggctccagagggctttgctgtgaggctcgtcttccaggacttcgacctggagccgtcccaggactgtgcaggggactctgtcacaatctcattcgtcggttcggatccaagccagttctgtggtcagcaaggctcccctctgggcaggccccctggtcagagggagtttgtatcctcagggaggagtttgcggctgaccttccgcacacagccttcctcggagaacaagactgcccacctccacaagggcttcctggccctctaccaaaccgtggctgtgaactatagtcagcccatcagcgaggccagcaggggctctgaggccatcaacgcacctggagacaaccctgccaaggtccagaaccactgccaggagccctattatcaggccgcggcagcagcttcaactccgagcctatttctttgcctctcctcatttacgccacaggggcactcacctgtgcaaccccagggacctggaaagacagacaggatggggaggaggttcttcagtgtatgcctgtctgcggacggccagtcacccccattgcccagaatcagacgaccctcggttcttccagagccaagctgggcaacttcccctggcaagccttcaccagtatccacggccgtgggggcggggccctgctgggggacagatggatcctcactgctgcccacaccatctaccccaaggacagtgtttctctcaggaagaaccagagtgtgaatgtgttcttgggccacacagccatagatgagatgctgaaactggggaaccaccctgtccaccgtgtcgttgtgcaccccgactaccgtcagaatgagtcccataactttagcggggacatcgccctcctggagctgcagcacagcatccccctgggccccaacgtcctcccggtctgtctgcccgataatgagaccctctaccgcagcggcttgttgggctacgtcagtgggtttggcatggagatgggctggctaactactgagctgaagtactcgaggctgcctgtagctcccagggaggcctgcaacgcctggctccaaaagagacagagacccgaggtgttttctgacaatatgttctgtgttggggatgagacgcaaaggcacagtgtctgccagggggacagtggcagcgtctatgtggtatgggacaatcatgcccatcactgggtggccacgggcattgtgtcctggggcatagggtgtggcgaagggtatgacttctacaccaaggtgctcagctatgtggactggatcaagggagtgatgaatggcaagaattga

SEQ ID NO: 121799 - DNA, 813 bp, Homo sapiens
  Payload ID: 3883
  Gene Symbol: C1RL
  Gene Name: complement component 1, r subcomponent-like
  ENST ID: ENST00000545337
  CDS Start-End: 31-594
ctctcgcaggtcccagatgtccagttccagatgcctggacccagagtgtgggggaaatatctctggagaagccctcactccaaaggctgtccaggcgcaatgtggtggctgcttctctggggagtcctccaggcttgcccaacccggggctccgtcctcttggcccaagagctaccccagcagctgacatcccccgggtacccagagccgtatggcaaaggccaagagagcagcacggacatcaaggctccagagggctttgctgtgaggctcgtcttccaggacttcgacctggagccgtcccaggactgtgcaggggactctgtcacaatctcattcgtcggttcggatccaagccagttctgtggtcagcaaggctcccctctgggcaggccccctggtcagagggagtttgtatcctcagggaggagtttgcggctgaccttccgcacacagccttcctcggagaacaagactgcccacctccacaagggcttcctggccctctaccaaaccgtgggtgagtgtccctcctgggggtgcagggagggagcctctgttcccagccatgaccctggtatcttcaagccttaagtggaagcttgagtgacagctgaggctggggactcagggacacctgggctggatcccagccctgcccctgctggcaagcaaccctattaagagacagccgtagctgagcccccagcggttgtttccatgcagatttacaggcccagtgtttgcagatcatctcatttttaaagagatgccaaaaatccagatttttaagtaaaattataaattttcaaa

SEQ ID NO: 121800 - DNA, 1038 bp, Homo sapiens
  Payload ID: 3883
  Gene Symbol: C1RL
  Gene Name: complement component 1, r subcomponent-like
  ENST ID: ENST00000539803
  CDS Start-End: 1-200
acaaccctgccaaggtccagaaccactgccaggagccctattatcaggccgcggcagcaggggcactcacctgtgcaaccccagggacctggaaagacagacaggatggggaggaggttcttcagtgtatgcctggctgtggatcatatgctgatcccatcacagaccagccctccgttaggttcagtcctcagctctgacacacaggcctgctggagaaaccctccaagcgttggtggatcttgcaccttctgtgtgcctgctgtctaactactgatgatgtggtcactgcctgatggggaactgcatcagctctgtgaattcttgcaatctattgcctgggaaagtgtcttgcacattaaacagaaaaccctcccctccctgctgtgcatgacgcgggctccctctgcacacagtgcacgaagacgctgtcgggagagcccaggattcaacacgggccttgagaaatgtggctcttgtacctcctggtgccggccctgttctgcagggcaggaggctccattcccatccctcagaagttatttggggaggtgacttcccctctgttccccaagccttaccccaacaactttgaaacaaccactgtgatcacagtccccacgggatacagggtgaagctcgtcttccagcagtttgacctggagccttctgaaggctgcttctatgattatgtcaagatctctgctgataagaaaagcctggggaggttctgtgggcaactgggttctccactgggcaaccccccgggaaagaaggaatttatgtcccaagggaacaagatgctgctgaccttccacacagacttctccaacgaggagaatgggaccatcatgttctacaagggcttcctggcctactaccaagctgtggaccttgatgaatgtgcttcccggagcaaatcaggggaggaggatccccagccccagtgccagcacctgtgtcacaactacgttggaggctacttctgttcctgccgtccaggctatgagcttcaggaagacaggcattcctgccagg

SEQ ID NO: 121801 - DNA, 2972 bp, Homo sapiens
  Payload ID: 3884
  Gene Symbol: C1S
  Gene Name: complement component 1, s subcomponent
  Uniprot ID: P09871
  ENST ID: ENST00000328916
  CDS Start-End: 525-2591
attaagcaatcggtgaaattccccattcctcctttccccgctggagccctggatagagggctctctggcctgggaggaggacgctgtccttgtttcaaaagcagagggagctccaagatcaaggctgagtttccctaagtcatggtctcccagccccctctgtttagatcagggaatttcagacatgcacactcgggtagggaatcttatgaacagaaccaggacagggaggctggccggaggttcctgcagagggagcgtcaaggccctgtgctgctgtccctgggggccagaggggttgcccagcatgcccactggcaggagagagggaactgacccacttgctcctaccagcttctgaaggtgacactgagccccaggtgacgccgcaccaccaaagaaggtgcttgtgtttgtcagacaaatacagccaggcctgccaccccttaggctccaaagtccggaggtgcagaaagccaggaccaagagacaggcagctcaccagggtggacaaatcgccagagatgtggtgcattgtcctgttttcacttttggcatgggtttatgctgagcctaccatgtatggggagatcctgtcccctaactatcctcaggcatatcccagtgaggtagagaaatcttgggacatagaagttcctgaagggtatgggattcacctctacttcacccatctggacattgagctgtcagagaactgtgcgtatgactcagtgcagataatctcaggagacactgaagaagggaggctctgtggacagaggagcagtaacaatccccactctccaattgtggaagagttccaagtcccatacaacaaactccaggtgatctttaagtcagacttttccaatgaagagcgttttacggggtttgctgcatactatgttgccacagacataaatgaatgcacagattttgtagatgtcccttgtagccacttctgcaacaatttcattggtggttacttctgctcctgccccccggaatatttcctccatgatgacatgaagaattgcggagttaattgcagtggggatgtattcactgcactgattggggagattgcaagtcccaattatcccaaaccatatccagagaactcaaggtgtgaataccagatccggttggagaaagggttccaagtggtggtgaccttgcggagagaagattttgatgtggaagcagctgactcagcgggaaactgccttgacagtttagtttttgttgcaggagatcggcaatttggtccttactgtggtcatggattccctgggcctctaaatattgaaaccaagagtaatgctcttgatatcatcttccaaactgatctaacagggcaaaaaaagggctggaaacttcgctatcatggagatccaatgccctgccctaaggaagacactcccaattctgtttgggagcctgcgaaggcaaaatatgtctttagagatgtggtgcagataacctgtctggatgggtttgaagttgtggagggacgtgttggtgcaacatctttctattcgacttgtcaaagcaatggaaagtggagtaattccaaactgaaatgtcaacctgtggactgtggcattcctgaatccattgagaatggtaaagttgaagacccagagagcactttgtttggttctgtcatccgctacacttgtgaggagccatattactacatggaaaatggaggaggtggggagtatcactgtgctggtaacgggagctgggtgaatgaggtgctgggcccggagctgccgaaatgtgttccagtctgtggagtccccagagaaccctttgaagaaaaacagaggataattggaggatccgatgcagatattaaaaacttcccctggcaagtcttctttgacaacccatgggctggtggagcgctcattaatgagtactgggtgctgacggctgctcatgttgtggagggaaacagggagccaacaatgtatgttgggtccacctcagtgcagacctcacggctggcaaaatccaagatgctcactcctgagcatgtgtttattcatccgggatggaagctgctggaagtcccagaaggacgaaccaattttgataatgacattgcactggtgcggctgaaagacccagtgaaaatgggacccaccgtctctcccatctgcctaccaggcacctcttccgactacaacctcatggatggggacctgggactgatctcaggctggggccgaacagagaagagagatcgtgctgttcgcctcaaggcggcaaggttacctgtagctcctttaagaaaatgcaaagaagtgaaagtggagaaacccacagcagatgcagaggcctatgttttcactcctaacatgatctgtgctggaggagagaagggcatggatagctgtaaaggggacagtggtggggcctttgctgtacaggatcccaatgacaagaccaaattctacgcagctggcctggtgtcctgggggccccagtgtgggacctatgggctctacacacgggtaaagaactatgttgactggataatgaagactatgcaggaaaatagcaccccccgtgaggactaatccagatacatcccaccagcctctccaagggtggtgaccaatgcattaccttctgttccttatgatattctcattatttcatcatgactgaaagaagacacgagcgaatgatttaaatagaacttgattgttgagacgccttgctagaggtagagtttgatcatagaattgtgctggtcatacatttgtggtctgactccttggggtcctttccccggagtacctattgtagataacactatgggtggggcactcctttcttgcactattccacagggataccttaattctttgtttcctctttacctgttcaaaattccatttacttgatcattctcagtatccactgtctatgtacaataaaggatgtttataagcaaa

SEQ ID NO: 121802 - DNA, 2635 bp, Homo sapiens
  Payload ID: 3884
  Gene Symbol: C1S
  Gene Name: complement component 1, s subcomponent
  Uniprot ID: P09871
  ENST ID: ENST00000360817
  CDS Start-End: 277-2343
gtttagatcagggaatttcagacatgcacactcgggtagggaatcttatgaacagaaccaggacagggaggctggccggaggttcctgcagagggagcgtcaaggccctgtgctgctgtccctgggggccagaggggttgcccagcatgcccactggcaggagagagggaactgacccacttgctcctaccagcttctgaaggctccaaagtccggaggtgcagaaagccaggaccaagagacaggcagctcaccagggtggacaaatcgccagagatgtggtgcattgtcctgttttcacttttggcatgggtttatgctgagcctaccatgtatggggagatcctgtcccctaactatcctcaggcatatcccagtgaggtagagaaatcttgggacatagaagttcctgaagggtatgggattcacctctacttcacccatctggacattgagctgtcagagaactgtgcgtatgactcagtgcagataatctcaggagacactgaagaagggaggctctgtggacagaggagcagtaacaatccccactctccaattgtggaagagttccaagtcccatacaacaaactccaggtgatctttaagtcagacttttccaatgaagagcgttttacggggtttgctgcatactatgttgccacagacataaatgaatgcacagattttgtagatgtcccttgtagccacttctgcaacaatttcattggtggttacttctgctcctgccccccggaatatttcctccatgatgacatgaagaattgcggagttaattgcagtggggatgtattcactgcactgattggggagattgcaagtcccaattatcccaaaccatatccagagaactcaaggtgtgaataccagatccggttggagaaagggttccaagtggtggtgaccttgcggagagaagattttgatgtggaagcagctgactcagcgggaaactgccttgacagtttagtttttgttgcaggagatcggcaatttggtccttactgtggtcatggattccctgggcctctaaatattgaaaccaagagtaatgctcttgatatcatcttccaaactgatctaacagggcaaaaaaagggctggaaacttcgctatcatggagatccaatgccctgccctaaggaagacactcccaattctgtttgggagcctgcgaaggcaaaatatgtctttagagatgtggtgcagataacctgtctggatgggtttgaagttgtggagggacgtgttggtgcaacatctttctattcgacttgtcaaagcaatggaaagtggagtaattccaaactgaaatgtcaacctgtggactgtggcattcctgaatccattgagaatggtaaagttgaagacccagagagcactttgtttggttctgtcatccgctacacttgtgaggagccatattactacatggaaaatggaggaggtggggagtatcactgtgctggtaacgggagctgggtgaatgaggtgctgggcccggagctgccgaaatgtgttccagtctgtggagtccccagagaaccctttgaagaaaaacagaggataattggaggatccgatgcagatattaaaaacttcccctggcaagtcttctttgacaacccatgggctggtggagcgctcattaatgagtactgggtgctgacggctgctcatgttgtggagggaaacagggagccaacaatgtatgttgggtccacctcagtgcagacctcacggctggcaaaatccaagatgctcactcctgagcatgtgtttattcatccgggatggaagctgctggaagtcccagaaggacgaaccaattttgataatgacattgcactggtgcggctgaaagacccagtgaaaatgggacccaccgtctctcccatctgcctaccaggcacctcttccgactacaacctcatggatggggacctgggactgatctcaggctggggccgaacagagaagagagatcgtgctgttcgcctcaaggcggcaaggttacctgtagctcctttaagaaaatgcaaagaagtgaaagtggagaaacccacagcagatgcagaggcctatgttttcactcctaacatgatctgtgctggaggagagaagggcatggatagctgtaaaggggacagtggtggggcctttgctgtacaggatcccaatgacaagaccaaattctacgcagctggcctggtgtcctgggggccccagtgtgggacctatgggctctacacacgggtaaagaactatgttgactggataatgaagactatgcaggaaaatagcaccccccgtgaggactaatccagatacatcccaccagcctctccaagggtggtgaccaatgcattaccttctgttccttatgatattctcattatttcatcatgactgaaagaagacacgagcgaatgatttaaatagaacttgattgttgagacgccttgctagaggtagagtttgatcatagaattgtgctggtcatacatttgtggtctgactccttggggtcctttccccggagtacctattgtagataacactatgggtggggcactcctttcttgcactattccacagggataccttaattctt

SEQ ID NO: 121803 - DNA, 2522 bp, Homo sapiens
  Payload ID: 3884
  Gene Symbol: C1S
  Gene Name: complement component 1, s subcomponent
  ENST ID: ENST00000402681
  CDS Start-End: 648-2213
agggaatttcagacatgcacactcgggtagggaatcttatgaacagaaccaggacagggaggctggccggaggttcctgcagagggagcgtcaaggccctgtgctgctgtccctgggggccagaggggttgcccagcatgcccactggcaggagagagggaactgacccacttgctcctaccagcttctgaaggtgacactgagccccaggtgacgccgcaccaccaaagaaggtgcttgtgtttgtcagacaaatacagccaggcctgccaccccttaggctccaaagtccggaggtgcagaaagccaggaccaagagacaggcagctcaccagggtggacaaatcgccagagatgtgataatctcaggagacactgaagaagggaggctctgtggacagaggagcagtaacaatccccactctccaattgtggaagagttccaagtcccatacaacaaactccaggtgatctttaagtcagacttttccaatgaagagcgttttacggggtttgctgcatactatgttgccacagacataaatgaatgcacagattttgtagatgtcccttgtagccacttctgcaacaatttcattggtggttacttctgctcctgccccccggaatatttcctccatgatgacatgaagaattgcggagttaattgcagtggggatgtattcactgcactgattggggagattgcaagtcccaattatcccaaaccatatccagagaactcaaggtgtgaataccagatccggttggagaaagggttccaagtggtggtgaccttgcggagagaagattttgatgtggaagcagctgactcagcgggaaactgccttgacagtttagtttttgttgcaggagatcggcaatttggtccttactgtggtcatggattccctgggcctctaaatattgaaaccaagagtaatgctcttgatatcatcttccaaactgatctaacagggcaaaaaaagggctggaaacttcgctatcatggagatccaatgccctgccctaaggaagacactcccaattctgtttgggagcctgcgaaggcaaaatatgtctttagagatgtggtgcagataacctgtctggatgggtttgaagttgtggagggacgtgttggtgcaacatctttctattcgacttgtcaaagcaatggaaagtggagtaattccaaactgaaatgtcaacctgtggactgtggcattcctgaatccattgagaatggtaaagttgaagacccagagagcactttgtttggttctgtcatccgctacacttgtgaggagccatattactacatggaaaatggaggaggtggggagtatcactgtgctggtaacgggagctgggtgaatgaggtgctgggcccggagctgccgaaatgtgttccagtctgtggagtccccagagaaccctttgaagaaaaacagaggataattggaggatccgatgcagatattaaaaacttcccctggcaagtcttctttgacaacccatgggctggtggagcgctcattaatgagtactgggtgctgacggctgctcatgttgtggagggaaacagggagccaacaatgtatgttgggtccacctcagtgcagacctcacggctggcaaaatccaagatgctcactcctgagcatgtgtttattcatccgggatggaagctgctggaagtcccagaaggacgaaccaattttgataatgacattgcactggtgcggctgaaagacccagtgaaaatgggacccaccgtctctcccatctgcctaccaggcacctcttccgactacaacctcatggatggggacctgggactgatctcaggctggggccgaacagagaagagagatcgtgctgttcgcctcaaggcggcaaggttacctgtagctcctttaagaaaatgcaaagaagtgaaagtggagaaacccacagcagatgcagaggcctatgttttcactcctaacatgatctgtgctggaggagagaagggcatggatagctgtaaaggggacagtggtggggcctttgctgtacaggatcccaatgacaagaccaaattctacgcagctggcctggtgtcctgggggccccagtgtgggacctatgggctctacacacgggtaaagaactatgttgactggataatgaagactatgcaggaaaatagcaccccccgtgaggactaatccagatacatcccaccagcctctccaagggtggtgaccaatgcattaccttctgttccttatgatattctcattatttcatcatgactgaaagaagacacgagcgaatgatttaaatagaacttgattgttgagacgccttgctagaggtagagtttgatcatagaattgtgctggtcatacatttgtggtctgactccttggggtcctttccccggagtacctattgtagataacactatgggtggggcactcctttcttgcactattccacagggataccttaattctttgtttcctctttacctg

SEQ ID NO: 121804 - DNA, 1034 bp, Homo sapiens
  Payload ID: 3884
  Gene Symbol: C1S
  Gene Name: complement component 1, s subcomponent
  ENST ID: ENST00000403949
  CDS Start-End: 530-1034
agacagggctgcttgaggagatgaggtgatcacggttaaagaagaggggctgtcctacatggatgatcatgatgcgccaagactgttgaaaacctgagtggaaatgggagcatcgttcttgagggcaggagagagactgataccgcgggggtggggctggtggaggacaatagaggaagaagaaaactgggagaaagtactcgattcctttggagaaaaattaggagaaagtctagagaagcaatgagggaaggatacaatttagctatagtctagaaagttagtcgaagttaactagggagggtgtgaggggcacggtgccatgtggggatgttggtgatatggccctgtgtgttatacctttgaaggtgacactgagccccaggtgacgccgcaccaccaaagaaggtgcttgtgtttgtcagacaaatacagccaggcctgccaccccttaggctccaaagtccggaggtgcagaaagccaggaccaagagacaggcagctcaccagggtggacaaatcgccagagatgtggtgcattgtcctgttttcacttttggcatgggtttatgctgagcctaccatgtatggggagatcctgtcccctaactatcctcaggcatatcccagtgaggtagagaaatcttgggacatagaagttcctgaagggtatgggattcacctctacttcacccatctggacattgagctgtcagagaactgtgcgtatgactcagtgcagataatctcaggagacactgaagaagggaggctctgtggacagaggagcagtaacaatccccactctccaattgtggaagagttccaagtcccatacaacaaactccaggtgatctttaagtcagacttttccaatgaagagcgttttacggggtttgctgcatactatgttgccacagacataaatgaatgcacagattttgtagatgtcccttgtagccacttctgcaacaatttcattggtggttacttctgctcctgccccccggaatatttcctccatgatgacatga

SEQ ID NO: 121805 - DNA, 3076 bp, Homo sapiens
  Payload ID: 3884
  Gene Symbol: C1S
  Gene Name: complement component 1, s subcomponent
  Uniprot ID: P09871
  ENST ID: ENST00000406697
  CDS Start-End: 629-2695
agaaaaataaaaagaatgcagcaggccaggttagcaggaacgttaagacggtgacggagaacagcaaagcctggaagcaagccgccgtggagaaggaagaactgtgctgagtacttcactctgttgcccaggctggagtgcagcggcacaatcacagctcactgcagtttcaacttcctgggttcaagtgatcctcctgcctgagcctcccaagtagctaggactataggctcctcctggctgttacactttctcagaccttccttgattatgatgacctcgaagttttgaggagtactgggaaagagtattataggatgccccctactggaatttgtcagatgtttttctcatgattatacagggattatggcttttggggaggaagatctcagagggtctcaccatgttgcccaggctgatctcaaactcctgaactcaagcaaccctcctgctttggcctcctaaagtattggtattacaggtgtgagccaccacacctggcccacaggacatggattctgaacaactggcataaatcgactggcctcaaggctccaaagtccggaggtgcagaaagccaggaccaagagacaggcagctcaccagggtggacaaatcgccagagatgtggtgcattgtcctgttttcacttttggcatgggtttatgctgagcctaccatgtatggggagatcctgtcccctaactatcctcaggcatatcccagtgaggtagagaaatcttgggacatagaagttcctgaagggtatgggattcacctctacttcacccatctggacattgagctgtcagagaactgtgcgtatgactcagtgcagataatctcaggagacactgaagaagggaggctctgtggacagaggagcagtaacaatccccactctccaattgtggaagagttccaagtcccatacaacaaactccaggtgatctttaagtcagacttttccaatgaagagcgttttacggggtttgctgcatactatgttgccacagacataaatgaatgcacagattttgtagatgtcccttgtagccacttctgcaacaatttcattggtggttacttctgctcctgccccccggaatatttcctccatgatgacatgaagaattgcggagttaattgcagtggggatgtattcactgcactgattggggagattgcaagtcccaattatcccaaaccatatccagagaactcaaggtgtgaataccagatccggttggagaaagggttccaagtggtggtgaccttgcggagagaagattttgatgtggaagcagctgactcagcgggaaactgccttgacagtttagtttttgttgcaggagatcggcaatttggtccttactgtggtcatggattccctgggcctctaaatattgaaaccaagagtaatgctcttgatatcatcttccaaactgatctaacagggcaaaaaaagggctggaaacttcgctatcatggagatccaatgccctgccctaaggaagacactcccaattctgtttgggagcctgcgaaggcaaaatatgtctttagagatgtggtgcagataacctgtctggatgggtttgaagttgtggagggacgtgttggtgcaacatctttctattcgacttgtcaaagcaatggaaagtggagtaattccaaactgaaatgtcaacctgtggactgtggcattcctgaatccattgagaatggtaaagttgaagacccagagagcactttgtttggttctgtcatccgctacacttgtgaggagccatattactacatggaaaatggaggaggtggggagtatcactgtgctggtaacgggagctgggtgaatgaggtgctgggcccggagctgccgaaatgtgttccagtctgtggagtccccagagaaccctttgaagaaaaacagaggataattggaggatccgatgcagatattaaaaacttcccctggcaagtcttctttgacaacccatgggctggtggagcgctcattaatgagtactgggtgctgacggctgctcatgttgtggagggaaacagggagccaacaatgtatgttgggtccacctcagtgcagacctcacggctggcaaaatccaagatgctcactcctgagcatgtgtttattcatccgggatggaagctgctggaagtcccagaaggacgaaccaattttgataatgacattgcactggtgcggctgaaagacccagtgaaaatgggacccaccgtctctcccatctgcctaccaggcacctcttccgactacaacctcatggatggggacctgggactgatctcaggctggggccgaacagagaagagagatcgtgctgttcgcctcaaggcggcaaggttacctgtagctcctttaagaaaatgcaaagaagtgaaagtggagaaacccacagcagatgcagaggcctatgttttcactcctaacatgatctgtgctggaggagagaagggcatggatagctgtaaaggggacagtggtggggcctttgctgtacaggatcccaatgacaagaccaaattctacgcagctggcctggtgtcctgggggccccagtgtgggacctatgggctctacacacgggtaaagaactatgttgactggataatgaagactatgcaggaaaatagcaccccccgtgaggactaatccagatacatcccaccagcctctccaagggtggtgaccaatgcattaccttctgttccttatgatattctcattatttcatcatgactgaaagaagacacgagcgaatgatttaaatagaacttgattgttgagacgccttgctagaggtagagtttgatcatagaattgtgctggtcatacatttgtggtctgactccttggggtcctttccccggagtacctattgtagataacactatgggtggggcactcctttcttgcactattccacagggataccttaattctttgtttcctctttacctgttcaaaattccatttacttgatcattctcagtatccactgtctatgtacaataaaggatgtttataagcaaa

SEQ ID NO: 121806 - DNA, 2550 bp, Homo sapiens
  Payload ID: 3884
  Gene Symbol: C1S
  Gene Name: complement component 1, s subcomponent
  ENST ID: ENST00000443875
  CDS Start-End: 1-1067
gctccaaagtccggaggtgcagaaagccaggaccaagagacaggcagctcaccagggtggacaaatcgccagagatgtggtgcattgtcctgttttcacttttggcatgggtttatgctgagcctaccatgtatggggagatcctgtcccctaactatcctcaggcatatcccagtgaggtagagaaatcttgggacatagaagttcctgaagggtatgggattcacctctacttcacccatctggacattgagctgtcagagaactgtgcgtatgactcagtgcagataatctcaggagacactgaagaagggaggctctgtggacagaggagcagtaacaatccccactctccaattgtggaagagttccaagtcccatacaacaaactccaggtgatctttaagtcagacttttccaatgaagagcgttttacggggtttgctgcatactatgttgccacagacataaatgaatgcacagattttgtagatgtcccttgtagccacttctgcaacaatttcattggtggttacttctgctcctgccccccggaatatttcctccatgatgacatgaagaattgcggagttaattgcagtggggatgtattcactgcactgattggggagattgcaagtcccaattatcccaaaccatatccagagaactcaaggtgtgaataccagatccggttggagaaagggttccaagtggtggtgaccttgcggagagaagattttgatgtggaagcagctgactcagcgggaaactgccttgacagtttagtttttgttgcaggagatcggcaatttggtccttactgtggtcatggattccctgggcctctaaatattgaaaccaagagtaatgctcttgatatcatcttccaaactgatctaacagggcaaaaaaagggctggaaacttcgctatcatggagatccaatgccctgccctaaggaagacactcccaattctgtttgggagcctgcgaaggcaaaatatgtctttagagatgtggtgcagataacctgtctggatgggtttgaagttgtggagaaataagtggtgatgtttattattctccagggacgtgttggtgcaacatctttctattcgacttgtcaaagcaatggaaagtggagtaattccaaactgaaatgtcaacctgtggactgtggcattcctgaatccattgagaatggtaaagttgaagacccagagagcactttgtttggttctgtcatccgctacacttgtgaggagccatattactacatggaaaatggaggaggtggggagtatcactgtgctggtaacgggagctgggtgaatgaggtgctgggcccggagctgccgaaatgtgttccagtctgtggagtccccagagaaccctttgaagaaaaacagaggataattggaggatccgatgcagatattaaaaacttcccctggcaagtcttctttgacaacccatgggctggtggagcgctcattaatgagtactgggtgctgacggctgctcatgttgtggagggaaacagggagccaacaatgtatgttgggtccacctcagtgcagacctcacggctggcaaaatccaagatgctcactcctgagcatgtgtttattcatccgggatggaagctgctggaagtcccagaaggacgaaccaattttgataatgacattgcactggtgcggctgaaagacccagtgaaaatgggacccaccgtctctcccatctgcctaccaggcacctcttccgactacaacctcatggatggggacctgggactgatctcaggctggggccgaacagagaagagagatcgtgctgttcgcctcaaggcggcaaggttacctgtagctcctttaagaaaatgcaaagaagtgaaagtggagaaacccacagcagatgcagaggcctatgttttcactcctaacatgatctgtgctggaggagagaagggcatggatagctgtaaaggggacagtggtggggcctttgctgtacaggatcccaatgacaagaccaaattctacgcagctggcctggtgtcctgggggccccagtgtgggacctatgggctctacacacgggtaaagaactatgttgactggataatgaagactatgcaggaaaatagcaccccccgtgaggactaatccagatacatcccaccagcctctccaagggtggtgaccaatgcattaccttctgttccttatgatattctcattatttcatcatgactgaaagaagacacgagcgaatgatttaaatagaacttgattgttgagacgccttgctagaggtagagtttgatcatagaattgtgctggtcatacatttgtggtctgactccttggggtcctttccccggagtacctattgtagataacactatgggtggggcactcctttcttgcactattccacagggataccttaattctttgtttcctctttacctgttcaaaattccatttacttgatcattctcagtatccactgtctatgtacaataaaggatgtttataagca

SEQ ID NO: 121807 - DNA, 573 bp, Homo sapiens
  Payload ID: 3884
  Gene Symbol: C1S
  Gene Name: complement component 1, s subcomponent
  ENST ID: ENST00000423384
  CDS Start-End: 272-573
gtcatttggctgtcccttttctccttcctcgcacaaccctgtatcagtggggcagcacttccttctcagaccgcttgtcccagggtccctgccttcccctagtgaaagaagctcctgcctccatcggtgggcgttgggagcatcagcggagatgcacgcaatgataaacagcagacagggctgcttgaggagatgaggctccaaagtccggaggtgcagaaagccaggaccaagagacaggcagctcaccagggtggacaaatcgccagagatgtggtgcattgtcctgttttcacttttggcatgggtttatgctgagcctaccatgtatggggagatcctgtcccctaactatcctcaggcatatcccagtgaggtagagaaatcttgggacatagaagttcctgaagggtatgggattcacctctacttcacccatctggacattgagctgtcagagaactgtgcgtatgactcagtgcagataatctcaggagacactgaagaagggaggctctgtggacagaggagcagtaacaatccccactctccaattgtggaagagttccaagt

SEQ ID NO: 121808 - DNA, 667 bp, Homo sapiens
  Payload ID: 3884
  Gene Symbol: C1S
  Gene Name: complement component 1, s subcomponent
  ENST ID: ENST00000413211
  CDS Start-End: 359-667
gtcatttggctgtcccttttctccttcctcgcacaaccctgtatcagtggggcagcacttccttctcagaccgcttgtcccagggtccctgccttcccctagtgaaagaagctcctgcctccatcggtgggcgttgggagcatcagcggagatgcacgcaatgataaacagcagacagggctgcttgaggagatgaggtgacactgagccccaggtgacgccgcaccaccaaagaaggtgcttgtgtttgtcagacaaatacagccaggcctgccaccccttaggctccaaagtccggaggtgcagaaagccaggaccaagagacaggcagctcaccagggtggacaaatcgccagagatgtggtgcattgtcctgttttcacttttggcatgggtttatgctgagcctaccatgtatggggagatcctgtcccctaactatcctcaggcatatcccagtgaggtagagaaatcttgggacatagaagttcctgaagggtatgggattcacctctacttcacccatctggacattgagctgtcagagaactgtgcgtatgactcagtgcagataatctcaggagacactgaagaagggaggctctgtggacagaggagcagtaacaatccccactctccaattgtggaagagttccaagtcccatac

SEQ ID NO: 121809 - DNA, 661 bp, Homo sapiens
  Payload ID: 3884
  Gene Symbol: C1S
  Gene Name: complement component 1, s subcomponent
  ENST ID: ENST00000542978
  CDS Start-End: 191-661
atcttgggacatagaagttcctgaagggtatgggattcacctctacttcacccatctggacattgagctgtcagagaactacataaatgaatgcacagattttgtagatgtcccttgtagccacttctgcaacaatttcattggtggttacttctgctcctgccccccggaatatttcctccatgatgacatgaagaattgcggagttaattgcagtggggatgtattcactgcactgattggggagattgcaagtcccaattatcccaaaccatatccagagaactcaaggtgtgaataccagatccggttggagaaagggttccaagtggtggtgaccttgcggagagaagattttgatgtggaagcagctgactcagcgggaaactgccttgacagtttagtttttgttgcaggagatcggcaatttggtccttactgtggtcatggattccctgggcctctaaatattgaaaccaagagtaatgctcttgatatcatcttccaaactgatctaacagggcaaaaaaagggctggaaacttcgctatcatggagatccaatgccctgccctaaggaagacactcccaattctgtttgggagcctgcgaaggcaaaatatgtctttagagatgtggtgcagataacctgtctggatggg

SEQ ID NO: 121810 - DNA, 2844 bp, Homo sapiens
  Payload ID: 3884
  Gene Symbol: C1S
  Gene Name: complement component 1, s subcomponent
  ENST ID: ENST00000617865
  CDS Start-End: 418-2466
gtttagatcagggaatttcagacatgcacactcgggtagggaatcttatgaacagaaccaggacagggaggctggccggaggttcctgcagagggagcgtcaaggccctgtgctgctgtccctgggggccagaggggttgcccagcatgcccactggcaggagagagggaactgacccacttgctcctaccagcttctgaaggtgacactgagccccaggtgacgccgcaccaccaaagaaggtgcttgtgtttgtcagacaaatacagccaggcctgccaccccttaggctccaaagtccggaggtgcagaaagccaggaccaagagacaggcagctcaccagggtggacaaatcgccagagatgtggtgcattgtcctgttttcacttttggcatgggtttatgctgagcctaccatgtatggggagatcctgtcccctaactatcctcaggcatatcccagtgaggtagagaaatcttgggacatagaagttcctgaagggtatgggattcacctctacttcacccatctggacattgagctgtcagagaactgtgcgtatgactcagtgcagataatctcaggagacactgaagaagggaggctctgtggacagaggagcagtaacaatccccactctccaattgtggaagagttccaagtcccatacaacaaactccaggtgatctttaagtcagacttttccaatgaagagcgttttacggggtttgctgcatactatgttgccacagataaagatgaatgtagtggtagggctcaactctggaatcatatgtcagatgtcccttgtagccacttctgcaacaatttcattggtggttacttctgctcctgccccccggaatatttcctccatgatgacatgaagaattgcggagttaattgcagtggggatgtattcactgcactgattggggagattgcaagtcccaattatcccaaaccatatccagagaactcaaggtgtgaataccagatccggttggagaaagggttccaagtgcatctttctctgttgctcaagctggagtgcagtggtgcaatcacagctcactgtagccttgatctcttgggctcaattgcaggagatcggcaatttggtccttactgtggtcatggattccctgggcctctaaatattgaaaccaagagtaatgctcttgatatcatcttccaaactgatctaacagggcaaaaaaagggctggaaacttcgctatcatggagatccaatgccctgccctaaggaagacactcccaattctgtttgggagcctgcgaaggcaaaatatgtctttagagatgtggtgcagataacctgtctggatgggtttgaagttgtggagggacgtgttggtgcaacatctttctattcgacttgtcaaagcaatggaaagtggagtaattccaaactgaaatgtcaacctgtggactgtggcattcctgaatccattgagaatggtaaagttgaagacccagagagcactttgtttggttctgtcatccgctacacttgtgaggagccatattactacatggaaaatggaggaggtggagaagagagagagagaggggagtatcactgtgctggtaacgggagctgggtgaatgaggtgctgggcccggagctgccgaaatgtgttccagtctgtggagtccccagagaaccctttgaagaaaaacagaggataattggaggatccgatgcagatattaaaaacttcccctggcaagtcttctttgacaacccatgggctggtggagcgctcattaatgagtactgggtgctgacggctgctcatgttgtggagggaaacagggagccaacaatgtatgttgggtccacctcagtgcagacctcacggctggcaaaatccaagatgctcactcctgagcatgtgtttattcatccgggatggaagctgctggaagtcccagaaggacgaaccaattttgataatgacattgcactggtgcggctgaaagacccagtgaaaatgggacccaccgtctctcccatctgcctaccaggcacctcttccgactacaacctcatggatggggacctgggactgatctcaggctggggccgaacagagaagagagatcgtgctgttcgcctcaaggcggcaaggttacctgtagctcctttaagaaaatgcaaagaagtgaaagtggagaaacccacagcagatgcagaggcctatgttttcactcctaacatgatctgtgctggaggagagaagggcatggatagctgtaaaggggacagtggtggggcctttgctgtacaggatcccaatgacaagaccaaattctacgcagctggcctggtgtcctgggggccccagtgtgggacctatgggctctacacacgggtaaagaactatgttgactggataatgaagactatgcaggaaaatagcaccccccgtgaggactaatccagatacatcccaccagcctctccaagggtggtgaccaatgcattaccttctgttccttatgatattctcattatttcatcatgactgaaagaagacacgagcgaatgatttaaatagaacttgattgttgagacgccttgctagaggtagagtttgatcatagaattgtgctggtcatacatttgtggtctgactccttggggtcctttccccggagtacctattgtagataacactatgggtggggcactcctttcttgcactattccacagggataccttaattctttgtttcctctttacctgttcaaaattccatttacttgatcattctcagtatccactgtctatgtacaataaaggatgtttataagc

SEQ ID NO: 121811 - DNA, 2850 bp, Homo sapiens
  Payload ID: 3885
  Gene Symbol: C2
  Gene Name: complement component 2
  Uniprot ID: P06681
  ENST ID: ENST00000299367
  CDS Start-End: 277-2535
gagcgtgggggcagtacacaaagcctgtgggggagatctattgaccctatagatatattagcatcagggagacagggcaaaggtttcacccttcagttcagtccccaatccctgcttattatttccctaacagaagaccatcccccttgccactccctggtttttcttctctggcagcaatgaagcagctgctgacccagctctagttttcgggaagtcagatgaccttttccctcccgcggctctctacctctcgccgcccctagggaggacaccatgggcccactgatggttcttttttgcctgctgttcctgtacccaggtctggcagactcggctccctcctgccctcagaacgtgaatatctcgggtggcaccttcaccctcagccatggctgggctcctgggagccttctcacctactcctgcccccagggcctgtacccatccccagcatcacggctgtgcaagagcagcggacagtggcagaccccaggagccacccggtctctgtctaaggcggtctgcaaacctgtgcgctgtccagcccctgtctcctttgagaatggcatttataccccacggctggggtcctatcccgtgggtggcaatgtgagcttcgagtgtgaggatggcttcatattgcggggctcgcctgtgcgtcagtgtcgccccaacggcatgtgggatggagaaacagctgtgtgtgataatggggctggccactgccccaacccaggcatttcactgggcgcagtgcggacaggcttccgctttggtcatggggacaaggtccgctatcgctgctcctcgaatcttgtgctcacggggtcttcggagcgggagtgccagggcaacggggtctggagtggaacggagcccatctgccgccaaccctactcttatgacttccctgaggacgtggcccctgccctgggcacttccttctcccacatgcttggggccaccaatcccacccagaagacaaaggaaagcctgggccgtaaaatccaaatccagcgctctggtcatctgaacctctacctgctcctggactgttcgcagagtgtgtcggaaaatgactttctcatcttcaaggagagcgcctccctcatggtggacaggatcttcagctttgagatcaatgtgagcgttgccattatcacctttgcctcagagcccaaagtcctcatgtctgtcctgaacgacaactcccgggatatgactgaggtgatcagcagcctggaaaatgccaactataaagatcatgaaaatggaactgggactaacacctatgcggccttaaacagtgtctatctcatgatgaacaaccaaatgcgactcctcggcatggaaacgatggcctggcaggaaatccgacatgccatcatccttctgacagatggaaagtccaatatgggtggctctcccaagacagctgttgaccatatcagagagatcctgaacatcaaccagaagaggaatgactatctggacatctatgccatcggggtgggcaagctggatgtggactggagagaactgaatgagctagggtccaagaaggatggtgagaggcatgccttcattctgcaggacacaaaggctctgcaccaggtctttgaacatatgctggatgtctccaagctcacagacaccatctgcggggtggggaacatgtcagcaaacgcctctgaccaggagaggacaccctggcatgtcactattaagcccaagagccaagagacctgccggggggccctcatctccgaccaatgggtcctgacagcagctcattgcttccgcgatggcaacgaccactccctgtggagggtcaatgtgggagaccccaaatcccagtggggcaaagaattccttattgagaaggcggtgatctccccagggtttgatgtctttgccaaaaagaaccagggaatcctggagttctatggtgatgacatagctctgctgaagctggcccagaaagtaaagatgtccacccatgccaggcccatctgccttccctgcacgatggaggccaatctggctctgcggagacctcaaggcagcacctgtagggaccatgagaatgaactgctgaacaaacagagtgttcctgctcattttgtcgccttgaatgggagcaaactgaacattaaccttaagatgggagtggagtggacaagctgtgccgaggttgtctcccaagaaaaaaccatgttccccaacttgacagatgtcagggaggtggtgacagaccagttcctatgcagtgggacccaggaggatgagagtccctgcaagggagaatctgggggagcagttttccttgagcggagattcaggttttttcaggtgggtctggtgagctggggtctttacaacccctgccttggctctgctgacaaaaactcccgcaaaagggcccctcgtagcaaggtcccgccgccacgagactttcacatcaatctcttccgcatgcagccctggctgaggcagcacctgggggatgtcctgaattttttacccctctagccatggccactgagccctctgctgccctgccagaatctgccgcccctccatcttctacctctgaatggccacccttagaccctgtgatccatcctctctcctagctgagtaaatccgggtctctaggatgccagaggcagcgcacacaagctgggaaatcctcagggctcctaccagcaggactgcctcgctgccccacctcccgctccttggcctgtccccagattccttccctggttgacttgactcatgcttgtttcactttcacatggaatttcccagttatgaaattaataaaaatcaatggtttccaca

SEQ ID NO: 121812 - DNA, 2835 bp, Homo sapiens
  Payload ID: 3885
  Gene Symbol: C2
  Gene Name: complement component 2
  Uniprot ID: P06681
  ENST ID: ENST00000375510
  CDS Start-End: 262-2520
acacaaagcctgtgggggagatctattgaccctatagatatattagcatcagggagacagggcaaaggtttcacccttcagttcagtccccaatccctgcttattatttccctaacagaagaccatcccccttgccactccctggtttttcttctctggcagcaatgaagcagctgctgacccagctctagttttcgggaagtcagatgaccttttccctcccgcggctctctacctctcgccgcccctagggaggacaccatgggcccactgatggttcttttttgcctgctgttcctgtacccaggtctggcagactcggctccctcctgccctcagaacgtgaatatctcgggtggcaccttcaccctcagccatggctgggctcctgggagccttctcacctactcctgcccccagggcctgtacccatccccagcatcacggctgtgcaagagcagcggacagtggcagaccccaggagccacccggtctctgtctaaggcggtctgcaaacctgtgcgctgtccagcccctgtctcctttgagaatggcatttataccccacggctggggtcctatcccgtgggtggcaatgtgagcttcgagtgtgaggatggcttcatattgcggggctcgcctgtgcgtcagtgtcgccccaacggcatgtgggatggagaaacagctgtgtgtgataatggggctggccactgccccaacccaggcatttcactgggcgcagtgcggacaggcttccgctttggtcatggggacaaggtccgctatcgctgctcctcgaatcttgtgctcacggggtcttcggagcgggagtgccagggcaacggggtctggagtggaacggagcccatctgccgccaaccctactcttatgacttccctgaggacgtggcccctgccctgggcacttccttctcccacatgcttggggccaccaatcccacccagaagacaaaggaaagcctgggccgtaaaatccaaatccagcgctctggtcatctgaacctctacctgctcctggactgttcgcagagtgtgtcggaaaatgactttctcatcttcaaggagagcgcctccctcatggtggacaggatcttcagctttgagatcaatgtgagcgttgccattatcacctttgcctcagagcccaaagtcctcatgtctgtcctgaacgacaactcccgggatatgactgaggtgatcagcagcctggaaaatgccaactataaagatcatgaaaatggaactgggactaacacctatgcagccttaaacagtgtctatctcatgatgaacaaccaaatgcgactcctcggcatggaaacgatggcctggcaggaaatccgacatgccatcatccttctgacagatggaaagtccaatatgggtggctctcccaagacagctgttgaccatatcagagagatcctgaacatcaaccagaagaggaatgactatctggacatctatgccatcggggtgggcaagctggatgtggactggagagaactgaatgagctagggtccaagaaggatggtgagaggcatgccttcattctgcaggacacaaaggctctgcaccaggtctttgaacatatgctggatgtctccaagctcacagacaccatctgcggggtggggaacatgtcagcaaacgcctctgaccaggagaggacaccctggcatgtcactattaagcccaagagccaagagacctgccggggggccctcatctccgaccaatgggtcctgacagcagctcattgcttccgcgatggcaacgaccactccctgtggagggtcaatgtgggagaccccaaatcccagtggggcaaagaattccttattgagaaggcggtgatctccccagggtttgatgtctttgccaaaaagaaccagggaatcctggagttctatggtgatgacatagctctgctgaagctggcccagaaagtaaagatgtccacccatgccaggcccatctgccttccctgcacgatggaggccaatctggctctgcggagacctcaaggcagcacctgtagggaccatgagaatgaactgctgaacaaacagagtgttcctgctcattttgtcgccttgaatgggagcaaactgaacattaaccttaagatgggagtggagtggacaagctgtgccgaggttgtctcccaagaaaaaaccatgttccccaacttgacagatgtcagggaggtggtgacagaccagttcctatgcagtgggacccaggaggatgagagtccctgcaagggagaatctgggggagcagttttccttgagcggagattcaggttttttcaggtgggtctggtgagctggggtctttacaacccctgccttggctctgctgacaaaaactcccgcaaaagggcccctcgtagcaaggtcccgccgccacgagactttcacatcaatctcttccgcatgcagccctggctgaggcagcacctgggggatgtcctgaattttttacccctctagccatggccactgagccctctgctgccctgccagaatctgccgcccctccatcttctacctctgaatggccacccttagaccctgtgatccatcctctctcctagctgagtaaatccgggtctctaggatgccagaggcagcgcacacaagctgggaaatcctcagggctcctaccagcaggactgcctcgctgccccacctcccgctccttggcctgtccccagattccttccctggttgacttgactcatgcttgtttcactttcacatggaatttcccagttatgaaattaataaaaatcaatggtttccaca

SEQ ID NO: 121813 - DNA, 1847 bp, Homo sapiens
  Payload ID: 3885
  Gene Symbol: C2
  Gene Name: complement component 2
  ENST ID: ENST00000383177
  CDS Start-End: 1-1580
tgatggttcttttttgcctgctgttcctgtacccagctggccactgccccaacccaggcatttcactgggcgcagtgcggacaggcttccgctttggtcatggggacaaggtccgctatcgctgctcctcgaatcttgtgctcacggggtcttcggagcgggagtgccagggcaacggggtctggagtggaacggagcccatctgccgccaaccctactcttatgacttccctgaggacgtggcccctgccctgggcacttccttctcccacatgcttggggccaccaatcccacccagaagacaaaggatcatgaaaatggaactgggactaacacctatgcggccttaaacagtgtctatctcatgatgaacaaccaaatgcgactcctcggcatggaaacgatggcctggcaggaaatccgacatgccatcatccttctgacagatggaaagtccaatatgggtggctctcccaagacagctgttgaccatatcagagagatcctgaacatcaaccagaagaggaatgactatctggacatctatgccatcggggtgggcaagctggatgtggactggagagaactgaatgagctagggtccaagaaggatggtgagaggcatgccttcattctgcaggacacaaaggctctgcaccaggtctttgaacatatgctggatgtctccaagctcacagacaccatctgcggggtggggaacatgtcagcaaacgcctctgaccaggagaggacaccctggcatgtcactattaagcccaagagccaagagacctgccggggggccctcatctccgaccaatgggtcctgacagcagctcattgcttccgcgatggcaacgaccactccctgtggagggtcaatgtgggagaccccaaatcccagtggggcaaagaattccttattgagaaggcggtgatctccccagggtttgatgtctttgccaaaaagaaccagggaatcctggagttctatggtgatgacatagctctgctgaagctggcccagaaagtaaagatgtccacccatgccaggcccatctgccttccctgcacgatggaggccaatctggctctgcggagacctcaaggcagcacctgtagggaccatgagaatgaactgctgaacaaacagagtgttcctgctcattttgtcgccttgaatgggagcaaactgaacattaaccttaagatgggagtggagtggacaagctgtgccgaggttgtctcccaagaaaaaaccatgttccccaacttgacagatgtcagggaggtggtgacagaccagttcctatgcagtgggacccaggaggatgagagtccctgcaagggagaatctgggggagcagttttccttgagcggagattcaggttttttcaggtgggtctggtgagctggggtctttacaacccctgccttggctctgctgacaaaaactcccgcaaaagggcccctcgtagcaaggtcccgccgccacgagactttcacatcaatctcttccgcatgcagccctggctgaggcagcacctgggggatgtcctgaattttttacccctctagccatggccactgagccctctgctgccctgccagaatctgccgcccctccatcttctacctctgaatggccacccttagaccctgtgatccatcctctctcctagctgagtaaatccgggtctctaggatgccagaggcagcgcacacaagctgggaaatcctcagggctcctaccagcaggactgcctcgctgccccacctcccgctccttggcctgtccccagattccttccctggttgacttgactcatgcttgtttcactttca

SEQ ID NO: 121814 - DNA, 1895 bp, Homo sapiens
  Payload ID: 3885
  Gene Symbol: C2
  Gene Name: complement component 2
  ENST ID: ENST00000383359
  CDS Start-End: 3-1580
tgatggttcttttttgcctgctgttcctgtacccagctggccactgccccaacccaggcatttcactgggcgcagtgcggacaggcttccgctttggtcatggggacaaggtccgctatcgctgctcctcgaatcttgtgctcacggggtcttcggagcgggagtgccagggcaacggggtctggagtggaacggagcccatctgccgccaaccctactcttatgacttccctgaggacgtggcccctgccctgggcacttccttctcccacatgcttggggccaccaatcccacccagaagacaaaggatcatgaaaatggaactgggactaacacctatgcagccttaaacagtgtctatctcatgatgaacaaccaaatgcgactcctcggcatggaaacgatggcctggcaggaaatccgacatgccatcatccttctgacagatggaaagtccaatatgggtggctctcccaagacagctgttgaccatatcagagagatcctgaacatcaaccagaagaggaatgactatctggacatctatgccatcggggtgggcaagctggatgtggactggagagaactgaatgagctagggtccaagaaggatggtgagaggcatgccttcattctgcaggacacaaaggctctgcaccaggtctttgaacatatgctggatgtctccaagctcacagacaccatctgcggggtggggaacatgtcagcaaacgcctctgaccaggagaggacaccctggcatgtcactattaagcccaagagccaagagacctgccggggggccctcatctccgaccaatgggtcctgacagcagctcattgcttccgcgatggcaacgaccactccctgtggagggtcaatgtgggagaccccaaatcccagtggggcaaagaattccttattgagaaggcggtgatctccccagggtttgatgtctttgccaaaaagaaccagggaatcctggagttctatggtgatgacatagctctgctgaagctggcccagaaagtaaagatgtccacccatgccaggcccatctgccttccctgcacgatggaggccaatctggctctgcggagacctcaaggcagcacctgtagggaccatgagaatgaactgctgaacaaacagagtgttcctgctcattttgtcgccttgaatgggagcaaactgaacattaaccttaagatgggagtggagtggacaagctgtgccgaggttgtctcccaagaaaaaaccatgttccccaacttgacagatgtcagggaggtggtgacagaccagttcctatgcagtgggacccaggaggatgagagtccctgcaagggagaatctgggggagcagttttccttgagcggagattcaggttttttcaggtgggtctggtgagctggggtctttacaacccctgccttggctctgctgacaaaaactcccgcaaaagggcccctcgtagcaaggtcccgccgccacgagactttcacatcaatctcttccgcatgcagccctggctgaggcagcacctgggggatgtcctgaattttttacccctctagccatggccactgagccctctgctgccctgccagaatctgccgcccctccatcttctacctctgaatggccacccttagaccctgtgatccatcctctctcctagctgagtaaatccgggtctctaggatgccagaggcagcgcacacaagctgggaaatcctcagggctcctaccagcaggactgcctcgctgccccacctcccgctccttggcctgtccccagattccttccctggttgacttgactcatgcttgtttcactttcacatggaatttcccagttatgaaattaataaaaatcaatggtttccaca

SEQ ID NO: 121815 - DNA, 2835 bp, Homo sapiens
  Payload ID: 3885
  Gene Symbol: C2
  Gene Name: complement component 2
  Uniprot ID: P06681
  ENST ID: ENST00000383362
  CDS Start-End: 262-2520
acacaaagcctgtgggggagatctattgaccctatagatatattagcatcagggagacagggcaaaggtttcacccttcagttcagtccccaatccctgcttattatttccctaacagaagaccatcccccttgccactccctggtttttcttctctggcagcaatgaagcagctgctgacccagctctagttttcgggaagtcagatgaccttttccctcccgcggctctctacctctcgccgcccctagggaggacaccatgggcccactgatggttcttttttgcctgctgttcctgtacccaggtctggcagactcggctccctcctgccctcagaacgtgaatatctcgggtggcaccttcaccctcagccatggctgggctcctgggagccttctcacctactcctgcccccagggcctgtacccatccccagcatcacggctgtgcaagagcagcggacagtggcagaccccaggagccacccggtctctgtctaaggcggtctgcaaacctgtgcgctgtccagcccctgtctcctttgagaatggcatttataccccacggctggggtcctatcccgtgggtggcaatgtgagcttcgagtgtgaggatggcttcatattgcggggctcgcctgtgcgtcagtgtcgccccaacggcatgtgggatggagaaacagctgtgtgtgataatggggctggccactgccccaacccaggcatttcactgggcgcagtgcggacaggcttccgctttggtcatggggacaaggtccgctatcgctgctcctcgaatcttgtgctcacggggtcttcggagcgggagtgccagggcaacggggtctggagtggaacggagcccatctgccgccaaccctactcttatgacttccctgaggacgtggcccctgccctgggcacttccttctcccacatgcttggggccaccaatcccacccagaagacaaaggaaagcctgggccgtaaaatccaaatccagcgctctggtcatctgaacctctacctgctcctggactgttcgcagagtgtgtcggaaaatgactttctcatcttcaaggagagcgcctccctcatggtggacaggatcttcagctttgagatcaatgtgagcgttgccattatcacctttgcctcagagcccaaagtcctcatgtctgtcctgaacgacaactcccgggatatgactgaggtgatcagcagcctggaaaatgccaactataaagatcatgaaaatggaactgggactaacacctatgcggccttaaacagtgtctatctcatgatgaacaaccaaatgcgactcctcggcatggaaacgatggcctggcaggaaatccgacatgccatcatccttctgacagatggaaagtccaatatgggtggctctcccaagacagctgttgaccatatcagagagatcctgaacatcaaccagaagaggaatgactatctggacatctatgccatcggggtgggcaagctggatgtggactggagagaactgaatgagctagggtccaagaaggatggtgagaggcatgccttcattctgcaggacacaaaggctctgcaccaggtctttgaacatatgctggatgtctccaagctcacagacaccatctgcggggtggggaacatgtcagcaaacgcctctgaccaggagaggacaccctggcatgtcactattaagcccaagagccaagagacctgccggggggccctcatctccgaccaatgggtcctgacagcagctcattgcttccgcgatggcaacgaccactccctgtggagggtcaatgtgggagaccccaaatcccagtggggcaaagaattccttattgagaaggcggtgatctccccagggtttgatgtctttgccaaaaagaaccagggaatcctggagttctatggtgatgacatagctctgctgaagctggcccagaaagtaaagatgtccacccatgccaggcccatctgccttccctgcacgatggaggccaatctggctctgcggagacctcaaggcagcacctgtagggaccatgagaatgaactgctgaacaaacagagtgttcctgctcattttgtcgccttgaatgggagcaaactgaacattaaccttaagatgggagtggagtggacaagctgtgccgaggttgtctcccaagaaaaaaccatgttccccaacttgacagatgtcagggaggtggtgacagaccagttcctatgcagtgggacccaggaggatgagagtccctgcaagggagaatctgggggagcagttttccttgagcggagattcaggttttttcaggtgggtctggtgagctggggtctttacaacccctgccttggctctgctgacaaaaactcccgcaaaagggcccctcgtagcaaggtcccgccgccacgagactttcacatcaatctcttccgcatgcagccctggctgaggcagcacctgggggatgtcctgaattttttacccctctagccatggccactgagccctctgctgccctgccagaatctgccgcccctccatcttctacctctgaatggccacccttagaccctgtgatccatcctctctcctagctgagtaaatccgggtctctaggatgccagaggcagcgcacacaagctgggaaatcctcagggctcctaccagcaggactgcctcgctgccccacctcccgctccttggcctgtccccagattccttccctggttgacttgactcatgcttgtttcactttcacatggaatttcccagttatgaaattaataaaaatcaatggtttccaca

SEQ ID NO: 121816 - DNA, 1895 bp, Homo sapiens
  Payload ID: 3885
  Gene Symbol: C2
  Gene Name: complement component 2
  ENST ID: ENST00000383367
  CDS Start-End: 3-1580
tgatggttcttttttgcctgctgttcctgtacccagctggccactgccccaacccaggcatttcactgggcgcagtgcggacaggcttccgctttggtcatggggacaaggtccgctatcgctgctcctcgaatcttgtgctcacggggtcttcggagcgggagtgccagggcaacggggtctggagtggaacggagcccatctgccgccaaccctactcttatgacttccctgaggacgtggcccctgccctgggcacttccttctcccacatgcttggggccaccaatcccacccagaagacaaaggatcatgaaaatggaactgggactaacacctatgcggccttaaacagtgtctatctcatgatgaacaaccaaatgcgactcctcggcatggaaacgatggcctggcaggaaatccgacatgccatcatccttctgacagatggaaagtccaatatgggtggctctcccaagacagctgttgaccatatcagagagatcctgaacatcaaccagaagaggaatgactatctggacatctatgccatcggggtgggcaagctggatgtggactggagagaactgaatgagctagggtccaagaaggatggtgagaggcatgccttcattctgcaggacacaaaggctctgcaccaggtctttgaacatatgctggatgtctccaagctcacagacaccatctgcggggtggggaacatgtcagcaaacgcctctgaccaggagaggacaccctggcatgtcactattaagcccaagagccaagagacctgccggggggccctcatctccgaccaatgggtcctgacagcagctcattgcttccgcgatggcaacgaccactccctgtggagggtcaatgtgggagaccccaaatcccagtggggcaaagaattccttattgagaaggcggtgatctccccagggtttgatgtctttgccaaaaagaaccagggaatcctggagttctatggtgatgacatagctctgctgaagctggcccagaaagtaaagatgtccacccatgccaggcccatctgccttccctgcacgatggaggccaatctggctctgcggagacctcaaggcagcacctgtagggaccatgagaatgaactgctgaacaaacagagtgttcctgctcattttgtcgccttgaatgggagcaaactgaacattaaccttaagatgggagtggagtggacaagctgtgccgaggttgtctcccaagaaaaaaccatgttccccaacttgacagatgtcagggaggtggtgacagaccagttcctatgcagtgggacccaggaggatgagagtccctgcaagggagaatctgggggagcagttttccttgagcggagattcaggttttttcaggtgggtctggtgagctggggtctttacaacccctgccttggctctgctgacaaaaactcccgcaaaagggcccctcgtagcaaggtcccgccgccacgagactttcacatcaatctcttccgcatgcagccctggctgaggcagcacctgggggatgtcctgaattttttacccctctagccatggccactgagccctctgctgccctgccagaatctgccgcccctccatcttctacctctgaatggccacccttagaccctgtgatccatcctctctcctagctgagtaaatccgggtctctaggatgccagaggcagcgcacacaagctgggaaatcctcagggctcctaccagcaggactgcctcgctgccccacctcccgctccttggcctgtccccagattccttccctggttgacttgactcatgcttgtttcactttcacatggaatttcccagttatgaaattaataaaaatcaatggtttccaca

SEQ ID NO: 121817 - DNA, 539 bp, Homo sapiens
  Payload ID: 3885
  Gene Symbol: C2
  Gene Name: complement component 2
  ENST ID: ENST00000439426
  CDS Start-End: 64-539
acgatgtccctaacagcgaattccaaggcgcccgtgtagcaggagaggagcaagtcggccacgatgcgtgcactgtgcatcagggagacctgcagctccgagctggggttcagcaggaactggtcccgcaggaaggctggccactgccccaacccaggcatttcactgggcgcagtgcggacaggcttccgctttggtcatggggacaaggtccgctatcgctgctcctcgaatcttgtgctcacggggtcttcggagcgggagtgccagggcaacggggtctggagtggaacggagcccatctgccgccaaccctactcttatgacttccctgaggacgtggcccctgccctgggcacttccttctcccacatgcttggggccaccaatcccacccagaagacaaaggaaagcctgggccgtaaaatccaaatccagcgctctggtcatctgaacctctacctgctcctggactgttcgcagagtgtgtcggaaaatgactttctcatcttcaaggagagcgcctccctcatggtgga

SEQ ID NO: 121818 - DNA, 561 bp, Homo sapiens
  Payload ID: 3885
  Gene Symbol: C2
  Gene Name: complement component 2
  ENST ID: ENST00000435596
  CDS Start-End: 143-561
gtattttgctgttggttctgtggatgacaggtgacaaaacaggcaatgaagcagctgctgacccagctctagttttcgggaagtcagatgaccttttccctcccgcggctctctacctctcgccgcccctagggaggacaccatgggcccactgatggttcttttttgcctgctgttcctgtacccaggtctggcagactcggctccctcctgccctcagaacgtgaatatctcgggtggcaccttcaccctcagccatggctgggctcctgggagccttctcacctactcctgcccccagggcctgtacccatccccagcatcacggctgtgcaagagcagcggacagtggcagaccccaggagccacccggtctctgtctaaggcggtctgcaaacctgtgcgctgtccagcccctgtctcctttgagaatggcatttataccccacggctggggtcctatcccgtgggtggcaatgtgagcttcgagtgtgaggatggcttcatattgcggggctcgcctgtgcgtcagtgtcgccccaacggcatgtgggatggaga

SEQ ID NO: 121819 - DNA, 773 bp, Homo sapiens
  Payload ID: 3885
  Gene Symbol: C2
  Gene Name: complement component 2
  ENST ID: ENST00000411571
  CDS Start-End: 150-404
ccttttgatggtcctaattctcaaaggtaaccttaaggggagtgtattttgctgttggttctgtggatgacaggtgacaaaacaggctggccactgccccaacccaggcatttcactgggcgcagtgcggacaggcttccgctttggtcatggggacaaggtccgctatcgctgctcctcgaatcttgtgctcacggggtcttcggagcgggagtgccagggcaacggggtctggagtggaacggagcccatctgccgccaaccctactcttatgacttccctgaggacgtggcccctgccctgggcacttccttctcccacatgcttggggccaccaatcccacccagaagacaaaggaaagcctgggccgtaaaatccaaatccagcgctctggtcatctgaacctctacctgctcctggactgttcgcagagtgtgtcggaaaatgactttctcatcttcaaggagagcgcctccctcatggtggacaggatcttcagctttgagatcaatgtgagcgttgccattatcacctttgcctcagagcccaaagtcctcatgtctgtcctgaacgacaactcccgggatatgactgaggtgatcagcagcctggaaaatgccaactataaagatcatgaaaatggaactgggactaacacctatgcggccttaaacagtgtctatctcatgatgaacaaccaaatgcgactcctcggcatggaaacgatggcctggcaggaaatccgacatgccatcatccttctgacagatg

SEQ ID NO: 121820 - DNA, 605 bp, Homo sapiens
  Payload ID: 3885
  Gene Symbol: C2
  Gene Name: complement component 2
  ENST ID: ENST00000413649
  CDS Start-End: 229-605
atagatatattagcatcagggagacagggcaaaggtttcacccttcagttcagtccccaatccctgcttattatttccctaacagaagaccatcccccttgccactccctggtttttcttctctggcagcaatgaagcagctgctgacccagctctagttttcgggaagtcagatgaccttttccctcccgcggctctctacctctcgccgcccctagggaggacaccatgggcccactgatggttcttttttgcctgctgttcctgtacccaggtctggcagactcggctccctcctgccctcagaacgtgaatatctcgggtggcaccttcaccctcagccatggctgggctcctgggagccttctcacctactcctgcccccagggcctgtacccatccccagcatcacggctgtgcaagagcagcggacagtggcagaccccaggagccacccggtctctgtctaaggcggtctgcaaacctggccactgccccaacccaggcatttcactgggcgcagtgcggacaggcttccgctttggtcatggggacaaggtccgctatcgctgctcctcgaatcttgtgctcacggggtcttcgga

SEQ ID NO: 121821 - DNA, 576 bp, Homo sapiens
  Payload ID: 3885
  Gene Symbol: C2
  Gene Name: complement component 2
  ENST ID: ENST00000414609
  CDS Start-End: 69-576
agttgacgatgtccctaacagcgaattccaaggcgcccgtgtagcaggagaggagcaagtcggccacgatgcgtgcactgtgcatcagggagacctgcagctccgagctggggttcagcaggaactggtcccgcaggaaggctggccactgccccaacccaggcatttcactgggcgcagtgcggacaggcttccgctttggtcatggggacaaggtccgctatcgctgctcctcgaatcttgtgctcacggggtcttcggagcgggagtgccagggcaacggggtctggagtggaacggagcccatctgccgccaaccctactcttatgacttccctgaggacgtggcccctgccctgggcacttccttctcccacatgcttggggccaccaatcccacccagaagacaaaggatcatgaaaatggaactgggactaacacctatgcggccttaaacagtgtctatctcatgatgaacaaccaaatgcgactcctcggcatggaaacgatggcctggcaggaaatccgacatgccatcatccttctgacagatggaaagtccaatatgggtggct

SEQ ID NO: 121822 - DNA, 561 bp, Homo sapiens; identical to SEQ ID NO: 121818
  Payload ID: 3885
  Gene Symbol: C2
  Gene Name: complement component 2
  ENST ID: ENST00000458436
  CDS Start-End: 143-561

SEQ ID NO: 121823 - DNA, 435 bp, Homo sapiens
  Payload ID: 3885
  Gene Symbol: C2
  Gene Name: complement component 2
  ENST ID: ENST00000436560
  CDS Start-End: 1-435
ctggccactgccccaacccaggcatttcactgggcgcagtgcggacaggcttccgctttggtcatggggacaaggtccgctatcgctgctcctcgaatcttgtgctcacggggtcttcggagcgggagtgccagggcaacggggtctggagtggaacggagcccatctgccgccaaccctactcttatgacttccctgaggacgtggcccctgccctgggcacttccttctcccacatgcttggggccaccaatcccacccagaagacaaaggatcatgaaaatggaactgggactaacacctatgcggccttaaacagtgtctatctcatgatgaacaaccaaatgcgactcctcggcatggaaacgatggcctggcaggaaatccgacatgccatcatccttctgacagatggaaagtccaatatgggtggct

SEQ ID NO: 121824 - DNA, 1895 bp, Homo sapiens; identical to SEQ ID NO: 121816
  Payload ID: 3885
  Gene Symbol: C2
  Gene Name: complement component 2
  ENST ID: ENST00000419062
  CDS Start-End: 3-1580

SEQ ID NO: 121825 - DNA, 837 bp, Homo sapiens
  Payload ID: 3885
  Gene Symbol: C2
  Gene Name: complement component 2
  ENST ID: ENST00000447952
  CDS Start-End: 229-837
atagatatattagcatcagggagacagggcaaaggtttcacccttcagttcagtccccaatccctgcttattatttccctaacagaagaccatcccccttgccactccctggtttttcttctctggcagcaatgaagcagctgctgacccagctctagttttcgggaagtcagatgaccttttccctcccgcggctctctacctctcgccgcccctagggaggacaccatgggcccactgatggttcttttttgcctgctgttcctgtacccaggtctggcagactcggctccctcctgccctcagaacgtgaatatctcgggtggcaccttcaccctcagccatggctgggctcctgggagccttctcacctactcctgcccccagggcctgtacccatccccagcatcacggctgtgcaagagcagcggacagtggcagaccccaggagccacccggtctctgtctaaggcggtctgcaaacctggccactgccccaacccaggcatttcactgggcgcagtgcggacaggcttccgctttggtcatggggacaaggtccgctatcgctgctcctcgaatcttgtgctcacggggtcttcggagcgggagtgccagggcaacggggtctggagtggaacggagcccatctgccgccaaccctactcttatgacttccctgaggacgtggcccctgccctgggcacttccttctcccacatgcttggggccaccaatcccacccagaagacaaaggaaagcctgggccgtaaaatccaaatccagcgctctggtcatctgaacctctacctgctcctggactgttcgcagagtgtg

SEQ ID NO: 121826 - DNA, 561 bp, Homo sapiens; identical to SEQ ID NO: 121818
  Payload ID: 3885
  Gene Symbol: C2
  Gene Name: complement component 2
  ENST ID: ENST00000446097
  CDS Start-End: 143-561

SEQ ID NO: 121827 - DNA, 539 bp, Homo sapiens; identical to SEQ ID NO: 121817
  Payload ID: 3885
  Gene Symbol: C2
  Gene Name: complement component 2
  ENST ID: ENST00000432285
  CDS Start-End: 64-539

SEQ ID NO: 121828 - DNA, 605 bp, Homo sapiens; identical to SEQ ID NO: 121820
  Payload ID: 3885
  Gene Symbol: C2
  Gene Name: complement component 2
  ENST ID: ENST00000440861
  CDS Start-End: 229-605

SEQ ID NO: 121829 - DNA, 1999 bp, Homo sapiens
  Payload ID: 3885
  Gene Symbol: C2
  Gene Name: complement component 2
  Uniprot ID: P06681
  ENST ID: ENST00000452323
  CDS Start-End: 69-1685
agttgacgatgtccctaacagcgaattccaaggcgcccgtgtagcaggagaggagcaagtcggccacgatgcgtgcactgtgcatcagggagacctgcagctccgagctggggttcagcaggaactggtcccgcaggaaggctggccactgccccaacccaggcatttcactgggcgcagtgcggacaggcttccgctttggtcatggggacaaggtccgctatcgctgctcctcgaatcttgtgctcacggggtcttcggagcgggagtgccagggcaacggggtctggagtggaacggagcccatctgccgccaaccctactcttatgacttccctgaggacgtggcccctgccctgggcacttccttctcccacatgcttggggccaccaatcccacccagaagacaaaggatcatgaaaatggaactgggactaacacctatgcggccttaaacagtgtctatctcatgatgaacaaccaaatgcgactcctcggcatggaaacgatggcctggcaggaaatccgacatgccatcatccttctgacagatggaaagtccaatatgggtggctctcccaagacagctgttgaccatatcagagagatcctgaacatcaaccagaagaggaatgactatctggacatctatgccatcggggtgggcaagctggatgtggactggagagaactgaatgagctagggtccaagaaggatggtgagaggcatgccttcattctgcaggacacaaaggctctgcaccaggtctttgaacatatgctggatgtctccaagctcacagacaccatctgcggggtggggaacatgtcagcaaacgcctctgaccaggagaggacaccctggcatgtcactattaagcccaagagccaagagacctgccggggggccctcatctccgaccaatgggtcctgacagcagctcattgcttccgcgatggcaacgaccactccctgtggagggtcaatgtgggagaccccaaatcccagtggggcaaagaattccttattgagaaggcggtgatctccccagggtttgatgtctttgccaaaaagaaccagggaatcctggagttctatggtgatgacatagctctgctgaagctggcccagaaagtaaagatgtccacccatgccaggcccatctgccttccctgcacgatggaggccaatctggctctgcggagacctcaaggcagcacctgtagggaccatgagaatgaactgctgaacaaacagagtgttcctgctcattttgtcgccttgaatgggagcaaactgaacattaaccttaagatgggagtggagtggacaagctgtgccgaggttgtctcccaagaaaaaaccatgttccccaacttgacagatgtcagggaggtggtgacagaccagttcctatgcagtgggacccaggaggatgagagtccctgcaagggagaatctgggggagcagttttccttgagcggagattcaggttttttcaggtgggtctggtgagctggggtctttacaacccctgccttggctctgctgacaaaaactcccgcaaaagggcccctcgtagcaaggtcccgccgccacgagactttcacatcaatctcttccgcatgcagccctggctgaggcagcacctgggggatgtcctgaattttttacccctctagccatggccactgagccctctgctgccctgccagaatctgccgcccctccatcttctacctctgaatggccacccttagaccctgtgatccatcctctctcctagctgagtaaatccgggtctctaggatgccagaggcagcgcacacaagctgggaaatcctcagggctcctaccagcaggactgcctcgctgccccacctcccgctccttggcctgtccccagattccttccctggttgacttgactcatgcttgtttcactttcacatggaatttcccagttatgaaattaataaaaatcaatggtttccac

SEQ ID NO: 121830 - DNA, 605 bp, Homo sapiens; identical to SEQ ID NO: 121820
  Payload ID: 3885
  Gene Symbol: C2
  Gene Name: complement component 2
  ENST ID: ENST00000437162
  CDS Start-End: 229-605

SEQ ID NO: 121831 - DNA, 2835 bp, Homo sapiens; identical to SEQ ID NO: 121815
  Payload ID: 3885
  Gene Symbol: C2
  Gene Name: complement component 2
  Uniprot ID: P06681
  ENST ID: ENST00000448206
  CDS Start-End: 262-2520

SEQ ID NO: 121832 - DNA, 435 bp, Homo sapiens
  Payload ID: 3885
  Gene Symbol: C2
  Gene Name: complement component 2
  ENST ID: ENST00000455713
  CDS Start-End: 1-435
ctggccactgccccaacccaggcatttcactgggcgcagtgcggacaggcttccgctttggtcatggggacaaggtccgctatcgctgctcctcgaatcttgtgctcacggggtcttcggagcgggagtgccagggcaacggggtctggagtggaacggagcccatctgccgccaaccctactcttatgacttccctgaggacgtggcccctgccctgggcacttccttctcccacatgcttggggccaccaatcccacccagaagacaaaggatcatgaaaatggaactgggactaacacctatgcagccttaaacagtgtctatctcatgatgaacaaccaaatgcgactcctcggcatggaaacgatggcctggcaggaaatccgacatgccatcatccttctgacagatggaaagtccaatatgggtggct

SEQ ID NO: 121833 - DNA, 403 bp, Homo sapiens
  Payload ID: 3885
  Gene Symbol: C2
  Gene Name: complement component 2
  ENST ID: ENST00000422470
  CDS Start-End: 1-403
ctggccactgccccaacccaggcatttcactgggcgcagtgcggacaggcttccgctttggtcatggggacaaggtccgctatcgctgctcctcgaatcttgtgctcacggggtcttcggagcgggagtgccagggcaacggggtctggagtggaacggagcccatctgccgccaaccctactcttatgacttccctgaggacgtggcccctgccctgggcacttccttctcccacatgcttggggccaccaatcccacccagaagacaaaggaaagcctgggccgtaaaatccaaatccagcgctctggtcatctgaacctctacctgctcctggactgttcgcagagtgtgtcggaaaatgactttctcatcttcaaggagagcgcctccctcatggtgga

SEQ ID NO: 121834 - DNA, 2434 bp, Homo sapiens
  Payload ID: 3885
  Gene Symbol: C2
  Gene Name: complement component 2
  Uniprot ID: P06681
  ENST ID: ENST00000442278
  CDS Start-End: 258-2120
aaagcctgtgggggagatctattgaccctatagatatattagcatcagggagacagggcaaaggtttcacccttcagttcagtccccaatccctgcttattatttccctaacagaagaccatcccccttgccactccctggtttttcttctctggcagcaatgaagcagctgctgacccagctctagttttcgggaagtcagatgaccttttccctcccgcggctctctacctctcgccgcccctagggaggacaccatgggcccactgatggttcttttttgcctgctgttcctgtacccagctggccactgccccaacccaggcatttcactgggcgcagtgcggacaggcttccgctttggtcatggggacaaggtccgctatcgctgctcctcgaatcttgtgctcacggggtcttcggagcgggagtgccagggcaacggggtctggagtggaacggagcccatctgccgccaaccctactcttatgacttccctgaggacgtggcccctgccctgggcacttccttctcccacatgcttggggccaccaatcccacccagaagacaaaggaaagcctgggccgtaaaatccaaatccagcgctctggtcatctgaacctctacctgctcctggactgttcgcagagtgtgtcggaaaatgactttctcatcttcaaggagagcgcctccctcatggtggacaggatcttcagctttgagatcaatgtgagcgttgccattatcacctttgcctcagagcccaaagtcctcatgtctgtcctgaacgacaactcccgggatatgactgaggtgatcagcagcctggaaaatgccaactataaagatcatgaaaatggaactgggactaacacctatgcggccttaaacagtgtctatctcatgatgaacaaccaaatgcgactcctcggcatggaaacgatggcctggcaggaaatccgacatgccatcatccttctgacagatggaaagtccaatatgggtggctctcccaagacagctgttgaccatatcagagagatcctgaacatcaaccagaagaggaatgactatctggacatctatgccatcggggtgggcaagctggatgtggactggagagaactgaatgagctagggtccaagaaggatggtgagaggcatgccttcattctgcaggacacaaaggctctgcaccaggtctttgaacatatgctggatgtctccaagctcacagacaccatctgcggggtggggaacatgtcagcaaacgcctctgaccaggagaggacaccctggcatgtcactattaagcccaagagccaagagacctgccggggggccctcatctccgaccaatgggtcctgacagcagctcattgcttccgcgatggcaacgaccactccctgtggagggtcaatgtgggagaccccaaatcccagtggggcaaagaattccttattgagaaggcggtgatctccccagggtttgatgtctttgccaaaaagaaccagggaatcctggagttctatggtgatgacatagctctgctgaagctggcccagaaagtaaagatgtccacccatgccaggcccatctgccttccctgcacgatggaggccaatctggctctgcggagacctcaaggcagcacctgtagggaccatgagaatgaactgctgaacaaacagagtgttcctgctcattttgtcgccttgaatgggagcaaactgaacattaaccttaagatgggagtggagtggacaagctgtgccgaggttgtctcccaagaaaaaaccatgttccccaacttgacagatgtcagggaggtggtgacagaccagttcctatgcagtgggacccaggaggatgagagtccctgcaagggagaatctgggggagcagttttccttgagcggagattcaggttttttcaggtgggtctggtgagctggggtctttacaacccctgccttggctctgctgacaaaaactcccgcaaaagggcccctcgtagcaaggtcccgccgccacgagactttcacatcaatctcttccgcatgcagccctggctgaggcagcacctgggggatgtcctgaattttttacccctctagccatggccactgagccctctgctgccctgccagaatctgccgcccctccatcttctacctctgaatggccacccttagaccctgtgatccatcctctctcctagctgagtaaatccgggtctctaggatgccagaggcagcgcacacaagctgggaaatcctcagggctcctaccagcaggactgcctcgctgccccacctcccgctccttggcctgtccccagattccttccctggttgacttgactcatgcttgtttcactttcacatggaatttcccagttatgaaattaataaaaatcaatggtttccac

SEQ ID NO: 121835 - DNA, 576 bp, Homo sapiens; identical to SEQ ID NO: 121821
  Payload ID: 3885
  Gene Symbol: C2
  Gene Name: complement component 2
  ENST ID: ENST00000418584
  CDS Start-End: 69-576

SEQ ID NO: 121836 - DNA, 1895 bp, Homo sapiens; identical to SEQ ID NO: 121816
  Payload ID: 3885
  Gene Symbol: C2
  Gene Name: complement component 2
  ENST ID: ENST00000423826
  CDS Start-End: 3-1580

SEQ ID NO: 121837 - DNA, 576 bp, Homo sapiens; identical to SEQ ID NO: 121821
  Payload ID: 3885
  Gene Symbol: C2
  Gene Name: complement component 2
  ENST ID: ENST00000449738
  CDS Start-End: 69-576

SEQ ID NO: 121838 - DNA, 1895 bp, Homo sapiens; identical to SEQ ID NO: 121816
  Payload ID: 3885
  Gene Symbol: C2
  Gene Name: complement component 2
  ENST ID: ENST00000452763
  CDS Start-End: 3-1580

SEQ ID NO: 121839 - DNA, 561 bp, Homo sapiens; identical to SEQ ID NO: 121818
  Payload ID: 3885
  Gene Symbol: C2
  Gene Name: complement component 2
  ENST ID: ENST00000458410
  CDS Start-End: 143-561

SEQ ID NO: 121840 - DNA, 2835 bp, Homo sapiens; identical to SEQ ID NO: 121815
  Payload ID: 3885
  Gene Symbol: C2
  Gene Name: complement component 2
  Uniprot ID: P06681
  ENST ID: ENST00000411803
  CDS Start-End: 262-2520

SEQ ID NO: 121841 - DNA, 561 bp, Homo sapiens; identical to SEQ ID NO: 121818
  Payload ID: 3885
  Gene Symbol: C2
  Gene Name: complement component 2
  ENST ID: ENST00000413154
  CDS Start-End: 143-561

SEQ ID NO: 121842 - DNA, 561 bp, Homo sapiens; identical to SEQ ID NO: 121818
  Payload ID: 3885
  Gene Symbol: C2
  Gene Name: complement component 2
  ENST ID: ENST00000437394
  CDS Start-End: 143-561

SEQ ID NO: 121843 - DNA, 605 bp, Homo sapiens; identical to SEQ ID NO: 121820
  Payload ID: 3885
  Gene Symbol: C2
  Gene Name: complement component 2
  ENST ID: ENST00000449293
  CDS Start-End: 229-605

SEQ ID NO: 121844 - DNA, 1281 bp, Homo sapiens
  Payload ID: 3885
  Gene Symbol: C2
  Gene Name: complement component 2
  ENST ID: ENST00000416456
  CDS Start-End: 223-1281
atattagcatcagggagacagggcaaaggtttcacccttcagttcagtccccaatccctgcttattatttccctaacagaagaccatcccccttgccactccctggtttttcttctctggcagcaatgaagcagctgctgacccagctctagttttcgggaagtcagatgaccttttccctcccgcggctctctacctctcgccgcccctagggaggacaccatgggcccactgatggttcttttttgcctgctgttcctgtacccagctggccactgccccaacccaggcatttcactgggcgcagtgcggacaggcttccgctttggtcatggggacaaggtccgctatcgctgctcctcgaatcttgtgctcacggggtcttcggagcgggagtgccagggcaacggggtctggagtggaacggagcccatctgccgccaaccctactcttatgacttccctgaggacgtggcccctgccctgggcacttccttctcccacatgcttggggccaccaatcccacccagaagacaaaggaaagcctgggccgtaaaatccaaatccagcgctctggtcatctgaacctctacctgctcctggactgttcgcagagtgtgtcggaaaatgactttctcatcttcaaggagagcgcctccctcatggtggacaggatcttcagctttgagatcaatgtgagcgttgccattatcacctttgcctcagagcccaaagtcctcatgtctgtcctgaacgacaactcccgggatatgactgaggtgatcagcagcctggaaaatgccaactataaagatcatgaaaatggaactgggactaacacctatgcggccttaaacagtgtctatctcatgatgaacaaccaaatgcgactcctcggcatggaaacgatggcctggcaggaaatccgacatgccatcatccttctgacagatggaaagtccaatatgggtggctctcccaagacagctgttgaccatatcagagagatcctgaacatcaaccagaagaggaatgactatctggacatctatgccatcggggtgggcaagctggatgtggactggagagaactgaatgagctagggtccaagaaggatggtgagaggcatgccttcattctgcaggacacaaaggctctgcaccaggtctttgaacatatgctggatgtctccaagctcacagacaccatctgcggggtggggaacatgtcagcaaacgcctctgaccaggagaggacaccctggcatgtcactattaag

SEQ ID NO: 121845 - DNA, 605 bp, Homo sapiens; identical to SEQ ID NO: 121820
  Payload ID: 3885
  Gene Symbol: C2
  Gene Name: complement component 2
  ENST ID: ENST00000445056
  CDS Start-End: 229-605

SEQ ID NO: 121846 - DNA, 576 bp, Homo sapiens; identical to SEQ ID NO: 121821
  Payload ID: 3885
  Gene Symbol: C2
  Gene Name: complement component 2
  ENST ID: ENST00000411885
  CDS Start-End: 69-576

SEQ ID NO: 121847 - DNA, 2835 bp, Homo sapiens; identical to SEQ ID NO: 121815
  Payload ID: 3885
  Gene Symbol: C2
  Gene Name: complement component 2
  Uniprot ID: P06681
  ENST ID: ENST00000416252
  CDS Start-End: 262-2520

SEQ ID NO: 121848 - DNA, 539 bp, Homo sapiens; identical to SEQ ID NO: 121817
  Payload ID: 3885
  Gene Symbol: C2
  Gene Name: complement component 2
  ENST ID: ENST00000452202
  CDS Start-End: 64-539

SEQ ID NO: 121849 - DNA, 1658 bp, Homo sapiens
  Payload ID: 3885
  Gene Symbol: C2
  Gene Name: complement component 2
  ENST ID: ENST00000418949
  CDS Start-End: 51-1037
cttttccctcccgcggctctctacctctcgccgcccctagggaggacaccatgggcccactgatggttcttttttgcctgctgttcctgtacccaggtctggcagactcggctccctcctgccctcagaacgtgaatatctcgggtggcaccttcaccctcagccatggctgggctcctgggagccttctcacctactcctgcccccagggcctgtacccatccccagcatcacggctgtgcaagagcagcggacagtggcagaccccaggagccacccggtctctgtctaaggcggtctgcaaacctgtgcgctgtccagcccctgtctcctttgagaatggcatttataccccacggctggggtcctatcccgtgggtggcaatgtgagcttcgagtgtgaggatggcttcatattgcggggctcgcctgtgcgtcagtgtcgccccaacggcatgtgggatggagaaacagctgtgtgtgataatggggctggccactgccccaacccaggcatttcactgggcgcagtgcggacaggcttccgctttggtcatggggacaaggtccgctatcgctgctcctcgaatcttgtgctcacggggtcttcggagcgggagtgccagggcaacggggtctggagtggaacggagcccatctgccgccaaccctactcttatgacttccctgaggacgtggcccctgccctgggcacttccttctcccacatgcttggggccaccaatcccacccagaagacaaaggaaagcctgggccgtaaaatccaaatccagcgctctggtcatctgaacctctacctgctcctggactgttcgcagagtgtgtcggaaaatgactttctcatcttcaaggagagcgcctccctcatggtggacagggtcaggaatcaggagtctgcctgcagcagaggccttcctgtgctcactatctctctctgtctccttcccctcctcagaaccccactcacagcccacctcctccaagaagtcttctcagattatactcatgccatgtaggaatcatgaattcaatttatacaatcataatttttattccacaagcactgttgggacactgtgctggggctgggcgacagcaaagatggaaaggctgaggtcttactttccaggaattcatcatctagaacagtggtctccacagaaaggtagtgagataacccacaggagtgaagcagaaaaatactggtgcccctgtggaataatttaaatcagattaataatttaatatttaataatttccttttaaaacttcaacattttgtgcaggctttaaaatgtgtgtgatagactgggcatggtggctagtgcctgtaatcccaacactttgggaggccgaggcaggtggatcacttgaggtcaggagtttgagaccagcctgaccaacatgatgaaaccctgtctatactaaaaatacaaaattagccacatgtgatggcgcacgcctgtaacccagctacttgggaggatgaggcaggagaatcgcttggatccgggaggtggaggttgcagtgggctgagatcacgccattgcactccagcctgggcaactagagcaaaactctgtctcaaaaaaataaataaaataaaataaaataaaataaaatatgtgtgatagaa

SEQ ID NO: 121850 - DNA, 2835 bp, Homo sapiens; identical to SEQ ID NO: 121815
  Payload ID: 3885
  Gene Symbol: C2
  Gene Name: complement component 2
  Uniprot ID: P06681
  ENST ID: ENST00000413548
  CDS Start-End: 262-2520

SEQ ID NO: 121851 - DNA, 1281 bp, Homo sapiens; identical to SEQ ID NO: 121844
  Payload ID: 3885
  Gene Symbol: C2
  Gene Name: complement component 2
  ENST ID: ENST00000428349
  CDS Start-End: 223-1281

SEQ ID NO: 121852 - DNA, 605 bp, Homo sapiens; identical to SEQ ID NO: 121820
  Payload ID: 3885
  Gene Symbol: C2
  Gene Name: complement component 2
  ENST ID: ENST00000447164
  CDS Start-End: 229-605

SEQ ID NO: 121853 - DNA, 1281 bp, Homo sapiens; identical to SEQ ID NO: 121844
  Payload ID: 3885
  Gene Symbol: C2
  Gene Name: complement component 2
  ENST ID: ENST00000421932
  CDS Start-End: 223-1281

SEQ ID NO: 121854 - DNA, 539 bp, Homo sapiens; identical to SEQ ID NO: 121817
  Payload ID: 3885
  Gene Symbol: C2
  Gene Name: complement component 2
  ENST ID: ENST00000433109
  CDS Start-End: 64-539

SEQ ID NO: 121855 - DNA, 1281 bp, Homo sapiens; identical to SEQ ID NO: 121844
  Payload ID: 3885
  Gene Symbol: C2
  Gene Name: complement component 2
  ENST ID: ENST00000417322
  CDS Start-End: 223-1281

SEQ ID NO: 121856 - DNA, 561 bp, Homo sapiens; identical to SEQ ID NO: 121818
  Payload ID: 3885
  Gene Symbol: C2
  Gene Name: complement component 2
  ENST ID: ENST00000411830
  CDS Start-End: 143-561

SEQ ID NO: 121857 - DNA, 1281 bp, Homo sapiens; identical to SEQ ID NO: 121844
  Payload ID: 3885
  Gene Symbol: C2
  Gene Name: complement component 2
  ENST ID: ENST00000435104
  CDS Start-End: 223-1281

SEQ ID NO: 121858 - DNA, 1281 bp, Homo sapiens
  Payload ID: 3885
  Gene Symbol: C2
  Gene Name: complement component 2
  ENST ID: ENST00000415985
  CDS Start-End: 223-1281
atattagcatcagggagacagggcaaaggtttcacccttcagttcagtccccaatccctgcttattatttccctaacagaagaccatcccccttgccactccctggtttttcttctctggcagcaatgaagcagctgctgacccagctctagttttcgggaagtcagatgaccttttccctcccgcggctctctacctctcgccgcccctagggaggacaccatgggcccactgatggttcttttttgcctgctgttcctgtacccagctggccactgccccaacccaggcatttcactgggcgcagtgcggacaggcttccgctttggtcatggggacaaggtccgctatcgctgctcctcgaatcttgtgctcacggggtcttcggagcgggagtgccagggcaacggggtctggagtggaacggagcccatctgccgccaaccctactcttatgacttccctgaggacgtggcccctgccctgggcacttccttctcccacatgcttggggccaccaatcccacccagaagacaaaggaaagcctgggccgtaaaatccaaatccagcgctctggtcatctgaacctctacctgctcctggactgttcgcagagtgtgtcggaaaatgactttctcatcttcaaggagagcgcctccctcatggtggacaggatcttcagctttgagatcaatgtgagcgttgccattatcacctttgcctcagagcccaaagtcctcatgtctgtcctgaacgacaactcccgggatatgactgaggtgatcagcagcctggaaaatgccaactataaagatcatgaaaatggaactgggactaacacctatgcagccttaaacagtgtctatctcatgatgaacaaccaaatgcgactcctcggcatggaaacgatggcctggcaggaaatccgacatgccatcatccttctgacagatggaaagtccaatatgggtggctctcccaagacagctgttgaccatatcagagagatcctgaacatcaaccagaagaggaatgactatctggacatctatgccatcggggtgggcaagctggatgtggactggagagaactgaatgagctagggtccaagaaggatggtgagaggcatgccttcattctgcaggacacaaaggctctgcaccaggtctttgaacatatgctggatgtctccaagctcacagacaccatctgcggggtggggaacatgtcagcaaacgcctctgaccaggagaggacaccctggcatgtcactattaag

SEQ ID NO: 121859 - DNA, 539 bp, Homo sapiens; identical to SEQ ID NO: 121817
  Payload ID: 3885
  Gene Symbol: C2
  Gene Name: complement component 2
  ENST ID: ENST00000431247
  CDS Start-End: 64-539

SEQ ID NO: 121860 - DNA, 1895 bp, Homo sapiens; identical to SEQ ID NO: 121816
  Payload ID: 3885
  Gene Symbol: C2
  Gene Name: complement component 2
  ENST ID: ENST00000428140
  CDS Start-End: 3-1580

SEQ ID NO: 121861 - DNA, 403 bp, Homo sapiens; identical to SEQ ID NO: 121833
  Payload ID: 3885
  Gene Symbol: C2
  Gene Name: complement component 2
  ENST ID: ENST00000457446
  CDS Start-End: 1-403

SEQ ID NO: 121862 - DNA, 1609 bp, Homo sapiens
  Payload ID: 3885
  Gene Symbol: C2
  Gene Name: complement component 2
  ENST ID: ENST00000497706
  CDS Start-End: 220-1609
ttttcccctgagagcggcctcggagatggctgtgactgtcctaagctgggagctgcaagggagaattcctgtcattcctggcctcagttctgcagggaccgagggcgagacacgcctgggcccaggtgtggcgtctctgtccccatctggttttagctggccactgccccaacccaggcatttcactgggcgcagtgcggacaggcttccgctttggtcatggggacaaggtccgctatcgctgctcctcgaatcttgtgctcacggggtcttcggagcgggagtgccagggcaacggggtctggagtggaacggagcccatctgccgccaaccctactcttatgacttccctgaggacgtggcccctgccctgggcacttccttctcccacatgcttggggccaccaatcccacccagaagacaaaggatcttcagctttgagatcaatgtgagcgttgccattatcacctttgcctcagagcccaaagtcctcatgtctgtcctgaacgacaactcccgggatatgactgaggtgatcagcagcctggaaaatgccaactataaagatcatgaaaatggaactgggactaacacctatgcggccttaaacagtgtctatctcatgatgaacaaccaaatgcgactcctcggcatggaaacgatggcctggcaggaaatccgacatgccatcatccttctgacagatggaaagtccaatatgggtggctctcccaagacagctgttgaccatatcagagagatcctgaacatcaaccagaagaggaatgactatctggacatctatgccatcggggtgggcaagctggatgtggactggagagaactgaatgagctagggtccaagaaggatggtgagaggcatgccttcattctgcaggacacaaaggctctgcaccaggtctttgaacatatgctggatgtctccaagctcacagacaccatctgcggggtggggaacatgtcagcaaacgcctctgaccaggagaggacaccctggcatgtcactattaagcccaagagccaagagacctgccggggggccctcatctccgaccaatgggtcctgacagcagctcattgcttccgcgatggcaacgaccactccctgtggagggtcaatgtgggagaccccaaatcccagtggggcaaagaattccttattgagaaggcggtgatctccccagggtttgatgtctttgccaaaaagaaccagggaatcctggagttctatggtgatgacatagctctgctgaagctggcccagaaagtaaagatgtccacccatgccaggcccatctgccttccctgcacgatggaggccaatctggctctgcggagacctcaaggcagcacctgtagggaccatgagaatgaactgctgaacaaacagagtgttcctgctcattttgtcgccttgaatgggagcaaactgaacattaaccttaagatgggagtggagtggacaagctgtgccgaggttgtctcccaagaaaaaaccatgttccccaacttgacagatgtcagggaggtggtgacagaccagttcctatgcagtgggacccaggaggatgagagtccctgcaagg

SEQ ID NO: 121863 - DNA, 894 bp, Homo sapiens
  Payload ID: 3885
  Gene Symbol: C2
  Gene Name: complement component 2
  ENST ID: ENST00000485690
  CDS Start-End: 1-482
ccctcatggtggacaggatcttcagctttgagatcaatgtgagcgttgccattatcacctttgcctcagagcccaaagtcctcatgtctgtcctgaacgacaactcccgggatatgactgaggtgatcagcagcctggaaaatgccaactataaagatcatgaaaatggaactgggactaacacctatgcggccttaaacagtgtctatctcatgatgaacaaccaaatgcgactcctcggcatggaaacgatggcctggcaggaaatccgacatgccatcatccttctgacagatggaaagtccaatatgggtggctctcccaagacagctgttgaccatatcagagagatcctgaacatcaaccagaagaggaatgactatctggccccaaagccacaggagtctggtgatttccctcttccccaccagacatctatgccatcggggtgggcaagctggatgtggactggagagaactgaatgagctagggtccaagaaggatggtgagaggcatgccttcattctgcaggacacaaaggctctgcaccaggtctttgaacatatgctggatgtctccaagctcacagacaccatctgcggggtggggaacatgtcagcaaacgcctctgaccaggagaggacaccctggcatgtcactattaagcccaagagccaagagacctgccggggggccctcatctccgaccaatgggtcctgacagcagctcattgcttccgcgatggcaacgaccactccctgtggagggtcaatgtgggagaccccaaatcccagtggggcaaagaattccttattgagaaggcggtgatctccccagggtttgatgtctttgccaaaaagaaccagggaatcctggagttctatggtgatga

SEQ ID NO: 121864 - DNA, 2335 bp, Homo sapiens
  Payload ID: 3885
  Gene Symbol: C2
  Gene Name: complement component 2
  ENST ID: ENST00000482060
  CDS Start-End: 15-329
ctagggaggacaccatgggcccactgatggttcttttttgcctgctgttcctgtacccaggtctggcagactcggctccctcctgccctcagaacgtgaatatctcgggtggcaccttcaccctcagccatggctgggctcctgggagccttctcacctactcctgcccccagggcctgtacccatccccagcatcacggctgtgcaagagcagcggacagtggcagaccccaggagccacccggtctctgtctaaggcggtctgcaaacgtgaggctccctgtgggctttgctcaggctgtgcgctgtccagcccctgtctcctttgagaatggcatttataccccacggctggggtcctatcccgtgggtggcaatgtgagcttcgagtgtgaggatggcttcatattgcggggctcgcctgtgcgtcagtgtcgccccaacggcatgtgggatggagaaacagctgtgtgtgataatggggctggccactgccccaacccaggcatttcactgggcgcagtgcggacaggcttccgctttggtcatggggacaaggtccgctatcgctgctcctcgaatcttgtgctcacggggtcttcggagcgggagtgccagggcaacggggtctggagtggaacggagcccatctgccgccaaccctactcttatgacttccctgaggacgtggcccctgccctgggcacttccttctcccacatgcttggggccaccaatcccacccagaagacaaaggaaagcctgggccgtaaaatccaaatccagcgctctggtcatctgaacctctacctgctcctggactgttcgcagagtgtgtcggaaaatgactttctcatcttcaaggagagcgcctccctcatggtggacaggatcttcagctttgagatcaatgtgagcgttgccattatcacctttgcctcagagcccaaagtcctcatgtctgtcctgaacgacaactcccgggatatgactgaggtgatcagcagcctggaaaatgccaactataaagatcatgaaaatggaactgggactaacacctatgcggccttaaacagtgtctatctcatgatgaacaaccaaatgcgactcctcggcatggaaacgatggcctggcaggaaatccgacatgccatcatccttctgacagatggaaagtccaatatgggtggctctcccaagacagctgttgaccatatcagagagatcctgaacatcaaccagaagaggaatgactatctggacatctatgccatcggggtgggcaagctggatgtggactggagagaactgaatgagctagggtccaagaaggatggtgagaggcatgccttcattctgcaggacacaaaggctctgcaccaggtctttgaacatatgctggatgtctccaagctcacagacaccatctgcggggtggggaacatgtcagcaaacgcctctgaccaggagaggacaccctggcatgtcactattaagcccaagagccaagagacctgccggggggccctcatctccgaccaatgggtcctgacagcagctcattgcttccgcgatggcaacgaccactccctgtggagggtcaatgtgggagaccccaaatcccagtggggcaaagaattccttattgagaaggcggtgatctccccagggtttgatgtctttgccaaaaagaaccagggaatcctggagttctatggtgatgacatagctctgctgaagctggcccagaaagtaaagatgtccacccatgccaggcccatctgccttccctgcacgatggaggccaatctggctctgcggagacctcaaggcagcacctgtagggaccatgagaatgaactgctgaacaaacagagtgttcctgctcattttgtcgccttgaatgggagcaaactgaacattaaccttaagatgggagtggagtggacaagctgtgccgaggttgtctcccaagaaaaaaccatgttccccaacttgacagatgtcagggaggtggtgacagaccagttcctatgcagtgggacccaggaggatgagagtccctgcaagggagaatctgggggagcagttttccttgagcggagattcaggttttttcaggtgggtctggtgagctggggtctttacaacccctgccttggctctgctgacaaaaactcccgcaaaagggcccctcgtagcaaggtcccgccgccacgagactttcacatcaatctcttccgcatgcagccctggctgaggcagcacctgggggatgtcctgaattttttacccctctagccatggccactgagccctctgctgccctgccaga

SEQ ID NO: 121865 - DNA, 1906 bp, Homo sapiens
  Payload ID: 3885
  Gene Symbol: C2
  Gene Name: complement component 2
  ENST ID: ENST00000469372
  CDS Start-End: 222-1742
cattttcccctgagagcggcctcggagatggctgtgactgtcctaagctgggagctgcaagggagaattcctgtcattcctggcctcagttctgcagggaccgagggcgagacacgcctgggcccaggtgtggcgtctctgtccccatctggttttagctggccactgccccaacccaggcatttcactgggcgcagtgcggacaggcttccgctttggtcatggggacaaggtccgctatcgctgctcctcgaatcttgtgctcacggggtcttcggagcgggagtgccagggcaacggggtctggagtggaacggagcccatctgccgccatcttcagctttgagatcaatgtgagcgttgccattatcacctttgcctcagagcccaaagtcctcatgtctgtcctgaacgacaactcccgggatatgactgaggtgatcagcagcctggaaaatgccaactataaagatcatgaaaatggaactgggactaacacctatgcggccttaaacagtgtctatctcatgatgaacaaccaaatgcgactcctcggcatggaaacgatggcctggcaggaaatccgacatgccatcatccttctgacagatggaaagtccaatatgggtggctctcccaagacagctgttgaccatatcagagagatcctgaacatcaaccagaagaggaatgactatctggacatctatgccatcggggtgggcaagctggatgtggactggagagaactgaatgagctagggtccaagaaggatggtgagaggcatgccttcattctgcaggacacaaaggctctgcaccaggtctttgaacatatgctggatgtctccaagctcacagacaccatctgcggggtggggaacatgtcagcaaacgcctctgaccaggagaggacaccctggcatgtcactattaagcccaagagccaagagacctgccggggggccctcatctccgaccaatgggtcctgacagcagctcattgcttccgcgatggcaacgaccactccctgtggagggtcaatgtgggagaccccaaatcccagtggggcaaagaattccttattgagaaggcggtgatctccccagggtttgatgtctttgccaaaaagaaccagggaatcctggagttctatggtgatgacatagctctgctgaagctggcccagaaagtaaagatgtccacccatgccaggcccatctgccttccctgcacgatggaggccaatctggctctgcggagacctcaaggcagcacctgtagggaccatgagaatgaactgctgaacaaacagagtgttcctgctcattttgtcgccttgaatgggagcaaactgaacattaaccttaagatgggagtggagtggacaagctgtgccgaggttgtctcccaagaaaaaaccatgttccccaacttgacagatgtcagggaggtggtgacagaccagttcctatgcagtgggacccaggaggatgagagtccctgcaagggagaatctgggggagcagttttccttgagcggagattcaggttttttcaggtgggtctggtgagctggggtctttacaacccctgccttggctctgctgacaaaaactcccgcaaaagggcccctcgtagcaaggtcccgccgccacgagactttcacatcaatctcttccgcatgcagccctggctgaggcagcacctgggggatgtcctgaattttttacccctctagccatggccactgagccctctgctgccctgccagaatctgccgcccctccatcttctacctctgaatggccacccttagaccctgtgatccatcctctctcctagctgagtaaatccgggtctctaggatgccagaggcagcgcacacaagctgggaaatcctca

SEQ ID NO: 121866 - DNA, 536 bp, Homo sapiens
  Payload ID: 3885
  Gene Symbol: C2
  Gene Name: complement component 2
  ENST ID: ENST00000494905
  CDS Start-End: 128-536
cacttctcagacagggcggctgccgggcggaggggctcctcacttctcagatggagcggttgccaggcagagggtctcctcacttctcagacggggcggccgggcagagacgctcctcacatcccggatggggcggccgggcagagctggccactgccccaacccaggcatttcactgggcgcagtgcggacaggcttccgctttggtcatggggacaaggtccgctatcgctgctcctcgaatcttgtgctcacggggtcttcggagcgggagtgccagggcaacggggtctggagtggaacggagcccatctgccgccaaccctactcttatgacttccctgaggacgtggcccctgccctgggcacttccttctcccacatgcttggggccaccaatcccacccagaagacaaaggaaagcctgggccgtaaaatccaaatccagcgctctggtcatctgaacctctacctgctcctggactgttcgcagagtgtgtcggaaaatgactttctcatcttcaaggagagcgcct

SEQ ID NO: 121867 - DNA, 542 bp, Homo sapiens
  Payload ID: 3885
  Gene Symbol: C2
  Gene Name: complement component 2
  ENST ID: ENST00000484636
  CDS Start-End: 131-385
aaagcctgaattcctcataccacactggggctggggccagagacggggcaggaggagctcttctcagctggccactgccccaacccaggcatttcactgggcgcagtgcggacaggcttccgctttggtcatggggacaaggtccgctatcgctgctcctcgaatcttgtgctcacggggtcttcggagcgggagtgccagggcaacggggtctggagtggaacggagcccatctgccgccaaccctactcttatgacttccctgaggacgtggcccctgccctgggcacttccttctcccacatgcttggggccaccaatcccacccagaagacaaaggaaagcctgggccgtaaaatccaaatccagcgctctggtcatctgaacctctacctgctcctggactgttcgcagagtgtgtcggaaaatgactttctcatcttcaaggagagcgcctccctcatggtggacaggatcttcagctttgagatcaatgtgagcgttgccattatcacctttgcctcagagcccaaagtcctcat

SEQ ID NO: 121868 - DNA, 2456 bp, Homo sapiens
  Payload ID: 3885
  Gene Symbol: C2
  Gene Name: complement component 2
  Uniprot ID: P06681
  ENST ID: ENST00000550682
  CDS Start-End: 277-2139
gagcgtgggggcagtacacaaagcctgtgggggagatctattgaccctatagatatattagcatcagggagacagggcaaaggtttcacccttcagttcagtccccaatccctgcttattatttccctaacagaagaccatcccccttgccactccctggtttttcttctctggcagcaatgaagcagctgctgacccagctctagttttcgggaagtcagatgaccttttccctcccgcggctctctacctctcgccgcccctagggaggacaccatgggcccactgatggttcttttttgcctgctgttcctgtacccagctggccactgccccaacccaggcatttcactgggcgcagtgcggacaggcttccgctttggtcatggggacaaggtccgctatcgctgctcctcgaatcttgtgctcacggggtcttcggagcgggagtgccagggcaacggggtctggagtggaacggagcccatctgccgccaaccctactcttatgacttccctgaggacgtggcccctgccctgggcacttccttctcccacatgcttggggccaccaatcccacccagaagacaaaggaaagcctgggccgtaaaatccaaatccagcgctctggtcatctgaacctctacctgctcctggactgttcgcagagtgtgtcggaaaatgactttctcatcttcaaggagagcgcctccctcatggtggacaggatcttcagctttgagatcaatgtgagcgttgccattatcacctttgcctcagagcccaaagtcctcatgtctgtcctgaacgacaactcccgggatatgactgaggtgatcagcagcctggaaaatgccaactataaagatcatgaaaatggaactgggactaacacctatgcggccttaaacagtgtctatctcatgatgaacaaccaaatgcgactcctcggcatggaaacgatggcctggcaggaaatccgacatgccatcatccttctgacagatggaaagtccaatatgggtggctctcccaagacagctgttgaccatatcagagagatcctgaacatcaaccagaagaggaatgactatctggacatctatgccatcggggtgggcaagctggatgtggactggagagaactgaatgagctagggtccaagaaggatggtgagaggcatgccttcattctgcaggacacaaaggctctgcaccaggtctttgaacatatgctggatgtctccaagctcacagacaccatctgcggggtggggaacatgtcagcaaacgcctctgaccaggagaggacaccctggcatgtcactattaagcccaagagccaagagacctgccggggggccctcatctccgaccaatgggtcctgacagcagctcattgcttccgcgatggcaacgaccactccctgtggagggtcaatgtgggagaccccaaatcccagtggggcaaagaattccttattgagaaggcggtgatctccccagggtttgatgtctttgccaaaaagaaccagggaatcctggagttctatggtgatgacatagctctgctgaagctggcccagaaagtaaagatgtccacccatgccaggcccatctgccttccctgcacgatggaggccaatctggctctgcggagacctcaaggcagcacctgtagggaccatgagaatgaactgctgaacaaacagagtgttcctgctcattttgtcgccttgaatgggagcaaactgaacattaaccttaagatgggagtggagtggacaagctgtgccgaggttgtctcccaagaaaaaaccatgttccccaacttgacagatgtcagggaggtggtgacagaccagttcctatgcagtgggacccaggaggatgagagtccctgcaagggagaatctgggggagcagttttccttgagcggagattcaggttttttcaggtgggtctggtgagctggggtctttacaacccctgccttggctctgctgacaaaaactcccgcaaaagggcccctcgtagcaaggtcccgccgccacgagactttcacatcaatctcttccgcatgcagccctggctgaggcagcacctgggggatgtcctgaattttttacccctctagccatggccactgagccctctgctgccctgccagaatctgccgcccctccatcttctacctctgaatggccacccttagaccctgtgatccatcctctctcctagctgagtaaatccgggtctctaggatgccagaggcagcgcacacaagctgggaaatcctcagggctcctaccagcaggactgcctcgctgccccacctcccgctccttggcctgtccccagattccttccctggttgacttgactcatgcttgtttcactttcacatggaatttcccagttatgaaattaataaaaatcaatggtttccacatc

SEQ ID NO: 121869 - DNA, 2456 bp, Homo sapiens; identical to SEQ ID NO: 121868
  Payload ID: 3885
  Gene Symbol: C2
  Gene Name: complement component 2
  Uniprot ID: P06681
  ENST ID: ENST00000548973
  CDS Start-End: 277-2139

SEQ ID NO: 121870 - DNA, 2619 bp, Homo sapiens
  Payload ID: 3885
  Gene Symbol: C2
  Gene Name: complement component 2
  ENST ID: ENST00000548500
  CDS Start-End: 782-2302
gagcgtgggggcagtacacaaagcctgtgggggagatctattgaccctatagatatattagcatcagggagacagggcaaaggtttcacccttcagttcagtccccaatccctgcttattatttccctaacagaagaccatcccccttgccactccctggtttttcttctctggcagcaatgaagcagctgctgacccagctctagttttcgggaagtcagatgaccttttccctcccgcggctctctacctctcgccgcccctagggaggacaccatgggcccactgatggttcttttttgcctgctgttcctgtacccaggtctggcagactcggctccctcctgccctcagaacgtgaatatctcgggtggcaccttcaccctcagccatggctgggctcctgggagccttctcacctactcctgcccccagggcctgtacccatccccagcatcacggctgtgcaagagcagcggacagtggcagaccccaggagccacccggtctctgtctaaggcggtctgcaaacctgtgcgctgtccagcccctgtctcctttgagaatggcatttataccccacggctggggtcctatcccgtgggtggcaatgtgagcttcgagtgtgaggatggcttcatattgcggggctcgcctgtgcgtcagtgtcgccccaacggcatgtgggatggagaaacagctgtgtgtgataatggggctggccactgccccaacccaggcatttcactgggcgcagtgcggacaggcttccgctttggtcatggggacaaggtccgctatcgctgctcctcgaatcttgtgctcacggggtcttcggagcgggagtgccagggcaacggggtctggagtggaacggagcccatctgccgccatcttcagctttgagatcaatgtgagcgttgccattatcacctttgcctcagagcccaaagtcctcatgtctgtcctgaacgacaactcccgggatatgactgaggtgatcagcagcctggaaaatgccaactataaagatcatgaaaatggaactgggactaacacctatgcggccttaaacagtgtctatctcatgatgaacaaccaaatgcgactcctcggcatggaaacgatggcctggcaggaaatccgacatgccatcatccttctgacagatggaaagtccaatatgggtggctctcccaagacagctgttgaccatatcagagagatcctgaacatcaaccagaagaggaatgactatctggacatctatgccatcggggtgggcaagctggatgtggactggagagaactgaatgagctagggtccaagaaggatggtgagaggcatgccttcattctgcaggacacaaaggctctgcaccaggtctttgaacatatgctggatgtctccaagctcacagacaccatctgcggggtggggaacatgtcagcaaacgcctctgaccaggagaggacaccctggcatgtcactattaagcccaagagccaagagacctgccggggggccctcatctccgaccaatgggtcctgacagcagctcattgcttccgcgatggcaacgaccactccctgtggagggtcaatgtgggagaccccaaatcccagtggggcaaagaattccttattgagaaggcggtgatctccccagggtttgatgtctttgccaaaaagaaccagggaatcctggagttctatggtgatgacatagctctgctgaagctggcccagaaagtaaagatgtccacccatgccaggcccatctgccttccctgcacgatggaggccaatctggctctgcggagacctcaaggcagcacctgtagggaccatgagaatgaactgctgaacaaacagagtgttcctgctcattttgtcgccttgaatgggagcaaactgaacattaaccttaagatgggagtggagtggacaagctgtgccgaggttgtctcccaagaaaaaaccatgttccccaacttgacagatgtcagggaggtggtgacagaccagttcctatgcagtgggacccaggaggatgagagtccctgcaagggagaatctgggggagcagttttccttgagcggagattcaggttttttcaggtgggtctggtgagctggggtctttacaacccctgccttggctctgctgacaaaaactcccgcaaaagggcccctcgtagcaaggtcccgccgccacgagactttcacatcaatctcttccgcatgcagccctggctgaggcagcacctgggggatgtcctgaattttttacccctctagccatggccactgagccctctgctgccctgccagaatctgccgcccctccatcttctacctctgaatggccacccttagaccctgtgatccatcctctctcctagctgagtaaatccgggtctctaggatgccagaggcagcgcacacaagctgggaaatcctcagggctcctaccagcaggactgcctcgctgccccacctcccgctccttggcctgtccccagattccttccctggttgacttgactcatgcttgtttcactttcacatggaatttcccagttatgaaattaataaaaatcaatggtttccacatc

SEQ ID NO: 121871 - DNA, 2880 bp, Homo sapiens
  Payload ID: 3885
  Gene Symbol: C2
  Gene Name: complement component 2
  ENST ID: ENST00000548828
  CDS Start-End: 392-2563
gagcgtgggggcagtacacaaagcctgtgggggagatctattgaccctatagatatattagcatcagggagacagggcaaaggtttcacccttcagttcagtccccaatccctgcttattatttccctaacagaagaccatcccccttgccactccctggtttttcttctctggcagcaatgaagcagctgctgacccagctctagttttcgggaagtcagatgaccttttccctcccgcggctctctacctctcgccgcccctagggaggacaccatgggcccactgatggttcttttttgcctgctgttcctgtacccaggtctggcagactcggctccctcctgccctcagaacgtgaatatctcgggtggcaccttcaccctcagccatggctgggctcctgggagccttctcacctactcctgcccccagggcctgtacccatccccagcatcacggctgtgcaagagcagcggacagtggcagaccccaggagccacccggtctctgtctaaggcggtctgcaaacgtgaggctccctgtgggctttgctcaggctgtgcgctgtccagcccctgtctcctttgagaatggcatttataccccacggctggggtcctatcccgtgggtggcaatgtgagcttcgagtgtgaggatggcttcatattgcggggctcgcctgtgcgtcagtgtcgccccaacggcatgtgggatggagaaacagctgtgtgtgataatggggctggccactgccccaacccaggcatttcactgggcgcagtgcggacaggcttccgctttggtcatggggacaaggtccgctatcgctgctcctcgaatcttgtgctcacggggtcttcggagcgggagtgccagggcaacggggtctggagtggaacggagcccatctgccgccaaccctactcttatgacttccctgaggacgtggcccctgccctgggcacttccttctcccacatgcttggggccaccaatcccacccagaagacaaaggaaagcctgggccgtaaaatccaaatccagcgctctggtcatctgaacctctacctgctcctggactgttcgcagagtgtgtcggaaaatgactttctcatcttcaaggagagcgcctccctcatggtggacaggatcttcagctttgagatcaatgtgagcgttgccattatcacctttgcctcagagcccaaagtcctcatgtctgtcctgaacgacaactcccgggatatgactgaggtgatcagcagcctggaaaatgccaactataaagatcatgaaaatggaactgggactaacacctatgcagccttaaacagtgtctatctcatgatgaacaaccaaatgcgactcctcggcatggaaacgatggcctggcaggaaatccgacatgccatcatccttctgacagatggaaagtccaatatgggtggctctcccaagacagctgttgaccatatcagagagatcctgaacatcaaccagaagaggaatgactatctggacatctatgccatcggggtgggcaagctggatgtggactggagagaactgaatgagctagggtccaagaaggatggtgagaggcatgccttcattctgcaggacacaaaggctctgcaccaggtctttgaacatatgctggatgtctccaagctcacagacaccatctgcggggtggggaacatgtcagcaaacgcctctgaccaggagaggacaccctggcatgtcactattaagcccaagagccaagagacctgccggggggccctcatctccgaccaatgggtcctgacagcagctcattgcttccgcgatggcaacgaccactccctgtggagggtcaatgtgggagaccccaaatcccagtggggcaaagaattccttattgagaaggcggtgatctccccagggtttgatgtctttgccaaaaagaaccagggaatcctggagttctatggtgatgacatagctctgctgaagctggcccagaaagtaaagatgtccacccatgccaggcccatctgccttccctgcacgatggaggccaatctggctctgcggagacctcaaggcagcacctgtagggaccatgagaatgaactgctgaacaaacagagtgttcctgctcattttgtcgccttgaatgggagcaaactgaacattaaccttaagatgggagtggagtggacaagctgtgccgaggttgtctcccaagaaaaaaccatgttccccaacttgacagatgtcagggaggtggtgacagaccagttcctatgcagtgggacccaggaggatgagagtccctgcaagggagaatctgggggagcagttttccttgagcggagattcaggttttttcaggtgggtctggtgagctggggtctttacaacccctgccttggctctgctgacaaaaactcccgcaaaagggcccctcgtagcaaggtcccgccgccacgagactttcacatcaatctcttccgcatgcagccctggctgaggcagcacctgggggatgtcctgaattttttacccctctagccatggccactgagccctctgctgccctgccagaatctgccgcccctccatcttctacctctgaatggccacccttagaccctgtgatccatcctctctcctagctgagtaaatccgggtctctaggatgccagaggcagcgcacacaagctgggaaatcctcagggctcctaccagcaggactgcctcgctgccccacctcccgctccttggcctgtccccagattccttccctggttgacttgactcatgcttgtttcactttcacatggaatttcccagttatgaaattaataaaaatcaatggtttccacatc

SEQ ID NO: 121872 - DNA, 2456 bp, Homo sapiens; identical to SEQ ID NO: 121868
  Payload ID: 3885
  Gene Symbol: C2
  Gene Name: complement component 2
  Uniprot ID: P06681
  ENST ID: ENST00000549972
  CDS Start-End: 277-2139

SEQ ID NO: 121873 - DNA, 2880 bp, Homo sapiens
  Payload ID: 3885
  Gene Symbol: C2
  Gene Name: complement component 2
  ENST ID: ENST00000550363
  CDS Start-End: 392-2563
gagcgtgggggcagtacacaaagcctgtgggggagatctattgaccctatagatatattagcatcagggagacagggcaaaggtttcacccttcagttcagtccccaatccctgcttattatttccctaacagaagaccatcccccttgccactccctggtttttcttctctggcagcaatgaagcagctgctgacccagctctagttttcgggaagtcagatgaccttttccctcccgcggctctctacctctcgccgcccctagggaggacaccatgggcccactgatggttcttttttgcctgctgttcctgtacccaggtctggcagactcggctccctcctgccctcagaacgtgaatatctcgggtggcaccttcaccctcagccatggctgggctcctgggagccttctcacctactcctgcccccagggcctgtacccatccccagcatcacggctgtgcaagagcagcggacagtggcagaccccaggagccacccggtctctgtctaaggcggtctgcaaacgtgaggctccctgtgggctttgctcaggctgtgcgctgtccagcccctgtctcctttgagaatggcatttataccccacggctggggtcctatcccgtgggtggcaatgtgagcttcgagtgtgaggatggcttcatattgcggggctcgcctgtgcgtcagtgtcgccccaacggcatgtgggatggagaaacagctgtgtgtgataatggggctggccactgccccaacccaggcatttcactgggcgcagtgcggacaggcttccgctttggtcatggggacaaggtccgctatcgctgctcctcgaatcttgtgctcacggggtcttcggagcgggagtgccagggcaacggggtctggagtggaacggagcccatctgccgccaaccctactcttatgacttccctgaggacgtggcccctgccctgggcacttccttctcccacatgcttggggccaccaatcccacccagaagacaaaggaaagcctgggccgtaaaatccaaatccagcgctctggtcatctgaacctctacctgctcctggactgttcgcagagtgtgtcggaaaatgactttctcatcttcaaggagagcgcctccctcatggtggacaggatcttcagctttgagatcaatgtgagcgttgccattatcacctttgcctcagagcccaaagtcctcatgtctgtcctgaacgacaactcccgggatatgactgaggtgatcagcagcctggaaaatgccaactataaagatcatgaaaatggaactgggactaacacctatgcggccttaaacagtgtctatctcatgatgaacaaccaaatgcgactcctcggcatggaaacgatggcctggcaggaaatccgacatgccatcatccttctgacagatggaaagtccaatatgggtggctctcccaagacagctgttgaccatatcagagagatcctgaacatcaaccagaagaggaatgactatctggacatctatgccatcggggtgggcaagctggatgtggactggagagaactgaatgagctagggtccaagaaggatggtgagaggcatgccttcattctgcaggacacaaaggctctgcaccaggtctttgaacatatgctggatgtctccaagctcacagacaccatctgcggggtggggaacatgtcagcaaacgcctctgaccaggagaggacaccctggcatgtcactattaagcccaagagccaagagacctgccggggggccctcatctccgaccaatgggtcctgacagcagctcattgcttccgcgatggcaacgaccactccctgtggagggtcaatgtgggagaccccaaatcccagtggggcaaagaattccttattgagaaggcggtgatctccccagggtttgatgtctttgccaaaaagaaccagggaatcctggagttctatggtgatgacatagctctgctgaagctggcccagaaagtaaagatgtccacccatgccaggcccatctgccttccctgcacgatggaggccaatctggctctgcggagacctcaaggcagcacctgtagggaccatgagaatgaactgctgaacaaacagagtgttcctgctcattttgtcgccttgaatgggagcaaactgaacattaaccttaagatgggagtggagtggacaagctgtgccgaggttgtctcccaagaaaaaaccatgttccccaacttgacagatgtcagggaggtggtgacagaccagttcctatgcagtgggacccaggaggatgagagtccctgcaagggagaatctgggggagcagttttccttgagcggagattcaggttttttcaggtgggtctggtgagctggggtctttacaacccctgccttggctctgctgacaaaaactcccgcaaaagggcccctcgtagcaaggtcccgccgccacgagactttcacatcaatctcttccgcatgcagccctggctgaggcagcacctgggggatgtcctgaattttttacccctctagccatggccactgagccctctgctgccctgccagaatctgccgcccctccatcttctacctctgaatggccacccttagaccctgtgatccatcctctctcctagctgagtaaatccgggtctctaggatgccagaggcagcgcacacaagctgggaaatcctcagggctcctaccagcaggactgcctcgctgccccacctcccgctccttggcctgtccccagattccttccctggttgacttgactcatgcttgtttcactttcacatggaatttcccagttatgaaattaataaaaatcaatggtttccacatc

SEQ ID NO: 121874 - DNA, 2456 bp, Homo sapiens
  Payload ID: 3885
  Gene Symbol: C2
  Gene Name: complement component 2
  Uniprot ID: P06681
  ENST ID: ENST00000548995
  CDS Start-End: 277-2139
gagcgtgggggcagtacacaaagcctgtgggggagatctattgaccctatagatatattagcatcagggagacagggcaaaggtttcacccttcagttcagtccccaatccctgcttattatttccctaacagaagaccatcccccttgccactccctggtttttcttctctggcagcaatgaagcagctgctgacccagctctagttttcgggaagtcagatgaccttttccctcccgcggctctctacctctcgccgcccctagggaggacaccatgggcccactgatggttcttttttgcctgctgttcctgtacccagctggccactgccccaacccaggcatttcactgggcgcagtgcggacaggcttccgctttggtcatggggacaaggtccgctatcgctgctcctcgaatcttgtgctcacggggtcttcggagcgggagtgccagggcaacggggtctggagtggaacggagcccatctgccgccaaccctactcttatgacttccctgaggacgtggcccctgccctgggcacttccttctcccacatgcttggggccaccaatcccacccagaagacaaaggaaagcctgggccgtaaaatccaaatccagcgctctggtcatctgaacctctacctgctcctggactgttcgcagagtgtgtcggaaaatgactttctcatcttcaaggagagcgcctccctcatggtggacaggatcttcagctttgagatcaatgtgagcgttgccattatcacctttgcctcagagcccaaagtcctcatgtctgtcctgaacgacaactcccgggatatgactgaggtgatcagcagcctggaaaatgccaactataaagatcatgaaaatggaactgggactaacacctatgcagccttaaacagtgtctatctcatgatgaacaaccaaatgcgactcctcggcatggaaacgatggcctggcaggaaatccgacatgccatcatccttctgacagatggaaagtccaatatgggtggctctcccaagacagctgttgaccatatcagagagatcctgaacatcaaccagaagaggaatgactatctggacatctatgccatcggggtgggcaagctggatgtggactggagagaactgaatgagctagggtccaagaaggatggtgagaggcatgccttcattctgcaggacacaaaggctctgcaccaggtctttgaacatatgctggatgtctccaagctcacagacaccatctgcggggtggggaacatgtcagcaaacgcctctgaccaggagaggacaccctggcatgtcactattaagcccaagagccaagagacctgccggggggccctcatctccgaccaatgggtcctgacagcagctcattgcttccgcgatggcaacgaccactccctgtggagggtcaatgtgggagaccccaaatcccagtggggcaaagaattccttattgagaaggcggtgatctccccagggtttgatgtctttgccaaaaagaaccagggaatcctggagttctatggtgatgacatagctctgctgaagctggcccagaaagtaaagatgtccacccatgccaggcccatctgccttccctgcacgatggaggccaatctggctctgcggagacctcaaggcagcacctgtagggaccatgagaatgaactgctgaacaaacagagtgttcctgctcattttgtcgccttgaatgggagcaaactgaacattaaccttaagatgggagtggagtggacaagctgtgccgaggttgtctcccaagaaaaaaccatgttccccaacttgacagatgtcagggaggtggtgacagaccagttcctatgcagtgggacccaggaggatgagagtccctgcaagggagaatctgggggagcagttttccttgagcggagattcaggttttttcaggtgggtctggtgagctggggtctttacaacccctgccttggctctgctgacaaaaactcccgcaaaagggcccctcgtagcaaggtcccgccgccacgagactttcacatcaatctcttccgcatgcagccctggctgaggcagcacctgggggatgtcctgaattttttacccctctagccatggccactgagccctctgctgccctgccagaatctgccgcccctccatcttctacctctgaatggccacccttagaccctgtgatccatcctctctcctagctgagtaaatccgggtctctaggatgccagaggcagcgcacacaagctgggaaatcctcagggctcctaccagcaggactgcctcgctgccccacctcccgctccttggcctgtccccagattccttccctggttgacttgactcatgcttgtttcactttcacatggaatttcccagttatgaaattaataaaaatcaatggtttccacatc

SEQ ID NO: 121875 - DNA, 2880 bp, Homo sapiens; identical to SEQ ID NO: 121873
  Payload ID: 3885
  Gene Symbol: C2
  Gene Name: complement component 2
  ENST ID: ENST00000547984
  CDS Start-End: 392-2563

SEQ ID NO: 121876 - DNA, 2880 bp, Homo sapiens; identical to SEQ ID NO: 121873
  Payload ID: 3885
  Gene Symbol: C2
  Gene Name: complement component 2
  ENST ID: ENST00000550045
  CDS Start-End: 392-2563

SEQ ID NO: 121877 - DNA, 2456 bp, Homo sapiens; identical to SEQ ID NO: 121868
  Payload ID: 3885
  Gene Symbol: C2
  Gene Name: complement component 2
  Uniprot ID: P06681
  ENST ID: ENST00000551648
  CDS Start-End: 277-2139

SEQ ID NO: 121878 - DNA, 2880 bp, Homo sapiens; identical to SEQ ID NO: 121873
  Payload ID: 3885
  Gene Symbol: C2
  Gene Name: complement component 2
  ENST ID: ENST00000552638
  CDS Start-End: 392-2563

SEQ ID NO: 121879 - DNA, 2619 bp, Homo sapiens
  Payload ID: 3885
  Gene Symbol: C2
  Gene Name: complement component 2
  ENST ID: ENST00000548250
  CDS Start-End: 782-2302
gagcgtgggggcagtacacaaagcctgtgggggagatctattgaccctatagatatattagcatcagggagacagggcaaaggtttcacccttcagttcagtccccaatccctgcttattatttccctaacagaagaccatcccccttgccactccctggtttttcttctctggcagcaatgaagcagctgctgacccagctctagttttcgggaagtcagatgaccttttccctcccgcggctctctacctctcgccgcccctagggaggacaccatgggcccactgatggttcttttttgcctgctgttcctgtacccaggtctggcagactcggctccctcctgccctcagaacgtgaatatctcgggtggcaccttcaccctcagccatggctgggctcctgggagccttctcacctactcctgcccccagggcctgtacccatccccagcatcacggctgtgcaagagcagcggacagtggcagaccccaggagccacccggtctctgtctaaggcggtctgcaaacctgtgcgctgtccagcccctgtctcctttgagaatggcatttataccccacggctggggtcctatcccgtgggtggcaatgtgagcttcgagtgtgaggatggcttcatattgcggggctcgcctgtgcgtcagtgtcgccccaacggcatgtgggatggagaaacagctgtgtgtgataatggggctggccactgccccaacccaggcatttcactgggcgcagtgcggacaggcttccgctttggtcatggggacaaggtccgctatcgctgctcctcgaatcttgtgctcacggggtcttcggagcgggagtgccagggcaacggggtctggagtggaacggagcccatctgccgccatcttcagctttgagatcaatgtgagcgttgccattatcacctttgcctcagagcccaaagtcctcatgtctgtcctgaacgacaactcccgggatatgactgaggtgatcagcagcctggaaaatgccaactataaagatcatgaaaatggaactgggactaacacctatgcagccttaaacagtgtctatctcatgatgaacaaccaaatgcgactcctcggcatggaaacgatggcctggcaggaaatccgacatgccatcatccttctgacagatggaaagtccaatatgggtggctctcccaagacagctgttgaccatatcagagagatcctgaacatcaaccagaagaggaatgactatctggacatctatgccatcggggtgggcaagctggatgtggactggagagaactgaatgagctagggtccaagaaggatggtgagaggcatgccttcattctgcaggacacaaaggctctgcaccaggtctttgaacatatgctggatgtctccaagctcacagacaccatctgcggggtggggaacatgtcagcaaacgcctctgaccaggagaggacaccctggcatgtcactattaagcccaagagccaagagacctgccggggggccctcatctccgaccaatgggtcctgacagcagctcattgcttccgcgatggcaacgaccactccctgtggagggtcaatgtgggagaccccaaatcccagtggggcaaagaattccttattgagaaggcggtgatctccccagggtttgatgtctttgccaaaaagaaccagggaatcctggagttctatggtgatgacatagctctgctgaagctggcccagaaagtaaagatgtccacccatgccaggcccatctgccttccctgcacgatggaggccaatctggctctgcggagacctcaaggcagcacctgtagggaccatgagaatgaactgctgaacaaacagagtgttcctgctcattttgtcgccttgaatgggagcaaactgaacattaaccttaagatgggagtggagtggacaagctgtgccgaggttgtctcccaagaaaaaaccatgttccccaacttgacagatgtcagggaggtggtgacagaccagttcctatgcagtgggacccaggaggatgagagtccctgcaagggagaatctgggggagcagttttccttgagcggagattcaggttttttcaggtgggtctggtgagctggggtctttacaacccctgccttggctctgctgacaaaaactcccgcaaaagggcccctcgtagcaaggtcccgccgccacgagactttcacatcaatctcttccgcatgcagccctggctgaggcagcacctgggggatgtcctgaattttttacccctctagccatggccactgagccctctgctgccctgccagaatctgccgcccctccatcttctacctctgaatggccacccttagaccctgtgatccatcctctctcctagctgagtaaatccgggtctctaggatgccagaggcagcgcacacaagctgggaaatcctcagggctcctaccagcaggactgcctcgctgccccacctcccgctccttggcctgtccccagattccttccctggttgacttgactcatgcttgtttcactttcacatggaatttcccagttatgaaattaataaaaatcaatggtttccacatc

SEQ ID NO: 121880 - DNA, 2880 bp, Homo sapiens; identical to SEQ ID NO: 121873
  Payload ID: 3885
  Gene Symbol: C2
  Gene Name: complement component 2
  ENST ID: ENST00000549997
  CDS Start-End: 392-2563

SEQ ID NO: 121881 - DNA, 2456 bp, Homo sapiens; identical to SEQ ID NO: 121868
  Payload ID: 3885
  Gene Symbol: C2
  Gene Name: complement component 2
  Uniprot ID: P06681
  ENST ID: ENST00000551081
  CDS Start-End: 277-2139

SEQ ID NO: 121882 - DNA, 2059 bp, Homo sapiens
  Payload ID: 3885
  Gene Symbol: C2
  Gene Name: complement component 2
  ENST ID: ENST00000618948
  CDS Start-End: 222-1742
cattttcccctgagagcggcctcggagatggctgtgactgtcctaagctgggagctgcaagggagaattcctgtcattcctggcctcagttctgcagggaccgagggcgagacacgcctgggcccaggtgtggcgtctctgtccccatctggttttagctggccactgccccaacccaggcatttcactgggcgcagtgcggacaggcttccgctttggtcatggggacaaggtccgctatcgctgctcctcgaatcttgtgctcacggggtcttcggagcgggagtgccagggcaacggggtctggagtggaacggagcccatctgccgccatcttcagctttgagatcaatgtgagcgttgccattatcacctttgcctcagagcccaaagtcctcatgtctgtcctgaacgacaactcccgggatatgactgaggtgatcagcagcctggaaaatgccaactataaagatcatgaaaatggaactgggactaacacctatgcggccttaaacagtgtctatctcatgatgaacaaccaaatgcgactcctcggcatggaaacgatggcctggcaggaaatccgacatgccatcatccttctgacagatggaaagtccaatatgggtggctctcccaagacagctgttgaccatatcagagagatcctgaacatcaaccagaagaggaatgactatctggacatctatgccatcggggtgggcaagctggatgtggactggagagaactgaatgagctagggtccaagaaggatggtgagaggcatgccttcattctgcaggacacaaaggctctgcaccaggtctttgaacatatgctggatgtctccaagctcacagacaccatctgcggggtggggaacatgtcagcaaacgcctctgaccaggagaggacaccctggcatgtcactattaagcccaagagccaagagacctgccggggggccctcatctccgaccaatgggtcctgacagcagctcattgcttccgcgatggcaacgaccactccctgtggagggtcaatgtgggagaccccaaatcccagtggggcaaagaattccttattgagaaggcggtgatctccccagggtttgatgtctttgccaaaaagaaccagggaatcctggagttctatggtgatgacatagctctgctgaagctggcccagaaagtaaagatgtccacccatgccaggcccatctgccttccctgcacgatggaggccaatctggctctgcggagacctcaaggcagcacctgtagggaccatgagaatgaactgctgaacaaacagagtgttcctgctcattttgtcgccttgaatgggagcaaactgaacattaaccttaagatgggagtggagtggacaagctgtgccgaggttgtctcccaagaaaaaaccatgttccccaacttgacagatgtcagggaggtggtgacagaccagttcctatgcagtgggacccaggaggatgagagtccctgcaagggagaatctgggggagcagttttccttgagcggagattcaggttttttcaggtgggtctggtgagctggggtctttacaacccctgccttggctctgctgacaaaaactcccgcaaaagggcccctcgtagcaaggtcccgccgccacgagactttcacatcaatctcttccgcatgcagccctggctgaggcagcacctgggggatgtcctgaattttttacccctctagccatggccactgagccctctgctgccctgccagaatctgccgcccctccatcttctacctctgaatggccacccttagaccctgtgatccatcctctctcctagctgagtaaatccgggtctctaggatgccagaggcagcgcacacaagctgggaaatcctcagggctcctaccagcaggactgcctcgctgccccacctcccgctccttggcctgtccccagattccttccctggttgacttgactcatgcttgtttcactttcacatggaatttcccagttatgaaattaataaaaatcaatggtttccacatc

SEQ ID NO: 121883 - DNA, 2002 bp, Homo sapiens
  Payload ID: 3885
  Gene Symbol: C2
  Gene Name: complement component 2
  Uniprot ID: P06681
  ENST ID: ENST00000621558
  CDS Start-End: 69-1685
agttgacgatgtccctaacagcgaattccaaggcgcccgtgtagcaggagaggagcaagtcggccacgatgcgtgcactgtgcatcagggagacctgcagctccgagctggggttcagcaggaactggtcccgcaggaaggctggccactgccccaacccaggcatttcactgggcgcagtgcggacaggcttccgctttggtcatggggacaaggtccgctatcgctgctcctcgaatcttgtgctcacggggtcttcggagcgggagtgccagggcaacggggtctggagtggaacggagcccatctgccgccaaccctactcttatgacttccctgaggacgtggcccctgccctgggcacttccttctcccacatgcttggggccaccaatcccacccagaagacaaaggatcatgaaaatggaactgggactaacacctatgcggccttaaacagtgtctatctcatgatgaacaaccaaatgcgactcctcggcatggaaacgatggcctggcaggaaatccgacatgccatcatccttctgacagatggaaagtccaatatgggtggctctcccaagacagctgttgaccatatcagagagatcctgaacatcaaccagaagaggaatgactatctggacatctatgccatcggggtgggcaagctggatgtggactggagagaactgaatgagctagggtccaagaaggatggtgagaggcatgccttcattctgcaggacacaaaggctctgcaccaggtctttgaacatatgctggatgtctccaagctcacagacaccatctgcggggtggggaacatgtcagcaaacgcctctgaccaggagaggacaccctggcatgtcactattaagcccaagagccaagagacctgccggggggccctcatctccgaccaatgggtcctgacagcagctcattgcttccgcgatggcaacgaccactccctgtggagggtcaatgtgggagaccccaaatcccagtggggcaaagaattccttattgagaaggcggtgatctccccagggtttgatgtctttgccaaaaagaaccagggaatcctggagttctatggtgatgacatagctctgctgaagctggcccagaaagtaaagatgtccacccatgccaggcccatctgccttccctgcacgatggaggccaatctggctctgcggagacctcaaggcagcacctgtagggaccatgagaatgaactgctgaacaaacagagtgttcctgctcattttgtcgccttgaatgggagcaaactgaacattaaccttaagatgggagtggagtggacaagctgtgccgaggttgtctcccaagaaaaaaccatgttccccaacttgacagatgtcagggaggtggtgacagaccagttcctatgcagtgggacccaggaggatgagagtccctgcaagggagaatctgggggagcagttttccttgagcggagattcaggttttttcaggtgggtctggtgagctggggtctttacaacccctgccttggctctgctgacaaaaactcccgcaaaagggcccctcgtagcaaggtcccgccgccacgagactttcacatcaatctcttccgcatgcagccctggctgaggcagcacctgggggatgtcctgaattttttacccctctagccatggccactgagccctctgctgccctgccagaatctgccgcccctccatcttctacctctgaatggccacccttagaccctgtgatccatcctctctcctagctgagtaaatccgggtctctaggatgccagaggcagcgcacacaagctgggaaatcctcagggctcctaccagcaggactgcctcgctgccccacctcccgctccttggcctgtccccagattccttccctggttgacttgactcatgcttgtttcactttcacatggaatttcccagttatgaaattaataaaaatcaatggtttccacatc

SEQ ID NO: 121884 - DNA, 2002 bp, Homo sapiens; identical to SEQ ID NO: 121883
  Payload ID: 3885
  Gene Symbol: C2
  Gene Name: complement component 2
  Uniprot ID: P06681
  ENST ID: ENST00000615380
  CDS Start-End: 69-1685

SEQ ID NO: 121885 - DNA, 2059 bp, Homo sapiens; identical to SEQ ID NO: 121882
  Payload ID: 3885
  Gene Symbol: C2
  Gene Name: complement component 2
  ENST ID: ENST00000615801
  CDS Start-End: 222-1742

SEQ ID NO: 121886 - DNA, 2059 bp, Homo sapiens; identical to SEQ ID NO: 121882
  Payload ID: 3885
  Gene Symbol: C2
  Gene Name: complement component 2
  ENST ID: ENST00000613837
  CDS Start-End: 222-1742

SEQ ID NO: 121887 - DNA, 2002 bp, Homo sapiens; identical to SEQ ID NO: 121883
  Payload ID: 3885
  Gene Symbol: C2
  Gene Name: complement component 2
  Uniprot ID: P06681
  ENST ID: ENST00000612228
  CDS Start-End: 69-1685

SEQ ID NO: 121888 - DNA, 2059 bp, Homo sapiens; identical to SEQ ID NO: 121882
  Payload ID: 3885
  Gene Symbol: C2
  Gene Name: complement component 2
  ENST ID: ENST00000614291
  CDS Start-End: 222-1742

SEQ ID NO: 121889 - DNA, 2002 bp, Homo sapiens; identical to SEQ ID NO: 121883
  Payload ID: 3885
  Gene Symbol: C2
  Gene Name: complement component 2
  Uniprot ID: P06681
  ENST ID: ENST00000618254
  CDS Start-End: 69-1685

SEQ ID NO: 121890 - DNA, 5263 bp, Homo sapiens
  Payload ID: 3886
  Gene Symbol: C3
  Gene Name: complement component 3
  Uniprot ID: P01024
  ENST ID: ENST00000245907
  CDS Start-End: 94-5085
agataaaaagccagctccagcaggcgctgctcactcctccccatcctctccctctgtccctctgtccctctgaccctgcactgtcccagcaccatgggacccacctcaggtcccagcctgctgctcctgctactaacccacctccccctggctctggggagtcccatgtactctatcatcacccccaacatcttgcggctggagagcgaggagaccatggtgctggaggcccacgacgcgcaaggggatgttccagtcactgttactgtccacgacttcccaggcaaaaaactagtgctgtccagtgagaagactgtgctgacccctgccaccaaccacatgggcaacgtcaccttcacgatcccagccaacagggagttcaagtcagaaaaggggcgcaacaagttcgtgaccgtgcaggccaccttcgggacccaagtggtggagaaggtggtgctggtcagcctgcagagcgggtacctcttcatccagacagacaagaccatctacacccctggctccacagttctctatcggatcttcaccgtcaaccacaagctgctacccgtgggccggacggtcatggtcaacattgagaacccggaaggcatcccggtcaagcaggactccttgtcttctcagaaccagcttggcgtcttgcccttgtcttgggacattccggaactcgtcaacatgggccagtggaagatccgagcctactatgaaaactcaccacagcaggtcttctccactgagtttgaggtgaaggagtacgtgctgcccagtttcgaggtcatagtggagcctacagagaaattctactacatctataacgagaagggcctggaggtcaccatcaccgccaggttcctctacgggaagaaagtggagggaactgcctttgtcatcttcgggatccaggatggcgaacagaggatttccctgcctgaatccctcaagcgcattccgattgaggatggctcgggggaggttgtgctgagccggaaggtactgctggacggggtgcagaacccccgagcagaagacctggtggggaagtctttgtacgtgtctgccaccgtcatcttgcactcaggcagtgacatggtgcaggcagagcgcagcgggatccccatcgtgacctctccctaccagatccacttcaccaagacacccaagtacttcaaaccaggaatgccctttgacctcatggtgttcgtgacgaaccctgatggctctccagcctaccgagtccccgtggcagtccagggcgaggacactgtgcagtctctaacccagggagatggcgtggccaaactcagcatcaacacacaccccagccagaagcccttgagcatcacggtgcgcacgaagaagcaggagctctcggaggcagagcaggctaccaggaccatgcaggctctgccctacagcaccgtgggcaactccaacaattacctgcatctctcagtgctacgtacagagctcagacccggggagaccctcaacgtcaacttcctcctgcgaatggaccgcgcccacgaggccaagatccgctactacacctacctgatcatgaacaagggcaggctgttgaaggcgggacgccaggtgcgagagcccggccaggacctggtggtgctgcccctgtccatcaccaccgacttcatcccttccttccgcctggtggcgtactacacgctgatcggtgccagcggccagagggaggtggtggccgactccgtgtgggtggacgtcaaggactcctgcgtgggctcgctggtggtaaaaagcggccagtcagaagaccggcagcctgtacctgggcagcagatgaccctgaagatagagggtgaccacggggcccgggtggtactggtggccgtggacaagggcgtgttcgtgctgaataagaagaacaaactgacgcagagtaagatctgggacgtggtggagaaggcagacatcggctgcaccccgggcagtgggaaggattacgccggtgtcttctccgacgcagggctgaccttcacgagcagcagtggccagcagaccgcccagagggcagaacttcagtgcccgcagccagccgcccgccgacgccgttccgtgcagctcacggagaagcgaatggacaaagtcggcaagtaccccaaggagctgcgcaagtgctgcgaggacggcatgcgggagaaccccatgaggttctcgtgccagcgccggacccgtttcatctccctgggcgaggcgtgcaagaaggtcttcctggactgctgcaactacatcacagagctgcggcggcagcacgcgcgggccagccacctgggcctggccaggagtaacctggatgaggacatcattgcagaagagaacatcgtttcccgaagtgagttcccagagagctggctgtggaacgttgaggacttgaaagagccaccgaaaaatggaatctctacgaagctcatgaatatatttttgaaagactccatcaccacgtgggagattctggctgtgagcatgtcggacaagaaagggatctgtgtggcagaccccttcgaggtcacagtaatgcaggacttcttcatcgacctgcggctaccctactctgttgttcgaaacgagcaggtggaaatccgagccgttctctacaattaccggcagaaccaagagctcaaggtgagggtggaactactccacaatccagccttctgcagcctggccaccaccaagaggcgtcaccagcagaccgtaaccatcccccccaagtcctcgttgtccgttccatatgtcatcgtgccgctaaagaccggcctgcaggaagtggaagtcaaggctgctgtctaccatcatttcatcagtgacggtgtcaggaagtccctgaaggtcgtgccggaaggaatcagaatgaacaaaactgtggctgttcgcaccctggatccagaacgcctgggccgtgaaggagtgcagaaagaggacatcccacctgcagacctcagtgaccaagtcccggacaccgagtctgagaccagaattctcctgcaagggaccccagtggcccagatgacagaggatgccgtcgacgcggaacggctgaagcacctcattgtgaccccctcgggctgcggggaacagaacatgatcggcatgacgcccacggtcatcgctgtgcattacctggatgaaacggagcagtgggagaagttcggcctagagaagcggcagggggccttggagctcatcaagaaggggtacacccagcagctggccttcagacaacccagctctgcctttgcggccttcgtgaaacgggcacccagcacctggctgaccgcctacgtggtcaaggtcttctctctggctgtcaacctcatcgccatcgactcccaagtcctctgcggggctgttaaatggctgatcctggagaagcagaagcccgacggggtcttccaggaggatgcgcccgtgatacaccaagaaatgattggtggattacggaacaacaacgagaaagacatggccctcacggcctttgttctcatctcgctgcaggaggctaaagatatttgcgaggagcaggtcaacagcctgccaggcagcatcactaaagcaggagacttccttgaagccaactacatgaacctacagagatcctacactgtggccattgctggctatgctctggcccagatgggcaggctgaaggggcctcttcttaacaaatttctgaccacagccaaagataagaaccgctgggaggaccctggtaagcagctctacaacgtggaggccacatcctatgccctcttggccctactgcagctaaaagactttgactttgtgcctcccgtcgtgcgttggctcaatgaacagagatactacggtggtggctatggctctacccaggccaccttcatggtgttccaagccttggctcaataccaaaaggacgcccctgaccaccaggaactgaaccttgatgtgtccctccaactgcccagccgcagctccaagatcacccaccgtatccactgggaatctgccagcctcctgcgatcagaagagaccaaggaaaatgagggtttcacagtcacagctgaaggaaaaggccaaggcaccttgtcggtggtgacaatgtaccatgctaaggccaaagatcaactcacctgtaataaattcgacctcaaggtcaccataaaaccagcaccggaaacagaaaagaggcctcaggatgccaagaacactatgatccttgagatctgtaccaggtaccggggagaccaggatgccactatgtctatattggacatatccatgatgactggctttgctccagacacagatgacctgaagcagctggccaatggtgttgacagatacatctccaagtatgagctggacaaagccttctccgataggaacaccctcatcatctacctggacaaggtctcacactctgaggatgactgtctagctttcaaagttcaccaatactttaatgtagagcttatccagcctggagcagtcaaggtctacgcctattacaacctggaggaaagctgtacccggttctaccatccggaaaaggaggatggaaagctgaacaagctctgccgtgatgaactgtgccgctgtgctgaggagaattgcttcatacaaaagtcggatgacaaggtcaccctggaagaacggctggacaaggcctgtgagccaggagtggactatgtgtacaagacccgactggtcaaggttcagctgtccaatgactttgacgagtacatcatggccattgagcagaccatcaagtcaggctcggatgaggtgcaggttggacagcagcgcacgttcatcagccccatcaagtgcagagaagccctgaagctggaggagaagaaacactacctcatgtggggtctctcctccgatttctggggagagaagcccaacctcagctacatcatcgggaaggacacttgggtggagcactggcccgaggaggacgaatgccaagacgaagagaaccagaaacaatgccaggacctcggcgccttcaccgagagcatggttgtctttgggtgccccaactgaccacacccccattcccccactccagataaagcttcagttatatctcacgtgtctggagttctttgccaagagggagaggctgaaatccccagccgcctcacctgcagctcagctccatcctacttgaaacctcacctgttcccaccgcattttctcctggcgttcgcctgctagtgtg

SEQ ID NO: 121891 - DNA, 585 bp, Homo sapiens
  Payload ID: 3886
  Gene Symbol: C3
  Gene Name: complement component 3
  ENST ID: ENST00000602229
  CDS Start-End: 1-301
cttcatacaaaagtcggatgacaaggtcaccctggaagaacggctggacaaggcctgtgagccaggagtggactatgtgtacaagacccgactggtcaaggttcagctgtccaatgactttgacgagtacatcatggccattgagcagaccatcaagtcaggctcggatgaggtgcaggttggacagcagcgcacgttcatcagccccatcaagtgcagagaagccctgaagctggaggagaagaaacactacctcatgtggggtctctcctccgatttctggggagagaagcccaagtgagtgctttccctgcgcgtgcgcgcgaccgcccgactgccccgcccatgccacgcccacaccattgtcacgcccctgcgccacgcccacaccacgccccttcctgacctgccattcttccctccagcctcagctacatcatcgggaaggacacttgggtggagcactggcccgaggaggacgaatgccaagacgaagagaaccagaaacaatgccaggacctcggcgccttcaccgagagcatggttgtctttgggtgccccaactgaccacacccccattccccc

SEQ ID NO: 121892 - DNA, 576 bp, Homo sapiens
  Payload ID: 3886
  Gene Symbol: C3
  Gene Name: complement component 3
  ENST ID: ENST00000596548
  CDS Start-End: 1-576
atcacccaccgtatccactgggaatctgccagcctcctgcgatcagaagagaccaaggaaaatgagggtttcacagtcacagctgaaggaaaaggccaaggcaccttgtcggtggtgacaatgtaccatgctaaggccaaagatcaactcacctgtaataaattcgacctcaaggtcaccataaaaccagcaccggaaacaggtataccctctcccatctttctctcttctgtgtttctagaaaagaggcctcaggatgccaagaacactatgatccttgagatctgtaccaggtaccggggagaccaggatgccactatgtctatattggacatatccatgatgactggctttgctccagacacagatgacctgaagcagctggccaatggtgttgacagatacatctccaagtatgagctggacaaagccttctccgataggaacaccctcatcatctacctggacaaggtctcacactctgaggatgactgtctagctttcaaagttcaccaatactttaatgtagagcttatccagcctggagcagtcaaggtctacgcctattacaacctg

SEQ ID NO: 121893 - DNA, 303 bp, Homo sapiens
  Payload ID: 3886
  Gene Symbol: C3
  Gene Name: complement component 3
  ENST ID: ENST00000601008
  CDS Start-End: 1-303
aacaacgagaaagacatggccctcacggcctttgttctcatctcgctgcaggaggctaaagatatttgcgaggagcaggtcaacagcctgccaggcagcatcactaaagcaggagacttccttgaagccaactacatgaacctacagagatcctacactgtggccattgctggctatgctctggcccagatgggcaggctgaaggggcctcttcttaacaaatttctgaccacagccaaagacgaagagaaccagaaacaatgccaggacctcggcgccttcaccgagagcatggttgtcttt

SEQ ID NO: 121894 - DNA, 708 bp, Homo sapiens
  Payload ID: 3886
  Gene Symbol: C3
  Gene Name: complement component 3
  ENST ID: ENST00000600744
  CDS Start-End: 399-708
agggcctgcgctgctgtgggagcgagggtctctctctgtcacccaggctggagtgcagtggtgcaatctcagctcactgcaacctctgcctcccggcttcaagcgattctcctgcctcagcctcctgagtagctgggattacaggcacccaccaccacgcctggctaatttttgtactttcagtaaagacggggtttcaccatgttggccaggctggtctccaactcctggcctcaagtgatctgcctgcctcggcctcccaaagtgctgggattacagacgtgagccactgcgcctggcaaggggatgcagtttcaaaagctgaaccccaattctggagagcaagcaggtactctatcatcacccccaacatcttgcggctggagagcgaggagaccatggtgctggaggcccacgacgcgcaaggggatgttccagtcactgttactgtccacgacttcccaggcaaaaaactagtgctgtccagtgagaagactgtgctgacccctgccaccaaccacatgggcaacgtcaccttcacgatcccagccaacagggagttcaagtcagaaaaggggcgcaacaagttcgtgaccgtgcaggccaccttcgggacccaagtggtggagaaggtggtgctggtcagcctgcagagcgggtacctcttcatccagacagacaagaccatctacacccctggctccacag

SEQ ID NO: 121895 - DNA, 2088 bp, Homo sapiens
  Payload ID: 3887
  Gene Symbol: C3AR1
  Gene Name: complement component 3a receptor 1
  Uniprot ID: Q16581
  ENST ID: ENST00000307637
  CDS Start-End: 205-1653
ctgtgaggtcagatagtggtctagagcataagacttaacttattgccggaaacagagagagaacagaagaagagaaagctcagcaaattttcttgccatacttcatgacttcactgtggctaagtgtggggaccagacaggactcgtggagacatccaggtgctgaagccttcagctactgtctcagttttttgaagtttagcaatggcgtctttctctgctgagaccaattcaactgacctactctcacagccatggaatgagcccccagtaattctctccatggtcattctcagccttacttttttactgggattgccaggcaatgggctggtgctgtgggtggctggcctgaagatgcagcggacagtgaacacaatttggttcctccacctcaccttggcggacctcctctgctgcctctccttgcccttctcgctggctcacttggctctccagggacagtggccctacggcaggttcctatgcaagctcatcccctccatcattgtcctcaacatgtttgccagtgtcttcctgcttactgccattagcctggatcgctgtcttgtggtattcaagccaatctggtgtcagaatcatcgcaatgtagggatggcctgctctatctgtggatgtatctgggtggtggcttttgtgatgtgcattcctgtgttcgtgtaccgggaaatcttcactacagacaaccataatagatgtggctacaaatttggtctctccagctcattagattatccagacttttatggagatccactagaaaacaggtctcttgaaaacattgttcagccgcctggagaaatgaatgataggttagatccttcctctttccaaacaaatgatcatccttggacagtccccactgtcttccaacctcaaacatttcaaagaccttctgcagattcactccctaggggttctgctaggttaacaagtcaaaatctgtattctaatgtatttaaacctgctgatgtggtctcacctaaaatccccagtgggtttcctattgaagatcacgaaaccagcccactggataactctgatgcttttctctctactcatttaaagctgttccctagcgcttctagcaattccttctacgagtctgagctaccacaaggtttccaggattattacaatttaggccaattcacagatgacgatcaagtgccaacacccctcgtggcaataacgatcactaggctagtggtgggtttcctgctgccctctgttatcatgatagcctgttacagcttcattgtcttccgaatgcaaaggggccgcttcgccaagtctcagagcaaaacctttcgagtggccgtggtggtggtggctgtctttcttgtctgctggactccataccacatttttggagtcctgtcattgcttactgacccagaaactcccttggggaaaactctgatgtcctgggatcatgtatgcattgctctagcatctgccaatagttgctttaatcccttcctttatgccctcttggggaaagattttaggaagaaagcaaggcagtccattcagggaattctggaggcagccttcagtgaggagctcacacgttccacccactgtccctcaaacaatgtcatttcagaaagaaatagtacaactgtgtgaaaatgtggagcagccaacaagcaggggctcttaggcaatcacatagtgaaagtttataagaggatgaagtgatatggtgagcagcggacttcaaaaactgtcaaagaatcaatccagcggttctcaaacggtacacagactattgacatcagcatcacctagaaacttgttagaaatgcaaattctcaagccgcatcccagacttgctgaatcggaatctctgggggttgggacccagcaagggcacttaacaaaccctcgtttctgattaatgctaaatgtaagaatcattgtaaacattagttctatttctatcccaaactaagctatgtgaaataagagaagctactttgtttttaaatgatgttgaatatttgtcgatatttccatcattaaatttttccttagcattgtctaagtcttccagattccatt

SEQ ID NO: 121896 - DNA, 567 bp, Homo sapiens
  Payload ID: 3887
  Gene Symbol: C3AR1
  Gene Name: complement component 3a receptor 1
  ENST ID: ENST00000546241
  CDS Start-End: 128-567
agacaggactcgtggagacatccaggtgctgaagccttcagctactgtctcagttttttggtaagaaaacctagacctacctgatgacttgtgcttagcctgttttgctcattatagaagtttagcaatggcgtctttctctgctgagaccaattcaactgacctactctcacagccatggaatgagcccccagtaattctctccatggtcattctcagccttacttttttactgggattgccaggcaatgggctggtgctgtgggtggctggcctgaagatgcagcggacagtgaacacaatttggttcctccacctcaccttggcggacctcctctgctgcctctccttgcccttctcgctggctcacttggctctccagggacagtggccctacggcaggttcctatgcaagctcatcccctccatcattgtcctcaacatgtttgccagtgtcttcctgcttactgccattagcctggatcgctgtcttgtggtattcaagccaatctggtgtcagaatcatcgcaatgtagggatggcctgctctatctgtggatgtatctg

SEQ ID NO: 121897 - DNA, 2243 bp, Homo sapiens
  Payload ID: 3888
  Gene Symbol: C4BPA
  Gene Name: complement component 4 binding protein, alpha
  Uniprot ID: P04003
  ENST ID: ENST00000367070
  CDS Start-End: 195-1988
tgaaattcagggactctttggtggagcaattaccagtcaacttcagggtattatgataaactctgatctggggaggaaccaggactacatagatcaaggcagttttcttctttgagaaactatcccagatatcatcatagagtcttctgctcttcctcaactaccaaagaaaaacatcagcgaagcagcaggccatgcaccccccaaaaactccatctggggctcttcatagaaaaaggaaaatggcagcctggcccttctccaggctgtggaaagtctctgatccaattctcttccaaatgaccttgatcgctgctctgttgcctgctgttcttggcaattgtggtcctccacccactttatcatttgctgccccgatggatattacgttgactgagacacgcttcaaaactggaactactctgaaatacacctgcctccctggctacgtcagatcccattcaactcagacgcttacctgtaattctgatggcgaatgggtgtataacaccttctgtatctacaaacgatgcagacacccaggagagttacgtaatgggcaagtagagattaagacagatttatcttttggatcacaaatagaattcagctgttcagaaggatttttcttaattggctcaaccactagtcgttgtgaagtccaagatagaggagttggctggagtcatcctctcccacaatgtgaaattgtcaagtgtaagcctcctccagacatcaggaatggaaggcacagcggtgaagaaaatttctacgcatacggcttttctgtcacctacagctgtgacccccgcttctcactcttgggccatgcctccatttcttgcactgtggagaatgaaacaataggtgtttggagaccaagccctcctacctgtgaaaaaatcacctgtcgcaagccagatgtttcacatggggaaatggtctctggatttggacccatctataattacaaagacactattgtgtttaagtgccaaaaaggttttgttctcagaggcagcagtgtaattcattgtgatgctgatagcaaatggaatccttctcctcctgcttgtgagcccaatagttgtattaatttaccagacattccacatgcttcctgggaaacatatcctaggccgacaaaagaggatgtgtatgttgttgggactgtgttaaggtaccgctgtcatcctggctacaaacccactacagatgagcctacgactgtgatttgtcagaaaaatttgagatggaccccataccaaggatgtgaggcgttatgttgccctgaaccaaagctaaataatggtgaaatcactcaacacaggaaaagtcgtcctgccaatcactgtgtttatttctatggagatgagatttcattttcatgtcatgagaccagtaggttttcagctatatgccaaggagatggcacgtggagtccccgaacaccatcatgtggagacatttgcaattttcctcctaaaattgcccatgggcattataaacaatctagttcatacagctttttcaaagaagagattatatatgaatgtgataaaggctacattctggtcggacaggcgaaactctcctgcagttattcacactggtcagctccagcccctcaatgtaaagctctgtgtcggaaaccagaattagtgaatggaaggttgtctgtggataaggatcagtatgttgagcctgaaaatgtcaccatccaatgtgattctggctatggtgtggttggtccccaaagtatcacttgctctgggaacagaacctggtacccagaggtgcccaagtgtgagtgggagacccccgaaggctgtgaacaagtgctcacaggcaaaagactcatgcagtgtctcccaaacccagaggatgtgaaaatggccctggaggtatataagctgtctctggaaattgaacaactggaactacagagagacagcgcaagacaatccactttggataaagaactataatttttctcaaaagaaggaggaaaaggtgtcttgctggcttgcctcttgcaattcaatacagatcagtttagcaaatctactgtcaatttggcagtgatattcatcataataaatatctagaaatgataatttgctaaagtttagtgctttgagattgtgaaattattaatcatcctctgtgtggctcatgtttttgcttttcaacacacaaagcacaaattttttttcgattaaaaatgtatgtataaaaaacta

SEQ ID NO: 121898 - DNA, 552 bp, Homo sapiens
  Payload ID: 3888
  Gene Symbol: C4BPA
  Gene Name: complement component 4 binding protein, alpha
  ENST ID: ENST00000424088
  CDS Start-End: 79-435
aaactatcccagatatcatcatagagtcttctgctcttcctcaactaccaaagaaaaacatcagcgaagcagcaggccatgcaccccccaaaaactccatctggggctcttcatagaaaaaggaaaatggcagcctggcccttctccaggctgtggaaagtctctgatccaattctcttccaaatgaccttgatcgctgctctgttgcctgctgttcttggcaattgtggtcctccacccactttatcatttgctgccccgatggatattacgttgactgagacacgcttcaaaactggaactactctgaaatacacctgcctccctggctacgtcagatcccattcaactcagacgcttacctgtaattctgatggcgaatgggtgtataacaccttctgtatcttagatacagggtttcaccatattggctagactggtctcaaactcctgacctcaagtgatctgcctgcctcggcttcccaaagtgctgatattacagacaaacgatgcagacacccaggagagttacgtaatgggcaagtagagatt

SEQ ID NO: 121899 - DNA, 708 bp, Homo sapiens
  Payload ID: 3888
  Gene Symbol: C4BPA
  Gene Name: complement component 4 binding protein, alpha
  ENST ID: ENST00000421786
  CDS Start-End: 253-708
agggtattatgataaactctgatctggggaggaaccaggactacatagatcaaggcagttttcttctttgagaaactatcccagatatcatcatagagtcttctgctcttcctcaactaccaaaggctgtcatttccttgaagacatggatcccataacatttattctagtgctttatgacaagttggaattcaatgactatttattaaattgagttctttcagcagaaaaacatcagcgaagcagcaggccatgcaccccccaaaaactccatctggggctcttcatagaaaaaggaaaatggcagcctggcccttctccaggctgtggaaagtctctgatccaattctcttccaaatgaccttgatcgctgctctgttgcctgctgttcttggcaattgtggtcctccacccactttatcatttgctgccccgatggatattacgttgactgagacacgcttcaaaactggaactactctgaaatacacctgcctccctggctacgtcagatcccattcaactcagacgcttacctgtaattctgatggcgaatgggtgtataacaccttctgtatctacaaacgatgcagacacccaggagagttacgtaatgggcaagtagagattaagacagatttatcttttggatcacaaatagaattcagctgttcagaaggatttttcttaattggctcaaccactagt

SEQ ID NO: 121900 - DNA, 1117 bp, Homo sapiens
  Payload ID: 3889
  Gene Symbol: C4BPB
  Gene Name: complement component 4 binding protein, beta
  Uniprot ID: P20851
  ENST ID: ENST00000243611
  CDS Start-End: 295-1053
cattcccagaaaccaggaaatttctgaaactgagttttaaacctggcaactcttttaccatccctttgtatttttgcagttcctccctataccagcttccttacagctgttctgatttcctgtcgtaagattttttcttttcattttctccagggagggtaaatcaatataacctcttctctagagaggaggtggttaggttggtcttaagcagtgttagaagatctattttttttcaaaccaggtgtctgagctgggtgaattccagcctggggagaggactttgatcaccagatgtttttttggtgtgcgtgctgtcttatggttgcgtggcgagtttctgcttcagatgcagagcactgtccagagcttcctccagtggacaatagcatatttgtcgcaaaggaggtggaaggacagattctggggacttacgtttgtatcaagggctaccacctggtaggaaagaagacccttttttgcaatgcctctaaggagtgggataacaccactactgagtgccgcttgggccactgtcctgatcctgtgctggtgaatggagagttcagttcttcagggcctgtgaatgtaagtgacaaaatcacgtttatgtgcaatgaccactacatcctcaagggcagcaatcggagccagtgtctagaggaccacacctgggcacctccctttcccatctgcaaaagtagggactgtgaccctcctgggaatccagttcatggctattttgaaggaaataacttcaccttaggatccaccattagttattactgtgaagacaggtactacttagtgggcgtgcaggagcagcaatgcgttgatggggagtggagcagtgcacttccagtctgcaagttgatccaggaagctcccaaaccagagtgtgagaaggcacttcttgcctttcaggagagtaagaacctctgcgaagccatggagaactttatgcaacaattaaaggaaagtggcatgacaatggaggagctaaaatattctctggagctgaagaaagctgagttgaaggcaaaattgttgtaacactacagctgagcagatgtaatagaaataaacctatgaataaattttcttcttggttctgaaa

SEQ ID NO: 121901 - DNA, 1113 bp, Homo sapiens
  Payload ID: 3889
  Gene Symbol: C4BPB
  Gene Name: complement component 4 binding protein, beta
  Uniprot ID: P20851
  ENST ID: ENST00000367076
  CDS Start-End: 294-1049
attcccagaaaccaggaaatttctgaaactgagttttaaacctggcaactcttttaccatccctttgtatttttgcagttcctccctataccagcttccttacagctgttctgatttcctgtcgtaagattttttcttttcattttctccagggagggtaaatcaatataacctcttctctagagaggaggtggttaggttggtcttaagcagtgttagaagatctattttttttcaaaccaggtgtctgagctgggtgaattccagcctggggagaggactttgatcaccagatgtttttttggtgtgcgtgctgtcttatggttgcgtggcgagtttctgcttcagatgagcactgtccagagcttcctccagtggacaatagcatatttgtcgcaaaggaggtggaaggacagattctggggacttacgtttgtatcaagggctaccacctggtaggaaagaagacccttttttgcaatgcctctaaggagtgggataacaccactactgagtgccgcttgggccactgtcctgatcctgtgctggtgaatggagagttcagttcttcagggcctgtgaatgtaagtgacaaaatcacgtttatgtgcaatgaccactacatcctcaagggcagcaatcggagccagtgtctagaggaccacacctgggcacctccctttcccatctgcaaaagtagggactgtgaccctcctgggaatccagttcatggctattttgaaggaaataacttcaccttaggatccaccattagttattactgtgaagacaggtactacttagtgggcgtgcaggagcagcaatgcgttgatggggagtggagcagtgcacttccagtctgcaagttgatccaggaagctcccaaaccagagtgtgagaaggcacttcttgcctttcaggagagtaagaacctctgcgaagccatggagaactttatgcaacaattaaaggaaagtggcatgacaatggaggagctaaaatattctctggagctgaagaaagctgagttgaaggcaaaattgttgtaacactacagctgagcagatgtaatagaaataaacctatgaataaattttcttcttggttctgaaa

SEQ ID NO: 121902 - DNA, 978 bp, Homo sapiens
  Payload ID: 3889
  Gene Symbol: C4BPB
  Gene Name: complement component 4 binding protein, beta
  Uniprot ID: P20851
  ENST ID: ENST00000367078
  CDS Start-End: 156-914
aagcgagaacaatgtgtcactgcaggactttggagctctcagctttggagtcagttaagaccagttccttgctgggaagccctaactctggagggacagagacaggtgtctgagctgggtgaattccagcctggggagaggactttgatcaccagatgtttttttggtgtgcgtgctgtcttatggttgcgtggcgagtttctgcttcagatgcagagcactgtccagagcttcctccagtggacaatagcatatttgtcgcaaaggaggtggaaggacagattctggggacttacgtttgtatcaagggctaccacctggtaggaaagaagacccttttttgcaatgcctctaaggagtgggataacaccactactgagtgccgcttgggccactgtcctgatcctgtgctggtgaatggagagttcagttcttcagggcctgtgaatgtaagtgacaaaatcacgtttatgtgcaatgaccactacatcctcaagggcagcaatcggagccagtgtctagaggaccacacctgggcacctccctttcccatctgcaaaagtagggactgtgaccctcctgggaatccagttcatggctattttgaaggaaataacttcaccttaggatccaccattagttattactgtgaagacaggtactacttagtgggcgtgcaggagcagcaatgcgttgatggggagtggagcagtgcacttccagtctgcaagttgatccaggaagctcccaaaccagagtgtgagaaggcacttcttgcctttcaggagagtaagaacctctgcgaagccatggagaactttatgcaacaattaaaggaaagtggcatgacaatggaggagctaaaatattctctggagctgaagaaagctgagttgaaggcaaaattgttgtaacactacagctgagcagatgtaatagaaataaacctatgaataaattttcttcttggttctgaaa

SEQ ID NO: 121903 - DNA, 949 bp, Homo sapiens
  Payload ID: 3889
  Gene Symbol: C4BPB
  Gene Name: complement component 4 binding protein, beta
  Uniprot ID: P20851
  ENST ID: ENST00000391923
  CDS Start-End: 130-888
gcaactcttttaccatccctttgtatttttgcagttcctccctataccagcttccttacagctgttctgatttcctgtcgtgtctgagctgggtgaattccagcctggggagaggactttgatcaccagatgtttttttggtgtgcgtgctgtcttatggttgcgtggcgagtttctgcttcagatgcagagcactgtccagagcttcctccagtggacaatagcatatttgtcgcaaaggaggtggaaggacagattctggggacttacgtttgtatcaagggctaccacctggtaggaaagaagacccttttttgcaatgcctctaaggagtgggataacaccactactgagtgccgcttgggccactgtcctgatcctgtgctggtgaatggagagttcagttcttcagggcctgtgaatgtaagtgacaaaatcacgtttatgtgcaatgaccactacatcctcaagggcagcaatcggagccagtgtctagaggaccacacctgggcacctccctttcccatctgcaaaagtagggactgtgaccctcctgggaatccagttcatggctattttgaaggaaataacttcaccttaggatccaccattagttattactgtgaagacaggtactacttagtgggcgtgcaggagcagcaatgcgttgatggggagtggagcagtgcacttccagtctgcaagttgatccaggaagctcccaaaccagagtgtgagaaggcacttcttgcctttcaggagagtaagaacctctgcgaagccatggagaactttatgcaacaattaaaggaaagtggcatgacaatggaggagctaaaatattctctggagctgaagaaagctgagttgaaggcaaaattgttgtaacactacagctgagcagatgtaatagaaataaacctatgaataaattttcttcttggttctg

SEQ ID NO: 121904 - DNA, 742 bp, Homo sapiens
  Payload ID: 3889
  Gene Symbol: C4BPB
  Gene Name: complement component 4 binding protein, beta
  ENST ID: ENST00000452902
  CDS Start-End: 200-742
caaaaagactggtcaactggatttgcattcccagaaaccaggaaatttctgaaactgagttttaaacctggcaactcttttaccatccctttgtatttttgcagttcctccctataccagcttccttacagctgttctgatttcctgtcgtgtctgagctgggtgaattccagcctggggagaggactttgatcaccagatgtttttttggtgtgcgtgctgtcttatggttgcgtggcgagtttctgcttcagatgcagagcactgtccagagcttcctccagtggacaatagcatatttgtcgcaaaggaggtggaaggacagattctggggacttacgtttgtatcaagggctaccacctggtaggaaagaagacccttttttgcaatgcctctaaggagtgggataacaccactactgagtgccgcttgggccactgtcctgatcctgtgctggtgaatggagagttcagttcttcagggcctgtgaatgtaagtgacaaaatcacgtttatgtgcaatgaccactacatcctcaagggcagcaatcggagccagtgtctagaggaccacacctgggcacctccctttcccatctgcaaaagtagggactgtgaccctcctgggaatccagttcatggctattttgaaggaaataacttcaccttaggatccaccattagttattactgtgaagacaggtactacttagtgggcgtgcaggagcagcaatgcgttgat

SEQ ID NO: 121905 - DNA, 5460 bp, Homo sapiens
  Payload ID: 3890
  Gene Symbol: C4A
  Gene Name: complement component 4A (Rodgers blood group)
  ENST ID: ENST00000375295
  CDS Start-End: 85-5319
agagtcaactctgccccgaggcctagcttggccagaaggtagcagacagacagacggatctaacctctcttggatcctccagccatgaggctgctctgggggctgatctgggcatccagcttcttcaccttatctctgcagaagcccaggttgctcttgttctctccttctgtggttcatctgggggtccccctatcggtgggggtgcagctccaggatgtgccccgaggacaggtagtgaaaggatcagtgttcctgagaaacccatctcgtaataatgtcccctgctccccaaaggtggacttcacccttagctcagaaagagacttcgcactcctcagtctccaggtgcccttgaaagatgcgaagagctgtggcctccatcaactcctcagaggccctgaggtccagctggtggcccattcgccatggctaaaggactctctgtccagaacgacaaacatccagggtatcaacctgctcttctcctctcgccgggggcacctctttttgcagacggaccagcccatttacaaccctggccagcgggttcggtaccgggtctttgctctggatcagaagatgcgcccgagcactgacaccatcacagtcatggtggagaactctcacggcctccgcgtgcggaagaaggaggtgtacatgccctcgtccatcttccaggatgactttgtgatcccagacatctcagagccagggacctggaagatctcagcccgattctcagatggcctggaatccaacagcagcacccagtttgaggtgaagaaatatgtccttcccaactttgaggtgaagatcacccctggaaagccctacatcctgacggtgccaggccatcttgatgaaatgcagttagacatccaggccaggtacatctatgggaagccagtgcagggggtggcatatgtgcgctttgggctcctagatgaggatggtaagaagactttctttcgggggctggagagtcagaccaagctggtgaatggacagagccacatttccctctcaaaggcagagttccaggacgccctggagaagctgaatatgggcattactgacctccaggggctgcgcctctacgttgctgcagccatcattgagtatccaggtggggagatggaggaggcagagctcacatcctggtattttgtgtcatctcccttctccttggatcttagcaagaccaagcgacaccttgtgcctggggcccccttcctgctgcaggccttggtccgtgagatgtcaggctccccagcttctggcattcctgtcaaagtttctgccacggtgtcttctcctgggtctgttcctgaagtccaggacattcagcaaaacacagacgggagcggccaagtcagcattccaataattatccctcagaccatctcagagctgcagctctcagtatctgcaggctccccacatccagcgatagccaggctcactgtggcagccccaccttcaggaggccccgggtttctgtctattgagtggccggattctcgacctcctcgtgttggggacactctgaacctgaacttgcgagccgtgggcagtggggccaccttttctcattactactacatgatcctatcccgagggcagatcgtgttcatgaatcgagagcccaagaggaccctgacctcggtctcggtgtttgtggaccatcacctggcaccctccttctactttgtggccttctactaccatggagaccacccagtggccaactccctgcgagtggatgtccaggctggggcctgcgagggcaagctggagctcagcgtggacggtgccaagcagtaccggaacggggagtccgtgaagctccacttagaaaccgactccctagccctggtggcgctgggagccttggacacagctctgtatgctgcaggcagcaagtcccacaagcccctcaacatgggcaaggtctttgaagctatgaacagctatgacctcggctgtggtcctgggggtggggacagtgcccttcaggtgttccaggcagcgggcctggccttttctgatggagaccagtggaccttatccagaaagagactaagctgtcccaaggagaagacaacccggaaaaagagaaacgtgaacttccaaaaggcgattaatgagaaattgggtcagtatgcttccccgacagccaagcgctgctgccaggatggggtgacacgtctgcccatgatgcgttcctgcgagcagcgggcagcccgcgtgcagcagccggactgccgggagcccttcctgtcctgctgccaatttgctgagagtctgcgcaagaagagcagggacaagggccaggcgggcctccaacgagccctggagatcctgcaggaggaggacctgattgatgaggatgacattcccgtgcgcagcttcttcccagagaactggctctggagagtggaaacagtggaccgctttcaaatattgacactgtggctccccgactctctgaccacgtgggagatccatggcctgagcctgtccaaaaccaaaggcctatgtgtggccaccccagtccagctccgggtgttccgcgagttccacctgcacctccgcctgcccatgtctgtccgccgctttgagcagctggagctgcggcctgtcctctataactacctggataaaaacctgactgtgagcgtccacgtgtccccagtggaggggctgtgcctggctgggggcggagggctggcccagcaggtgctggtgcctgcgggctctgcccggcctgttgccttctctgtggtgcccacggcagccgccgctgtgtctctgaaggtggtggctcgagggtccttcgaattccctgtgggagatgcggtgtccaaggttctgcagattgagaaggaaggggccatccatagagaggagctggtctatgaactcaaccccttggaccaccgaggccggaccttggaaatacctggcaactctgatcccaatatgatccctgatggggactttaacagctacgtcagggttacagcctcagatccattggacactttaggctctgagggggccttgtcaccaggaggcgtggcctccctcttgaggcttcctcgaggctgtggggagcaaaccatgatctacttggctccgacactggctgcttcccgctacctggacaagacagagcagtggagcacactgcctcccgagaccaaggaccacgccgtggatctgatccagaaaggctacatgcggatccagcagtttcggaaggcggatggttcctatgcggcttggttgtcacgggacagcagcacctggctcacagcctttgtgttgaaggtcctgagtttggcccaggagcaggtaggaggctcgcctgagaaactgcaggagacatctaactggcttctgtcccagcagcaggctgacggctcgttccaggacccctgtccagtgttagacaggagcatgcaggggggtttggtgggcaatgatgagactgtggcactcacagcctttgtgaccatcgcccttcatcatgggctggccgtcttccaggatgagggtgcagagccattgaagcagagagtggaagcctccatctcaaaggcaaactcatttttgggggagaaagcaagtgctgggctcctgggtgcccacgcagctgccatcacggcctatgccctgacactgaccaaggcgcctgtggacctgctcggtgttgcccacaacaacctcatggcaatggcccaggagactggagataacctgtactggggctcagtcactggttctcagagcaatgccgtgtcgcccaccccggctcctcgcaacccatccgaccccatgccccaggccccagccctgtggattgaaaccacagcctacgccctgctgcacctcctgcttcacgagggcaaagcagagatggcagaccaggctgcggcctggctcacccgtcagggcagcttccaagggggattccgcagtacccaagacacggtgattgccctggatgccctgtctgcctactggattgcctcccacaccactgaggagaggggtctcaatgtgactctcagctccacaggccggaatgggttcaagtcccacgcgctgcagctgaacaaccgccagattcgcggcctggaggaggagctgcagttttccttgggcagcaagatcaatgtgaaggtgggaggaaacagcaaaggaaccctgaaggtccttcgtacctacaatgtcctggacatgaagaacacgacctgccaggacctacagatagaagtgacagtcaaaggccacgtcgagtacacgatggaagcaaacgaggactatgaggactatgagtacgatgagcttccagccaaggatgacccagatgcccctctgcagcccgtgacacccctgcagctgtttgagggtcggaggaaccgccgcaggagggaggcgcccaaggtggtggaggagcaggagtccagggtgcactacaccgtgtgcatctggcggaacggcaaggtggggctgtctggcatggccatcgcggacgtcaccctcctgagtggattccacgccctgcgtgctgacctggagaagctgacctccctctctgaccgttacgtgagtcactttgagaccgaggggccccacgtcctgctgtattttgactcggtccccacctcccgggagtgcgtgggctttgaggctgtgcaggaagtgccggtggggctggtgcagccggccagcgcaaccctgtacgactactacaaccccgagcgcagatgttctgtgttttacggggcaccaagtaagagcagactcttggccaccttgtgttctgctgaagtctgccagtgtgctgaggggaagtgccctcgccagcgtcgcgccctggagcggggtctgcaggacgaggatggctacaggatgaagtttgcctgctactacccccgtgtggagtacggcttccaggttaaggttctccgagaagacagcagagctgctttccgcctctttgagaccaagatcacccaagtcctgcacttcaccaaggatgtcaaggccgctgctaatcagatgcgcaacttcctggttcgagcctcctgccgccttcgcttggaacctgggaaagaatatttgatcatgggtctggatggggccacctatgacctcgagggacacccccagtacctgctggactcgaatagctggatcgaggagatgccctctgaacgcctgtgccggagcacccgccagcgggcagcctgtgcccagctcaacgacttcctccaggagtatggcactcaggggtgccaggtgtgagggctgccctcccacctccactgggaggaacctgaacctgggaaccatgaagctggaagcactgctgtgtccgctttcatgaacacagcctgggaccagggcatattaaaggcttttggcagcaaagtgtcagtgttggca

SEQ ID NO: 121906 - DNA, 5460 bp, Homo sapiens
  Payload ID: 3890
  Gene Symbol: C4A
  Gene Name: complement component 4A (Rodgers blood group)
  Uniprot ID: P0C0L4
  ENST ID: ENST00000383325
  CDS Start-End: 85-5319
agagtcaactctgccccgaggcctagcttggccagaaggtagcagacagacagacggatctaacctctcttggatcctccagccatgaggctgctctgggggctgatctgggcatccagcttcttcaccttatctctgcagaagcccaggttgctcttgttctctccttctgtggttcatctgggggtccccctatcggtgggggtgcagctccaggatgtgccccgaggacaggtagtgaaaggatcagtgttcctgagaaacccatctcgtaataatgtcccctgctccccaaaggtggacttcacccttagctcagaaagagacttcgcactcctcagtctccaggtgcccttgaaagatgcgaagagctgtggcctccatcaactcctcagaggccctgaggtccagctggtggcccattcgccatggctaaaggactctctgtccagaacgacaaacatccagggtatcaacctgctcttctcctctcgccgggggcacctctttttgcagacggaccagcccatttacaaccctggccagcgggttcggtaccgggtctttgctctggatcagaagatgcgcccgagcactgacaccatcacagtcatggtggagaactctcacggcctccgcgtgcggaagaaggaggtgtacatgccctcgtccatcttccaggatgactttgtgatcccagacatctcagagccagggacctggaagatctcagcccgattctcagatggcctggaatccaacagcagcacccagtttgaggtgaagaaatatgtccttcccaactttgaggtgaagatcacccctggaaagccctacatcctgacggtgccaggccatcttgatgaaatgcagttagacatccaggccaggtacatctatgggaagccagtgcagggggtggcatatgtgcgctttgggctcctagatgaggatggtaagaagactttctttcgggggctggagagtcagaccaagctggtgaatggacagagccacatttccctctcaaaggcagagttccaggacgccctggagaagctgaatatgggcattactgacctccaggggctgcgcctctacgttgctgcagccatcattgagtctccaggtggggagatggaggaggcagagctcacatcctggtattttgtgtcatctcccttctccttggatcttagcaagaccaagcgacaccttgtgcctggggcccccttcctgctgcaggccttggtccgtgagatgtcaggctccccagcttctggcattcctgtcaaagtttctgccacggtgtcttctcctgggtctgttcctgaagtccaggacattcagcaaaacacagacgggagcggccaagtcagcattccaataattatccctcagaccatctcagagctgcagctctcagtatctgcaggctccccacatccagcgatagccaggctcactgtggcagccccaccttcaggaggccccgggtttctgtctattgagcggccggattctcgacctcctcgtgttggggacactctgaacctgaacttgcgagccgtgggcagtggggccaccttttctcattactactacatgatcctatcccgagggcagatcgtgttcatgaatcgagagcccaagaggaccctgacctcggtctcggtgtttgtggaccatcacctggcaccctccttctactttgtggccttctactaccatggagaccacccagtggccaactccctgcgagtggatgtccaggctggggcctgcgagggcaagctggagctcagcgtggacggtgccaagcagtaccggaacggggagtccgtgaagctccacttagaaaccgactccctagccctggtggcgctgggagccttggacacagctctgtatgctgcaggcagcaagtcccacaagcccctcaacatgggcaaggtctttgaagctatgaacagctatgacctcggctgtggtcctgggggtggggacagtgcccttcaggtgttccaggcagcgggcctggccttttctgatggagaccagtggaccttatccagaaagagactaagctgtcccaaggagaagacaacccggaaaaagagaaacgtgaacttccaaaaggcgattaatgagaaattgggtcagtatgcttccccgacagccaagcgctgctgccaggatggggtgacacgtctgcccatgatgcgttcctgcgagcagcgggcagcccgcgtgcagcagccggactgccgggagcccttcctgtcctgctgccaatttgctgagagtctgcgcaagaagagcagggacaagggccaggcgggcctccaacgagccctggagatcctgcaggaggaggacctgattgatgaggatgacattcccgtgcgcagcttcttcccagagaactggctctggagagtggaaacagtggaccgctttcaaatattgacactgtggctccccgactctctgaccacgtgggagatccatggcctgagcctgtccaaaaccaaaggcctatgtgtggccaccccagtccagctccgggtgttccgcgagttccacctgcacctccgcctgcccatgtctgtccgccgctttgagcagctggagctgcggcctgtcctctataactacctggataaaaacctgactgtgagcgtccacgtgtccccagtggaggggctgtgcctggctgggggcggagggctggcccagcaggtgctggtgcctgcgggctctgcccggcctgttgccttctctgtggtgcccacggcagccgccgctgtgtctctgaaggtggtggctcgagggtccttcgaattccctgtgggagatgcggtgtccaaggttctgcagattgagaaggaaggggccatccatagagaggagctggtctatgaactcaaccccttggaccaccgaggccggaccttggaaatacctggcaactctgatcccaatatgatccctgatggggactttaacagctacgtcagggttacagcctcagatccattggacactttaggctctgagggggccttgtcaccaggaggcgtggcctccctcttgaggcttcctcgaggctgtggggagcaaaccatgatctacttggctccgacactggctgcttcccgctacctggacaagacagagcagtggagcacactgcctcccgagaccaaggaccacgccgtggatctgatccagaaaggctacatgcggatccagcagtttcggaaggcggatggttcctatgcggcttggttgtcacgggacagcagcacctggctcacagcctttgtgttgaaggtcctgagtttggcccaggagcaggtaggaggctcgcctgagaaactgcaggagacatctaactggcttctgtcccagcagcaggctgacggctcgttccaggacccctgtccagtgttagacaggagcatgcaggggggtttggtgggcaatgatgagactgtggcactcacagcctttgtgaccatcgcccttcatcatgggctggccgtcttccaggatgagggtgcagagccattgaagcagagagtggaagcctccatctcaaaggcaagctcatttttgggggagaaagcaagtgctgggctcctgggtgcccacgcagctgccatcacggcctatgccctgacactgaccaaggcgcctgtggacctgctcggtgttgcccacaacaacctcatggcaatggcccaggagactggagataacctgtactggggctcagtcactggttctcagagcaatgccgtgtcgcccaccccggctcctcgcaacccatccgaccccatgccccaggccccagccctgtggattgaaaccacagcctacgccctgctgcacctcctgcttcacgagggcaaagcagagatggcagaccaggctgcggcctggctcacccgtcagggcagcttccaagggggattccgcagtacccaagacacggtgattgccctggatgccctgtctgcctactggattgcctcccacaccactgaggagaggggtctcaatgtgactctcagctccacaggccggaatgggttcaagtcccacgcgctgcagctgaacaaccgccagattcgcggcctggaggaggagctgcagttttccttgggcagcaagatcaatgtgaaggtgggaggaaacagcaaaggaaccctgaaggtccttcgtacctacaatgtcctggacatgaagaacacgacctgccaggacctacagatagaagtgacagtcaaaggccacgtcgagtacacgatggaagcaaacgaggactatgaggactatgagtacgatgagcttccagccaaggatgacccagatgcccctctgcagcccgtgacacccctgcagctgtttgagggtcggaggaaccgccgcaggagggaggcgcccaaggtggtggaggagcaggagtccagggtgcactacaccgtgtgcatctggcggaacggcaaggtggggctgtctggcatggccatcgcggacgtcaccctcctgagtggattccacgccctgcgtgctgacctggagaagctgacctccctctctgaccgttacgtgagtcactttgagaccgaggggccccacgtcctgctgtattttgactcggtccccacctcccgggagtgcgtgggctttgaggctgtgcaggaagtgccggtggggctggtgcagccggccagcgcaaccctgtacgactactacaaccccgagcgcagatgttctgtgttttacggggcaccaagtaagagcagactcttggccaccttgtgttctgctgaagtctgccagtgtgctgaggggaagtgccctcgccagcgtcgcgccctggagcggggtctgcaggacgaggatggctacaggatgaagtttgcctgctactacccccgtgtggagtacggcttccaggttaaggttctccgagaagacagcagagctgctttccgcctctttgagaccaagatcacccaagtcctgcacttcaccaaggatgtcaaggccgctgctaatcagatgcgcaacttcctggttcgagcctcctgccgccttcgcttggaacctgggaaagaatatttgatcatgggtctggatggggccacctatgacctcgagggacacccccagtacctgctggactcgaatagctggatcgaggagatgccctctgaacgcctgtgccggagcacccgccagcgggcagcctgtgcccagctcaacgacttcctccaggagtatggcactcaggggtgccaggtgtgagggctgccctcccacctccgctgggaggaacctgaacctgggaaccatgaagctggaagcactgctgtgtccgctttcatgaacacagcctgggaccagggcatattaaaggcttttggcagcaaagtgtcagtgttggca

SEQ ID NO: 121907 - DNA, 5460 bp, Homo sapiens
  Payload ID: 3890
  Gene Symbol: C4A
  Gene Name: complement component 4A (Rodgers blood group)
  Uniprot ID: P0C0L4
  ENST ID: ENST00000421274
  CDS Start-End: 85-5319
agagtcaactctgccccgaggcctagcttggccagaaggtagcagacagacagacggatctaacctctcttggatcctccagccatgaggctgctctgggggctgatctgggcatccagcttcttcaccttatctctgcagaagcccaggttgctcttgttctctccttctgtggttcatctgggggtccccctatcggtgggggtgcagctccaggatgtgccccgaggacaggtagtgaaaggatcagtgttcctgagaaacccatctcgtaataatgtcccctgctccccaaaggtggacttcacccttagctcagaaagagacttcgcactcctcagtctccaggtgcccttgaaagatgcgaagagctgtggcctccatcaactcctcagaggccctgaggtccagctggtggcccattcgccatggctaaaggactctctgtccagaacgacaaacatccagggtatcaacctgctcttctcctctcgccgggggcacctctttttgcagacggaccagcccatttacaaccctggccagcgggttcggtaccgggtctttgctctggatcagaagatgcgcccgagcactgacaccatcacagtcatggtggagaactctcacggcctccgcgtgcggaagaaggaggtgtacatgccctcgtccatcttccaggatgactttgtgatcccagacatctcagagccagggacctggaagatctcagcccgattctcagatggcctggaatccaacagcagcacccagtttgaggtgaagaaatatgtccttcccaactttgaggtgaagatcacccctggaaagccctacatcctgacggtgccaggccatcttgatgaaatgcagttagacatccaggccaggtacatctatgggaagccagtgcagggggtggcatatgtgcgctttgggctcctagatgaggatggtaagaagactttctttcgggggctggagagtcagaccaagctggtgaatggacagagccacatttccctctcaaaggcagagttccaggacgccctggagaagctgaatatgggcattactgacctccaggggctgcgcctctacgttgctgcagccatcattgagtatccaggtggggagatggaggaggcagagctcacatcctggtattttgtgtcatctcccttctccttggatcttagcaagaccaagcgacaccttgtgcctggggcccccttcctgctgcaggccttggtccgtgagatgtcaggctccccagcttctggcattcctgtcaaagtttctgccacggtgtcttctcctgggtctgttcctgaagtccaggacattcagcaaaacacagacgggagcggccaagtcagcattccaataattatccctcagaccatctcagagctgcagctctcagtatctgcaggctccccacatccagcgatagccaggctcactgtggcagccccaccttcaggaggccccgggtttctgtctattgagcggccggattctcgacctcctcgtgttggggacactctgaacctgaacttgcgagccgtgggcagtggggccaccttttctcattactactacatgatcctatcccgagggcagatcgtgttcatgaatcgagagcccaagaggaccctgacctcggtctcggtgtttgtggaccatcacctggcaccctccttctactttgtggccttctactaccatggagaccacccagtggccaactccctgcgagtggatgtccaggctggggcctgcgagggcaagctggagctcagcgtggacggtgccaagcagtaccggaacggggagtccgtgaagctccacttagaaaccgactccctagccctggtggcgctgggagccttggacacagctctgtatgctgcaggcagcaagtcccacaagcccctcaacatgggcaaggtctttgaagctatgaacagctatgacctcggctgtggtcctgggggtggggacagtgcccttcaggtgttccaggcagcgggcctggccttttctgatggagaccagtggaccttatccagaaagagactaagctgtcccaaggagaagacaacccggaaaaagagaaacgtgaacttccaaaaggcgattaatgagaaattgggtcagtatgcttccccgacagccaagcgctgctgccaggatggggtgacacgtctgcccatgatgcgttcctgcgagcagcgggcagcccgcgtgcagcagccggactgccgggagcccttcctgtcctgctgccaatttgctgagagtctgcgcaagaagagcagggacaagggccaggcgggcctccaacgagccctggagatcctgcaggaggaggacctgattgatgaggatgacattcccgtgcgcagcttcttcccagagaactggctctggagagtggaaacagtggaccgctttcaaatattgacactgtggctccccgactctctgaccacgtgggagatccatggcctgagcctgtccaaaaccaaaggcctatgtgtggccaccccagtccagctccgggtgttccgcgagttccacctgcacctccgcctgcccatgtctgtccgccgctttgagcagctggagctgcggcctgtcctctataactacctggataaaaacctgactgtgagcgtccacgtgtccccagtggaggggctgtgcctggctgggggcggagggctggcccagcaggtgctggtgcctgcgggctctgcccggcctgttgccttctctgtggtgcccacggcagccgccgctgtgtctctgaaggtggtggctcgagggtccttcgaattccctgtgggagatgcggtgtccaaggttctgcagattgagaaggaaggggccatccatagagaggagctggtctatgaactcaaccccttggaccaccgaggccggaccttggaaatacctggcaactctgatcccaatatgatccctgatggggactttaacagctacgtcagggttacagcctcagatccattggacactttaggctctgagggggccttgtcaccaggaggcgtggcctccctcttgaggcttcctcgaggctgtggggagcaaaccatgatctacttggctccgacactggctgcttcccgctacctggacaagacagagcagtggagcacactgcctcccgagaccaaggaccacgccgtggatctgatccagaaaggctacatgcggatccagcagtttcggaaggcggatggttcctatgcggcttggttgtcacgggacagcagcacctggctcacagcctttgtgttgaaggtcctgagtttggcccaggagcaggtaggaggctcgcctgagaaactgcaggagacatctaactggcttctgtcccagcagcaggctgacggctcgttccaggacccctgtccagtgttagacaggagcatgcaggggggtttggtgggcaatgatgagactgtggcactcacagcctttgtgaccatcgcccttcatcatgggctggccgtcttccaggatgagggtgcagagccattgaagcagagagtggaagcctccatctcaaaggcaaactcatttttgggggagaaagcaagtgctgggctcctgggtgcccacgcagctgccatcacggcctatgccctgacactgaccaaggcgcctgtggacctgctcggtgttgcccacaacaacctcatggcaatggcccaggagactggagataacctgtactggggctcagtcactggttctcagagcaatgccgtgtcgcccaccccggctcctcgcaacccatccgaccccatgccccaggccccagccctgtggattgaaaccacagcctacgccctgctgcacctcctgcttcacgagggcaaagcagagatggcagaccaggctgcggcctggctcacccgtcagggcagcttccaagggggattccgcagtacccaagacacggtgattgccctggatgccctgtctgcctactggattgcctcccacaccactgaggagaggggtctcaatgtgactctcagctccacaggccggaatgggttcaagtcccacgcgctgcagctgaacaaccgccagattcgcggcctggaggaggagctgcagttttccttgggcagcaagatcaatgtgaaggtgggaggaaacagcaaaggaaccctgaaggtccttcgtacctacaatgtcctggacatgaagaacacgacctgccaggacctacagatagaagtgacagtcaaaggccacgtcgagtacacgatggaagcaaacgaggactatgaggactatgagtacgatgagcttccagccaaggatgacccagatgcccctctgcagcccgtgacacccctgcagctgtttgagggtcggaggaaccgccgcaggagggaggcgcccaaggtggtggaggagcaggagtccagggtgcactacaccgtgtgcatctggcggaacggcaaggtggggctgtctggcatggccatcgcggacgtcaccctcctgagtggattccacgccctgcgtgctgacctggagaagctgacctccctctctgaccgttacgtgagtcactttgagaccgaggggccccacgtcctgctgtattttgactcggtccccacctcccgggagtgcgtgggctttgaggctgtgcaggaagtgccggtggggctggtgcagccggccagcgcaaccctgtacgactactacaaccccgagcgcagatgttctgtgttttacggggcaccaagtaagagcagactcttggccaccttgtgttctgctgaagtctgccagtgtgctgaggggaagtgccctcgccagcgtcgcgccctggagcggggtctgcaggacgaggatggctacaggatgaagtttgcctgctactacccccgtgtggagtacggcttccaggttaaggttctccgagaagacagcagagctgctttccgcctctttgagaccaagatcacccaagtcctgcacttcaccaaggatgtcaaggccgctgctaatcagatgcgcaacttcctggttcgagcctcctgccgccttcgcttggaacctgggaaagaatatttgatcatgggtctagatggggccacctatgacctcgagggacacccccagtacctgctggactcgaatagctggatcgaggagatgccctctgaacgcctgtgccggagcacccgccagcgggcagcctgtgcccagctcaacgacttcctccaggagtatggcactcaggggtgccaggtgtgagggctgccctcccacctccgctgggaggaacctgaacctgggaaccatgaagctggaagcactgctgtgtccgctttcatgaacacagcctgggaccagggcatattaaaggcttttggcagcaaagtgtcagtgttggca

SEQ ID NO: 121908 - DNA, 5460 bp, Homo sapiens
  Payload ID: 3890
  Gene Symbol: C4A
  Gene Name: complement component 4A (Rodgers blood group)
  Uniprot ID: P0C0L4
  ENST ID: ENST00000428956
  CDS Start-End: 85-5319
agagtcaactctgccccgaggcctagcttggccagaaggtagcagacagacagacggatctaacctctcttggatcctccagccatgaggctgctctgggggctgatctgggcatccagcttcttcaccttatctctgcagaagcccaggttgctcttgttctctccttctgtggttcatctgggggtccccctatcggtgggggtgcagctccaggatgtgccccgaggacaggtagtgaaaggatcagtgttcctgagaaacccatctcgtaataatgtcccctgctccccaaaggtggacttcacccttagctcagaaagagacttcgcactcctcagtctccaggtgcccttgaaagatgcgaagagctgtggcctccatcaactcctcagaggccctgaggtccagctggtggcccattcgccatggctaaaggactctctgtccagaacgacaaacatccagggtatcaacctgctcttctcctctcgccgggggcacctctttttgcagacggaccagcccatttacaaccctggccagcgggttcggtaccgggtctttgctctggatcagaagatgcgcccgagcactgacaccatcacagtcatggtggagaactctcacggcctccgcgtgcggaagaaggaggtgtacatgccctcgtccatcttccaggatgactttgtgatcccagacatctcagagccagggacctggaagatctcagcccgattctcagatggcctggaatccaacagcagcacccagtttgaggtgaagaaatatgtccttcccaactttgaggtgaagatcacccctggaaagccctacatcctgacggtgccaggccatcttgatgaaatgcagttagacatccaggccaggtacatctatgggaagccagtgcagggggtggcatatgtgcgctttgggctcctagatgaggatggtaagaagactttctttcgggggctggagagtcagaccaagctggtgaatggacagagccacatttccctctcaaaggcagagttccaggacgccctggagaagctgaatatgggcattactgacctccaggggctgcgcctctacgttgctgcagccatcattgagtctccaggtggggagatggaggaggcagagctcacatcctggtattttgtgtcatctcccttctccttggatcttagcaagaccaagcgacaccttgtgcctggggcccccttcctgctgcaggccttggtccgtgagatgtcaggctccccagcttctggcattcctgtcaaagtttctgccacggtgtcttctcctgggtctgttcctgaagtccaggacattcagcaaaacacagacgggagcggccaagtcagcattccaataattatccctcagaccatctcagagctgcagctctcagtatctgcaggctccccacatccagcgatagccaggctcactgtggcagccccaccttcaggaggccccgggtttctgtctattgagcggccggattctcgacctcctcgtgttggggacactctgaacctgaacttgcgagccgtgggcagtggggccaccttttctcattactactacatgatcctatcccgagggcagatcgtgttcatgaatcgagagcccaagaggaccctgacctcggtctcggtgtttgtggaccatcacctggcaccctccttctactttgtggccttctactaccatggagaccacccagtggccaactccctgcgagtggatgtccaggctggggcctgcgagggcaagctggagctcagcgtggacggtgccaagcagtaccggaacggggagtccgtgaagctccacttagaaaccgactccctagccctggtggcgctgggagccttggacacagctctgtatgctgcaggcagcaagtcccacaagcccctcaacatgggcaaggtctttgaagctatgaacagctatgacctcggctgtggtcctgggggtggggacagtgcccttcaggtgttccaggcagcgggcctggccttttctgatggagaccagtggaccttatccagaaagagactaagctgtcccaaggagaagacaacccggaaaaagagaaacgtgaacttccaaaaggcgattaatgagaaattgggtcagtatgcttccccgacagccaagcgctgctgccaggatggggtgacacgtctgcccatgatgcgttcctgcgagcagcgggcagcccgcgtgcagcagccggactgccgggagcccttcctgtcctgctgccaatttgctgagagtctgcgcaagaagagcagggacaagggccaggcgggcctccaacgagccctggagatcctgcaggaggaggacctgattgatgaggatgacattcccgtgcgcagcttcttcccagagaactggctctggagagtggaaacagtggaccgctttcaaatattgacactgtggctccccgactctctgaccacgtgggagatccatggcctgagcctgtccaaaaccaaaggcctatgtgtggccaccccagtccagctccgggtgttccgcgagttccacctgcacctccgcctgcccatgtctgtccgccgctttgagcagctggagctgcggcctgtcctctataactacctggataaaaacctgactgtgagcgtccacgtgtccccagtggaggggctgtgcctggctgggggcggagggctggcccagcaggtgctggtgcctgcgggctctgcccggcctgttgccttctctgtggtgcccacggcagccgccgctgtgtctctgaaggtggtggctcgagggtccttcgaattccctgtgggagatgcggtgtccaaggttctgcagattgagaaggaaggggccatccatagagaggagctggtctatgaactcaaccccttggaccaccgaggccggaccttggaaatacctggcaactctgatcccaatatgatccctgatggggactttaacagctacgtcagggttacagcctcagatccattggacactttaggctctgagggggccttgtcaccaggaggcgtggcctccctcttgaggcttcctcgaggctgtggggagcaaaccatgatctacttggctccgacactggctgcttcccgctacctggacaagacagagcagtggagcacactgcctcccgagaccaaggaccacgccgtggatctgatccagaaaggctacatgcggatccagcagtttcggaaggcggatggttcctatgcggcttggttgtcacgggacagcagcacctggctcacagcctttgtgttgaaggtcctgagtttggcccaggagcaggtaggaggctcgcctgagaaactgcaggagacatctaactggcttctgtcccagcagcaggctgacggctcgttccaggacccctgtccagtgttagacaggagcatgcaggggggtttggtgggcaatgatgagactgtggcactcacagcctttgtgaccatcgcccttcatcatgggctggccgtcttccaggatgagggtgcagagccattgaagcagagagtggaagcctccatctcaaaggcaaactcatttttgggggagaaagcaagtgctgggctcctgggtgcccacgcagctgccatcacggcctatgccctgacactgaccaaggcgcctgtggacctgctcggtgttgcccacaacaacctcatggcaatggcccaggagactggagataacctgtactggggctcagtcactggttctcagagcaatgccgtgtcgcccaccccggctcctcgcaacccatccgaccccatgccccaggccccagccctgtggattgaaaccacagcctacgccctgctgcacctcctgcttcacgagggcaaagcagagatggcagaccaggcttcggcctggctcacccgtcagggcagcttccaagggggattccgcagtacccaagacacggtgattgccctggatgccctgtctgcctactggattgcctcccacaccactgaggagaggggtctcaatgtgactctcagctccacaggccggaatgggttcaagtcccacgcgctgcagctgaacaaccgccagattcgcggcctggaggaggagctgcagttttccttgggcagcaagatcaatgtgaaggtgggaggaaacagcaaaggaaccctgaaggtccttcgtacctacaatgtcctggacatgaagaacacgacctgccaggacctacagatagaagtgacagtcaaaggccacgtcgagtacacgatggaagcaaacgaggactatgaggactatgagtacgatgagcttccagccaaggatgacccagatgcccctctgcagcccgtgacacccctgcagctgtttgagggtcggaggaaccgccgcaggagggaggcgcccaaggtggtggaggagcaggagtccagggtgcactacaccgtgtgcatctggcggaacggcaaggtggggctgtctggcatggccatcgcggacgtcaccctcctgagtggattccacgccctgcgtgctgacctggagaagctgacctccctctctgaccgttacgtgagtcactttgagaccgaggggccccacgtcctgctgtattttgactcggtccccacctcccgggagtgcgtgggctttgaggctgtgcaggaagtgccggtggggctggtgcagccggccagcgcaaccctgtacgactactacaaccccgagcgcagatgttctgtgttttacggggcaccaagtaagagcagactcttggccaccttgtgttctgctgaagtctgccagtgtgctgaggggaagtgccctcgccagcgtcgcgccctggagcggggtctgcaggacgaggatggctacaggatgaagtttgcctgctactacccccgtgtggagtacggcttccaggttaaggttctccgagaagacagcagagctgctttccgcctctttgagaccaagatcacccaagtcctgcacttcaccaaggatgtcaaggccgctgctaatcagatgcgcaacttcctggttcgagcctcctgccgccttcgcttggaacctgggaaagaatatttgatcatgggtctggatggggccacctatgacctcgagggacacccccagtacctgctggactcgaatagctggatcgaggagatgccctctgaacgcctgtgccggagcacccgccagcgggcagcctgtgcccagctcaacgacttcctccaggagtatggcactcaggggtgccaggtgtgagggctgccctcccacctccgctgggaggaacctgaacctgggaaccatgaagctggaagcactgctgtgtccgctttcatgaacacagcctgggaccagggcatattaaaggcttttggcagcaaagtgtcagtgttggca

SEQ ID NO: 121909 - DNA, 5269 bp, Homo sapiens
  Payload ID: 3890
  Gene Symbol: C4A
  Gene Name: complement component 4A (Rodgers blood group)
  Uniprot ID: P0C0L4
  ENST ID: ENST00000498271
  CDS Start-End: 41-5137
gacagacagacggatctaacctctcttggatcctccagccatgaggctgctctgggggctgatctgggcatccagcttcttcaccttatctctgcagaagcccaggttgctcttgttctctccttctgtggttcatctgggggtccccctatcggtgggggtgcagctccaggatgtgccccgaggacaggtagtgaaaggatcagtgttcctgagaaacccatctcgtaataatgtcccctgctccccaaaggtggacttcacccttagctcagaaagagacttcgcactcctcagtctccaggtgcccttgaaagatgcgaagagctgtggcctccatcaactcctcagaggccctgaggtccagctggtggcccattcgccatggctaaaggactctctgtccagaacgacaaacatccagggtatcaacctgctcttctcctctcgccgggggcacctctttttgcagacggaccagcccatttacaaccctggccagcgggttcggtaccgggtctttgctctggatcagaagatgcgcccgagcactgacaccatcacagtcatggtggagaactctcacggcctccgcgtgcggaagaaggaggtgtacatgccctcgtccatcttccaggatgactttgtgatcccagacatctcagagccagggacctggaagatctcagcccgattctcagatggcctggaatccaacagcagcacccagtttgaggtgaagaaatatgtccttcccaactttgaggtgaagatcacccctggaaagccctacatcctgacggtgccaggccatcttgatgaaatgcagttagacatccaggccaggtacatctatgggaagccagtgcagggggtggcatatgtgcgctttgggctcctagatgaggatggtaagaagactttctttcgggggctggagagtcagaccaagctggtgaatggacagagccacatttccctctcaaaggcagagttccaggacgccctggagaagctgaatatgggcattactgacctccaggggctgcgcctctacgttgctgcagccatcattgagtctccaggtggggagatggaggaggcagagctcacatcctggtattttgtgtcatctcccttctccttggatcttagcaagaccaagcgacaccttgtgcctggggcccccttcctgctgcaggccttggtccgtgagatgtcaggctccccagcttctggcattcctgtcaaagtttctgccacggtgtcttctcctgggtctgttcctgaagtccaggacattcagcaaaacacagacgggagcggccaagtcagcattccaataattatccctcagaccatctcagagctgcagctctcagtatctgcaggctccccacatccagcgatagccaggctcactgtggcagccccaccttcaggaggccccgggtttctgtctattgagcggccggattctcgacctcctcgtgttggggacactctgaacctgaacttgcgagccgtgggcagtggggccaccttttctcattactactacatgatcctatcccgagggcagatcgtgttcatgaatcgagagcccaagaggaccctgacctcggtctcggtgtttgtggaccatcacctggcaccctccttctactttgtggccttctactaccatggagaccacccagtggccaactccctgcgagtggatgtccaggctggggcctgcgagggcaagctggagctcagcgtggacggtgccaagcagtaccggaacggggagtccgtgaagctccacttagaaaccgactccctagccctggtggcgctgggagccttggacacagctctgtatgctgcaggcagcaagtcccacaagcccctcaacatgggcaaggtctttgaagctatgaacagctatgacctcggctgtggtcctgggggtggggacagtgcccttcaggtgttccaggcagcgggcctggccttttctgatggagaccagtggaccttatccagaaagagactaagctgtcccaaggagaagacaacccggaaaaagagaaacgtgaacttccaaaaggcgattaatgagaaattgggtcagtatgcttccccgacagccaagcgctgctgccaggatggggtgacacgtctgcccatgatgcgttcctgcgagcagcgggcagcccgcgtgcagcagccggactgccgggagcccttcctgtcctgctgccaatttgctgagagtctgcgcaagaagagcagggacaagggccaggcgggcctccaacgagccctggagatcctgcaggaggaggacctgattgatgaggatgacattcccgtgcgcagcttcttcccagagaactggctctggagagtggaaacagtggaccgctttcaaatattgacactgtggctccccgactctctgaccacgtgggagatccatggcctgagcctgtccaaaaccaaaggcctatgtgtggccaccccagtccagctccgggtgttccgcgagttccacctgcacctccgcctgcccatgtctgtccgccgctttgagcagctggagctgcggcctgtcctctataactacctggataaaaacctgactgtgagcgtccacgtgtccccagtggaggggctgtgcctggctgggggcggagggctggcccagcaggtgctggtgcctgcgggctctgcccggcctgttgccttctctgtggtgcccacggcagccgccgctgtgtctctgaaggtggtggctcgagggtccttcgaattccctgtgggagatgcggtgtccaaggttctgcagattgagaaggaaggggccatccatagagaggagctggtctatgaactcaaccccttggaccaccgaggccggaccttggaaatacctggcaactctgatcccaatatgatccctgatggggactttaacagctacgtcagggttacagcctcagatccattggacactttaggctctgagggggccttgtcaccaggaggcgtggcctccctcttgaggcttcctcgaggctgtggggagcaaaccatgatctacttggctccgacactggctgcttcccgctacctggacaagacagagcagtggagcacactgcctcccgagaccaaggaccacgccgtggatctgatccagaaaggctacatgcggatccagcagtttcggaaggcggatggttcctatgcggcttggttgtcacgggacagcagcacctggctcacagcctttgtgttgaaggtcctgagtttggcccaggagcaggtaggaggctcgcctgagaaactgcaggagacatctaactggcttctgtcccagcagcaggctgacggctcgttccaggacccctgtccagtgttagacaggagcatgcaggggggtttggtgggcaatgatgagactgtggcactcacagcctttgtgaccatcgcccttcatcatgggctggccgtcttccaggatgagggtgcagagccattgaagcagagagtggaagcctccatctcaaaggcaaactcatttttgggggagaaagcaagtgctgggctcctgggtgcccacgcagctgccatcacggcctatgccctgacactgaccaaggcgcctgtggacctgctcggtgttgcccacaacaacctcatggcaatggcccaggagactggagataacctgtactggggctcagtcactggttctcagagcaatgccgtgtcgcccaccccggctcctcgcaacccatccgaccccatgccccaggccccagccctgtggattgaaaccacagcctacgccctgctgcacctcctgcttcacgagggcaaagcagagatggcagaccaggcttcggcctggctcacccgtcagggcagcttccaagggggattccgcagtacccaagacacggtgattgccctggatgccctgtctgcctactggattgcctcccacaccactgaggagaggggtctcaatgtgactctcagctccacaggccggaatgggttcaagtcccacgcgctgcagctgaacaaccgccagattcgcggcctggaggaggagctgcagttttccttgggcagcaagatcaatgtgaaggtgggaggaaacagcaaaggaaccctgaaggtccttcgtacctacaatgtcctggacatgaagaacacgacctgccaggacctacagatagaagtgacagtcaaaggccacgtcgagtacacgatggaagcaaacgaggactatgaggactatgagtacgatgagcttccagccaaggatgacccagatgcccctctgcagcccgtgacacccctgcagctgtttgagggtcggaggaaccgccgcaggagggaggcgcccaagctgacctccctctctgaccgttacgtgagtcactttgagaccgaggggccccacgtcctgctgtattttgactcggtccccacctcccgggagtgcgtgggctttgaggctgtgcaggaagtgccggtggggctggtgcagccggccagcgcaaccctgtacgactactacaaccccgagcgcagatgttctgtgttttacggggcaccaagtaagagcagactcttggccaccttgtgttctgctgaagtctgccagtgtgctgaggggaagtgccctcgccagcgtcgcgccctggagcggggtctgcaggacgaggatggctacaggatgaagtttgcctgctactacccccgtgtggagtacggcttccaggttaaggttctccgagaagacagcagagctgctttccgcctctttgagaccaagatcacccaagtcctgcacttcaccaaggatgtcaaggccgctgctaatcagatgcgcaacttcctggttcgagcctcctgccgccttcgcttggaacctgggaaagaatatttgatcatgggtctggatggggccacctatgacctcgagggacacccccagtacctgctggactcgaatagctggatcgaggagatgccctctgaacgcctgtgccggagcacccgccagcgggcagcctgtgcccagctcaacgacttcctccaggagtatggcactcaggggtgccaggtgtgagggctgccctcccacctccgctgggaggaacctgaacctgggaaccatgaagctggaagcactgctgtgtccgctttcatgaacacagcctgggaccagggcatattaaaggcttttggcagcaaagtgtca

SEQ ID NO: 121910 - DNA, 5288 bp, Homo sapiens
  Payload ID: 3890
  Gene Symbol: C4A
  Gene Name: complement component 4A (Rodgers blood group)
  ENST ID: ENST00000550297
  CDS Start-End: 52-5148
agaaggtagcagacagacagacggatctaacctctcttggatcctccagccatgaggctgctctgggggctgatctgggcatccagcttcttcaccttatctctgcagaagcccaggttgctcttgttctctccttctgtggttcatctgggggtccccctatcggtgggggtgcagctccaggatgtgccccgaggacaggtagtgaaaggatcagtgttcctgagaaacccatctcgtaataatgtcccctgctccccaaaggtggacttcacccttagctcagaaagagacttcgcactcctcagtctccaggtgcccttgaaagatgcgaagagctgtggcctccatcaactcctcagaggccctgaggtccagctggtggcccattcgccatggctaaaggactctctgtccagaacgacaaacatccagggtatcaacctgctcttctcctctcgccgggggcacctctttttgcagacggaccagcccatttacaaccctggccagcgggttcggtaccgggtctttgctctggatcagaagatgcgcccgagcactgacaccatcacagtcatggtggagaactctcacggcctccgcgtgcggaagaaggaggtgtacatgccctcgtccatcttccaggatgactttgtgatcccagacatctcagagccagggacctggaagatctcagcccgattctcagatggcctggaatccaacagcagcacccagtttgaggtgaagaaatatgtccttcccaactttgaggtgaagatcacccctggaaagccctacatcctgacggtgccaggccatcttgatgaaatgcagttagacatccaggccaggtacatctatgggaagccagtgcagggggtggcatatgtgcgctttgggctcctagatgaggatggtaagaagactttctttcgggggctggagagtcagaccaagctggtgaatggacagagccacatttccctctcaaaggcagagttccaggacgccctggagaagctgaatatgggcattactgacctccaggggctgcgcctctacgttgctgcagccatcattgagtatccaggtggggagatggaggaggcagagctcacatcctggtattttgtgtcatctcccttctccttggatcttagcaagaccaagcgacaccttgtgcctggggcccccttcctgctgcaggccttggtccgtgagatgtcaggctccccagcttctggcattcctgtcaaagtttctgccacggtgtcttctcctgggtctgttcctgaagtccaggacattcagcaaaacacagacgggagcggccaagtcagcattccaataattatccctcagaccatctcagagctgcagctctcagtatctgcaggctccccacatccagcgatagccaggctcactgtggcagccccaccttcaggaggccccgggtttctgtctattgagcggccggattctcgacctcctcgtgttggggacactctgaacctgaacttgcgagccgtgggcagtggggccaccttttctcattactactacatgatcctatcccgagggcagatcgtgttcatgaatcgagagcccaagaggaccctgacctcggtctcggtgtttgtggaccatcacctggcaccctccttctactttgtggccttctactaccatggagaccacccagtggccaactccctgcgagtggatgtccaggctggggcctgcgagggcaagctggagctcagcgtggacggtgccaagcagtaccggaacggggagtccgtgaagctccacttagaaaccgactccctagccctggtggcgctgggagccttggacacagctctgtatgctgcaggcagcaagtcccacaagcccctcaacatgggcaaggtctttgaagctatgaacagctatgacctcggctgtggtcctgggggtggggacagtgcccttcaggtgttccaggcagcgggcctggccttttctgatggagaccagtggaccttatccagaaagagactaagctgtcccaaggagaagacaacccggaaaaagagaaacgtgaacttccaaaaggcgattaatgagaaattgggtcagtatgcttccccgacagccaagcgctgctgccaggatggggtgacacgtctgcccatgatgcgttcctgcgagcagcgggcagcccgcgtgcagcagccggactgccgggagcccttcctgtcctgctgccaatttgctgagagtctgcgcaagaagagcagggacaagggccaggcgggcctccaacgagccctggagatcctgcaggaggaggacctgattgatgaggatgacattcccgtgcgcagcttcttcccagagaactggctctggagagtggaaacagtggaccgctttcaaatattgacactgtggctccccgactctctgaccacgtgggagatccatggcctgagcctgtccaaaaccaaaggcctatgtgtggccaccccagtccagctccgggtgttccgcgagttccacctgcacctccgcctgcccatgtctgtccgccgctttgagcagctggagctgcggcctgtcctctataactacctggataaaaacctgactgtgagcgtccacgtgtccccagtggaggggctgtgcctggctgggggcggagggctggcccagcaggtgctggtgcctgcgggctctgcccggcctgttgccttctctgtggtgcccacggcagccgccgctgtgtctctgaaggtggtggctcgagggtccttcgaattccctgtgggagatgcggtgtccaaggttctgcagattgagaaggaaggggccatccatagagaggagctggtctatgaactcaaccccttggaccaccgaggccggaccttggaaatacctggcaactctgatcccaatatgatccctgatggggactttaacagctacgtcagggttacagcctcagatccattggacactttaggctctgagggggccttgtcaccaggaggcgtggcctccctcttgaggcttcctcgaggctgtggggagcaaaccatgatctacttggctccgacactggctgcttcccgctacctggacaagacagagcagtggagcacactgcctcccgagaccaaggaccacgccgtggatctgatccagaaaggctacatgcggatccagcagtttcggaaggcggatggttcctatgcggcttggttgtcacgggacagcagcacctggctcacagcctttgtgttgaaggtcctgagtttggcccaggagcaggtaggaggctcgcctgagaaactgcaggagacatctaactggcttctgtcccagcagcaggctgacggctcgttccaggacccctgtccagtgttagacaggagcatgcaggggggtttggtgggcaatgatgagactgtggcactcacagcctttgtgaccatcgcccttcatcatgggctggccgtcttccaggatgagggtgcagagccattgaagcagagagtggaagcctccatctcaaaggcaaactcatttttgggggagaaagcaagtgctgggctcctgggtgcccacgcagctgccatcacggcctatgccctgacactgaccaaggcgcctgtggacctgctcggtgttgcccacaacaacctcatggcaatggcccaggagactggagataacctgtactggggctcagtcactggttctcagagcaatgccgtgtcgcccaccccggctcctcgcaacccatccgaccccatgccccaggccccagccctgtggattgaaaccacagcctacgccctgctgcacctcctgcttcacgagggcaaagcagagatggcagaccaggctgcggcctggctcacccgtcagggcagcttccaagggggattccgcagtacccaagacacggtgattgccctggatgccctgtctgcctactggattgcctcccacaccactgaggagaggggtctcaatgtgactctcagctccacaggccggaatgggttcaagtcccacgcgctgcagctgaacaaccgccagattcgcggcctggaggaggagctgcagttttccttgggcagcaagatcaatgtgaaggtgggaggaaacagcaaaggaaccctgaaggtccttcgtacctacaatgtcctggacatgaagaacacgacctgccaggacctacagatagaagtgacagtcaaaggccacgtcgagtacacgatggaagcaaacgaggactatgaggactatgagtacgatgagcttccagccaaggatgacccagatgcccctctgcagcccgtgacacccctgcagctgtttgagggtcggaggaaccgccgcaggagggaggcgcccaagctgacctccctctctgaccgttacgtgagtcactttgagaccgaggggccccacgtcctgctgtattttgactcggtccccacctcccgggagtgcgtgggctttgaggctgtgcaggaagtgccggtggggctggtgcagccggccagcgcaaccctgtacgactactacaaccccgagcgcagatgttctgtgttttacggggcaccaagtaagagcagactcttggccaccttgtgttctgctgaagtctgccagtgtgctgaggggaagtgccctcgccagcgtcgcgccctggagcggggtctgcaggacgaggatggctacaggatgaagtttgcctgctactacccccgtgtggagtacggcttccaggttaaggttctccgagaagacagcagagctgctttccgcctctttgagaccaagatcacccaagtcctgcacttcaccaaggatgtcaaggccgctgctaatcagatgcgcaacttcctggttcgagcctcctgccgccttcgcttggaacctgggaaagaatatttgatcatgggtctagatggggccacctatgacctcgagggacacccccagtacctgctggactcgaatagctggatcgaggagatgccctctgaacgcctgtgccggagcacccgccagcgggcagcctgtgcccagctcaacgacttcctccaggagtatggcactcaggggtgccaggtgtgagggctgccctcccacctccgctgggaggaacctgaacctgggaaccatgaagctggaagcactgctgtgtccgctttcatgaacacagcctgggaccagggcatattaaaggcttttggcagcaaagtgtcagtgttggc

SEQ ID NO: 121911 - DNA, 5288 bp, Homo sapiens
  Payload ID: 3890
  Gene Symbol: C4A
  Gene Name: complement component 4A (Rodgers blood group)
  ENST ID: ENST00000549812
  CDS Start-End: 52-5148
agaaggtagcagacagacagacggatctaacctctcttggatcctccagccatgaggctgctctgggggctgatctgggcatccagcttcttcaccttatctctgcagaagcccaggttgctcttgttctctccttctgtggttcatctgggggtccccctatcggtgggggtgcagctccaggatgtgccccgaggacaggtagtgaaaggatcagtgttcctgagaaacccatctcgtaataatgtcccctgctccccaaaggtggacttcacccttagctcagaaagagacttcgcactcctcagtctccaggtgcccttgaaagatgcgaagagctgtggcctccatcaactcctcagaggccctgaggtccagctggtggcccattcgccatggctaaaggactctctgtccagaacgacaaacatccagggtatcaacctgctcttctcctctcgccgggggcacctctttttgcagacggaccagcccatttacaaccctggccagcgggttcggtaccgggtctttgctctggatcagaagatgcgcccgagcactgacaccatcacagtcatggtggagaactctcacggcctccgcgtgcggaagaaggaggtgtacatgccctcgtccatcttccaggatgactttgtgatcccagacatctcagagccagggacctggaagatctcagcccgattctcagatggcctggaatccaacagcagcacccagtttgaggtgaagaaatatgtccttcccaactttgaggtgaagatcacccctggaaagccctacatcctgacggtgccaggccatcttgatgaaatgcagttagacatccaggccaggtacatctatgggaagccagtgcagggggtggcatatgtgcgctttgggctcctagatgaggatggtaagaagactttctttcgggggctggagagtcagaccaagctggtgaatggacagagccacatttccctctcaaaggcagagttccaggacgccctggagaagctgaatatgggcattactgacctccaggggctgcgcctctacgttgctgcagccatcattgagtctccaggtggggagatggaggaggcagagctcacatcctggtattttgtgtcatctcccttctccttggatcttagcaagaccaagcgacaccttgtgcctggggcccccttcctgctgcaggccttggtccgtgagatgtcaggctccccagcttctggcattcctgtcaaagtttctgccacggtgtcttctcctgggtctgttcctgaagtccaggacattcagcaaaacacagacgggagcggccaagtcagcattccaataattatccctcagaccatctcagagctgcagctctcagtatctgcaggctccccacatccagcgatagccaggctcactgtggcagccccaccttcaggaggccccgggtttctgtctattgagcggccggattctcgacctcctcgtgttggggacactctgaacctgaacttgcgagccgtgggcagtggggccaccttttctcattactactacatgatcctatcccgagggcagatcgtgttcatgaatcgagagcccaagaggaccctgacctcggtctcggtgtttgtggaccatcacctggcaccctccttctactttgtggccttctactaccatggagaccacccagtggccaactccctgcgagtggatgtccaggctggggcctgcgagggcaagctggagctcagcgtggacggtgccaagcagtaccggaacggggagtccgtgaagctccacttagaaaccgactccctagccctggtggcgctgggagccttggacacagctctgtatgctgcaggcagcaagtcccacaagcccctcaacatgggcaaggtctttgaagctatgaacagctatgacctcggctgtggtcctgggggtggggacagtgcccttcaggtgttccaggcagcgggcctggccttttctgatggagaccagtggaccttatccagaaagagactaagctgtcccaaggagaagacaacccggaaaaagagaaacgtgaacttccaaaaggcgattaatgagaaattgggtcagtatgcttccccgacagccaagcgctgctgccaggatggggtgacacgtctgcccatgatgcgttcctgcgagcagcgggcagcccgcgtgcagcagccggactgccgggagcccttcctgtcctgctgccaatttgctgagagtctgcgcaagaagagcagggacaagggccaggcgggcctccaacgagccctggagatcctgcaggaggaggacctgattgatgaggatgacattcccgtgcgcagcttcttcccagagaactggctctggagagtggaaacagtggaccgctttcaaatattgacactgtggctccccgactctctgaccacgtgggagatccatggcctgagcctgtccaaaaccaaaggcctatgtgtggccaccccagtccagctccgggtgttccgcgagttccacctgcacctccgcctgcccatgtctgtccgccgctttgagcagctggagctgcggcctgtcctctataactacctggataaaaacctgactgtgagcgtccacgtgtccccagtggaggggctgtgcctggctgggggcggagggctggcccagcaggtgctggtgcctgcgggctctgcccggcctgttgccttctctgtggtgcccacggcagccgccgctgtgtctctgaaggtggtggctcgagggtccttcgaattccctgtgggagatgcggtgtccaaggttctgcagattgagaaggaaggggccatccatagagaggagctggtctatgaactcaaccccttggaccaccgaggccggaccttggaaatacctggcaactctgatcccaatatgatccctgatggggactttaacagctacgtcagggttacagcctcagatccattggacactttaggctctgagggggccttgtcaccaggaggcgtggcctccctcttgaggcttcctcgaggctgtggggagcaaaccatgatctacttggctccgacactggctgcttcccgctacctggacaagacagagcagtggagcacactgcctcccgagaccaaggaccacgccgtggatctgatccagaaaggctacatgcggatccagcagtttcggaaggcggatggttcctatgcggcttggttgtcacgggacagcagcacctggctcacagcctttgtgttgaaggtcctgagtttggcccaggagcaggtaggaggctcgcctgagaaactgcaggagacatctaactggcttctgtcccagcagcaggctgacggctcgttccaggacccctgtccagtgttagacaggagcatgcaggggggtttggtgggcaatgatgagactgtggcactcacagcctttgtgaccatcgcccttcatcatgggctggccgtcttccaggatgagggtgcagagccattgaagcagagagtggaagcctccatctcaaaggcaagctcatttttgggggagaaagcaagtgctgggctcctgggtgcccacgcagctgccatcacggcctatgccctgacactgaccaaggcgcctgtggacctgctcggtgttgcccacaacaacctcatggcaatggcccaggagactggagataacctgtactggggctcagtcactggttctcagagcaatgccgtgtcgcccaccccggctcctcgcaacccatccgaccccatgccccaggccccagccctgtggattgaaaccacagcctacgccctgctgcacctcctgcttcacgagggcaaagcagagatggcagaccaggctgcggcctggctcacccgtcagggcagcttccaagggggattccgcagtacccaagacacggtgattgccctggatgccctgtctgcctactggattgcctcccacaccactgaggagaggggtctcaatgtgactctcagctccacaggccggaatgggttcaagtcccacgcgctgcagctgaacaaccgccagattcgcggcctggaggaggagctgcagttttccttgggcagcaagatcaatgtgaaggtgggaggaaacagcaaaggaaccctgaaggtccttcgtacctacaatgtcctggacatgaagaacacgacctgccaggacctacagatagaagtgacagtcaaaggccacgtcgagtacacgatggaagcaaacgaggactatgaggactatgagtacgatgagcttccagccaaggatgacccagatgcccctctgcagcccgtgacacccctgcagctgtttgagggtcggaggaaccgccgcaggagggaggcgcccaagctgacctccctctctgaccgttacgtgagtcactttgagaccgaggggccccacgtcctgctgtattttgactcggtccccacctcccgggagtgcgtgggctttgaggctgtgcaggaagtgccggtggggctggtgcagccggccagcgcaaccctgtacgactactacaaccccgagcgcagatgttctgtgttttacggggcaccaagtaagagcagactcttggccaccttgtgttctgctgaagtctgccagtgtgctgaggggaagtgccctcgccagcgtcgcgccctggagcggggtctgcaggacgaggatggctacaggatgaagtttgcctgctactacccccgtgtggagtacggcttccaggttaaggttctccgagaagacagcagagctgctttccgcctctttgagaccaagatcacccaagtcctgcacttcaccaaggatgtcaaggccgctgctaatcagatgcgcaacttcctggttcgagcctcctgccgccttcgcttggaacctgggaaagaatatttgatcatgggtctggatggggccacctatgacctcgagggacacccccagtacctgctggactcgaatagctggatcgaggagatgccctctgaacgcctgtgccggagcacccgccagcgggcagcctgtgcccagctcaacgacttcctccaggagtatggcactcaggggtgccaggtgtgagggctgccctcccacctccgctgggaggaacctgaacctgggaaccatgaagctggaagcactgctgtgtccgctttcatgaacacagcctgggaccagggcatattaaaggcttttggcagcaaagtgtcagtgttggc

SEQ ID NO: 121912 - DNA, 5148 bp, Homo sapiens
  Payload ID: 3890
  Gene Symbol: C4A
  Gene Name: complement component 4A (Rodgers blood group)
  ENST ID: ENST00000546746
  CDS Start-End: 52-5148
agaaggtagcagacagacagacggatctaacctctcttggatcctccagccatgaggctgctctgggggctgatctgggcatccagcttcttcaccttatctctgcagaagcccaggttgctcttgttctctccttctgtggttcatctgggggtccccctatcggtgggggtgcagctccaggatgtgccccgaggacaggtagtgaaaggatcagtgttcctgagaaacccatctcgtaataatgtcccctgctccccaaaggtggacttcacccttagctcagaaagagacttcgcactcctcagtctccaggtgcccttgaaagatgcgaagagctgtggcctccatcaactcctcagaggccctgaggtccagctggtggcccattcgccatggctaaaggactctctgtccagaacgacaaacatccagggtatcaacctgctcttctcctctcgccgggggcacctctttttgcagacggaccagcccatttacaaccctggccagcgggttcggtaccgggtctttgctctggatcagaagatgcgcccgagcactgacaccatcacagtcatggtggagaactctcacggcctccgcgtgcggaagaaggaggtgtacatgccctcgtccatcttccaggatgactttgtgatcccagacatctcagagccagggacctggaagatctcagcccgattctcagatggcctggaatccaacagcagcacccagtttgaggtgaagaaatatgtccttcccaactttgaggtgaagatcacccctggaaagccctacatcctgacggtgccaggccatcttgatgaaatgcagttagacatccaggccaggtacatctatgggaagccagtgcagggggtggcatatgtgcgctttgggctcctagatgaggatggtaagaagactttctttcgggggctggagagtcagaccaagctggtgaatggacagagccacatttccctctcaaaggcagagttccaggacgccctggagaagctgaatatgggcattactgacctccaggggctgcgcctctacgttgctgcagccatcattgagtatccaggtggggagatggaggaggcagagctcacatcctggtattttgtgtcatctcccttctccttggatcttagcaagaccaagcgacaccttgtgcctggggcccccttcctgctgcaggccttggtccgtgagatgtcaggctccccagcttctggcattcctgtcaaagtttctgccacggtgtcttctcctgggtctgttcctgaagtccaggacattcagcaaaacacagacgggagcggccaagtcagcattccaataattatccctcagaccatctcagagctgcagctctcagtatctgcaggctccccacatccagcgatagccaggctcactgtggcagccccaccttcaggaggccccgggtttctgtctattgagtggccggattctcgacctcctcgtgttggggacactctgaacctgaacttgcgagccgtgggcagtggggccaccttttctcattactactacatgatcctatcccgagggcagatcgtgttcatgaatcgagagcccaagaggaccctgacctcggtctcggtgtttgtggaccatcacctggcaccctccttctactttgtggccttctactaccatggagaccacccagtggccaactccctgcgagtggatgtccaggctggggcctgcgagggcaagctggagctcagcgtggacggtgccaagcagtaccggaacggggagtccgtgaagctccacttagaaaccgactccctagccctggtggcgctgggagccttggacacagctctgtatgctgcaggcagcaagtcccacaagcccctcaacatgggcaaggtctttgaagctatgaacagctatgacctcggctgtggtcctgggggtggggacagtgcccttcaggtgttccaggcagcgggcctggccttttctgatggagaccagtggaccttatccagaaagagactaagctgtcccaaggagaagacaacccggaaaaagagaaacgtgaacttccaaaaggcgattaatgagaaattgggtcagtatgcttccccgacagccaagcgctgctgccaggatggggtgacacgtctgcccatgatgcgttcctgcgagcagcgggcagcccgcgtgcagcagccggactgccgggagcccttcctgtcctgctgccaatttgctgagagtctgcgcaagaagagcagggacaagggccaggcgggcctccaacgagccctggagatcctgcaggaggaggacctgattgatgaggatgacattcccgtgcgcagcttcttcccagagaactggctctggagagtggaaacagtggaccgctttcaaatattgacactgtggctccccgactctctgaccacgtgggagatccatggcctgagcctgtccaaaaccaaaggcctatgtgtggccaccccagtccagctccgggtgttccgcgagttccacctgcacctccgcctgcccatgtctgtccgccgctttgagcagctggagctgcggcctgtcctctataactacctggataaaaacctgactgtgagcgtccacgtgtccccagtggaggggctgtgcctggctgggggcggagggctggcccagcaggtgctggtgcctgcgggctctgcccggcctgttgccttctctgtggtgcccacggcagccgccgctgtgtctctgaaggtggtggctcgagggtccttcgaattccctgtgggagatgcggtgtccaaggttctgcagattgagaaggaaggggccatccatagagaggagctggtctatgaactcaaccccttggaccaccgaggccggaccttggaaatacctggcaactctgatcccaatatgatccctgatggggactttaacagctacgtcagggttacagcctcagatccattggacactttaggctctgagggggccttgtcaccaggaggcgtggcctccctcttgaggcttcctcgaggctgtggggagcaaaccatgatctacttggctccgacactggctgcttcccgctacctggacaagacagagcagtggagcacactgcctcccgagaccaaggaccacgccgtggatctgatccagaaaggctacatgcggatccagcagtttcggaaggcggatggttcctatgcggcttggttgtcacgggacagcagcacctggctcacagcctttgtgttgaaggtcctgagtttggcccaggagcaggtaggaggctcgcctgagaaactgcaggagacatctaactggcttctgtcccagcagcaggctgacggctcgttccaggacccctgtccagtgttagacaggagcatgcaggggggtttggtgggcaatgatgagactgtggcactcacagcctttgtgaccatcgcccttcatcatgggctggccgtcttccaggatgagggtgcagagccattgaagcagagagtggaagcctccatctcaaaggcaaactcatttttgggggagaaagcaagtgctgggctcctgggtgcccacgcagctgccatcacggcctatgccctgacactgaccaaggcgcctgtggacctgctcggtgttgcccacaacaacctcatggcaatggcccaggagactggagataacctgtactggggctcagtcactggttctcagagcaatgccgtgtcgcccaccccggctcctcgcaacccatccgaccccatgccccaggccccagccctgtggattgaaaccacagcctacgccctgctgcacctcctgcttcacgagggcaaagcagagatggcagaccaggctgcggcctggctcacccgtcagggcagcttccaagggggattccgcagtacccaagacacggtgattgccctggatgccctgtctgcctactggattgcctcccacaccactgaggagaggggtctcaatgtgactctcagctccacaggccggaatgggttcaagtcccacgcgctgcagctgaacaaccgccagattcgcggcctggaggaggagctgcagttttccttgggcagcaagatcaatgtgaaggtgggaggaaacagcaaaggaaccctgaaggtccttcgtacctacaatgtcctggacatgaagaacacgacctgccaggacctacagatagaagtgacagtcaaaggccacgtcgagtacacgatggaagcaaacgaggactatgaggactatgagtacgatgagcttccagccaaggatgacccagatgcccctctgcagcccgtgacacccctgcagctgtttgagggtcggaggaaccgccgcaggagggaggcgcccaagctgacctccctctctgaccgttacgtgagtcactttgagaccgaggggccccacgtcctgctgtattttgactcggtccccacctcccgggagtgcgtgggctttgaggctgtgcaggaagtgccggtggggctggtgcagccggccagcgcaaccctgtacgactactacaaccccgagcgcagatgttctgtgttttacggggcaccaagtaagagcagactcttggccaccttgtgttctgctgaagtctgccagtgtgctgaggggaagtgccctcgccagcgtcgcgccctggagcggggtctgcaggacgaggatggctacaggatgaagtttgcctgctactacccccgtgtggagtacggcttccaggttaaggttctccgagaagacagcagagctgctttccgcctctttgagaccaagatcacccaagtcctgcacttcaccaaggatgtcaaggccgctgctaatcagatgcgcaacttcctggttcgagcctcctgccgccttcgcttggaacctgggaaagaatatttgatcatgggtctggatggggccacctatgacctcgagggacacccccagtacctgctggactcgaatagctggatcgaggagatgccctctgaacgcctgtgccggagcacccgccagcgggcagcctgtgcccagctcaacgacttcctccaggagtatggcactcaggggtgccaggtgtga

SEQ ID NO: 121913 - DNA, 5338 bp, Homo sapiens
  Payload ID: 3890
  Gene Symbol: C4A
  Gene Name: complement component 4A (Rodgers blood group)
  ENST ID: ENST00000616575
  CDS Start-End: 22-5256
cctctcttggatcctccagccatgaggctgctctgggggctgatctgggcatccagcttcttcaccttatctctgcagaagcccaggttgctcttgttctctccttctgtggttcatctgggggtccccctatcggtgggggtgcagctccaggatgtgccccgaggacaggtagtgaaaggatcagtgttcctgagaaacccatctcgtaataatgtcccctgctccccaaaggtggacttcacccttagctcagaaagagacttcgcactcctcagtctccaggtgcccttgaaagatgcgaagagctgtggcctccatcaactcctcagaggccctgaggtccagctggtggcccattcgccatggctaaaggactctctgtccagaacgacaaacatccagggtatcaacctgctcttctcctctcgccgggggcacctctttttgcagacggaccagcccatttacaaccctggccagcgggttcggtaccgggtctttgctctggatcagaagatgcgcccgagcactgacaccatcacagtcatggtggagaactctcacggcctccgcgtgcggaagaaggaggtgtacatgccctcgtccatcttccaggatgactttgtgatcccagacatctcagagccagggacctggaagatctcagcccgattctcagatggcctggaatccaacagcagcacccagtttgaggtgaagaaatatgtccttcccaactttgaggtgaagatcacccctggaaagccctacatcctgacggtgccaggccatcttgatgaaatgcagttagacatccaggccaggtacatctatgggaagccagtgcagggggtggcatatgtgcgctttgggctcctagatgaggatggtaagaagactttctttcgggggctggagagtcagaccaagctggtgaatggacagagccacatttccctctcaaaggcagagttccaggacgccctggagaagctgaatatgggcattactgacctccaggggctgcgcctctacgttgctgcagccatcattgagtatccaggtggggagatggaggaggcagagctcacatcctggtattttgtgtcatctcccttctccttggatcttagcaagaccaagcgacaccttgtgcctggggcccccttcctgctgcaggccttggtccgtgagatgtcaggctccccagcttctggcattcctgtcaaagtttctgccacggtgtcttctcctgggtctgttcctgaagtccaggacattcagcaaaacacagacgggagcggccaagtcagcattccaataattatccctcagaccatctcagagctgcagctctcagtatctgcaggctccccacatccagcgatagccaggctcactgtggcagccccaccttcaggaggccccgggtttctgtctattgagtggccggattctcgacctcctcgtgttggggacactctgaacctgaacttgcgagccgtgggcagtggggccaccttttctcattactactacatgatcctatcccgagggcagatcgtgttcatgaatcgagagcccaagaggaccctgacctcggtctcggtgtttgtggaccatcacctggcaccctccttctactttgtggccttctactaccatggagaccacccagtggccaactccctgcgagtggatgtccaggctggggcctgcgagggcaagctggagctcagcgtggacggtgccaagcagtaccggaacggggagtccgtgaagctccacttagaaaccgactccctagccctggtggcgctgggagccttggacacagctctgtatgctgcaggcagcaagtcccacaagcccctcaacatgggcaaggtctttgaagctatgaacagctatgacctcggctgtggtcctgggggtggggacagtgcccttcaggtgttccaggcagcgggcctggccttttctgatggagaccagtggaccttatccagaaagagactaagctgtcccaaggagaagacaacccggaaaaagagaaacgtgaacttccaaaaggcgattaatgagaaattgggtcagtatgcttccccgacagccaagcgctgctgccaggatggggtgacacgtctgcccatgatgcgttcctgcgagcagcgggcagcccgcgtgcagcagccggactgccgggagcccttcctgtcctgctgccaatttgctgagagtctgcgcaagaagagcagggacaagggccaggcgggcctccaacgagccctggagatcctgcaggaggaggacctgattgatgaggatgacattcccgtgcgcagcttcttcccagagaactggctctggagagtggaaacagtggaccgctttcaaatattgacactgtggctccccgactctctgaccacgtgggagatccatggcctgagcctgtccaaaaccaaaggcctatgtgtggccaccccagtccagctccgggtgttccgcgagttccacctgcacctccgcctgcccatgtctgtccgccgctttgagcagctggagctgcggcctgtcctctataactacctggataaaaacctgactgtgagcgtccacgtgtccccagtggaggggctgtgcctggctgggggcggagggctggcccagcaggtgctggtgcctgcgggctctgcccggcctgttgccttctctgtggtgcccacggcagccgccgctgtgtctctgaaggtggtggctcgagggtccttcgaattccctgtgggagatgcggtgtccaaggttctgcagattgagaaggaaggggccatccatagagaggagctggtctatgaactcaaccccttggaccaccgaggccggaccttggaaatacctggcaactctgatcccaatatgatccctgatggggactttaacagctacgtcagggttacagcctcagatccattggacactttaggctctgagggggccttgtcaccaggaggcgtggcctccctcttgaggcttcctcgaggctgtggggagcaaaccatgatctacttggctccgacactggctgcttcccgctacctggacaagacagagcagtggagcacactgcctcccgagaccaaggaccacgccgtggatctgatccagaaaggctacatgcggatccagcagtttcggaaggcggatggttcctatgcggcttggttgtcacgggacagcagcacctggctcacagcctttgtgttgaaggtcctgagtttggcccaggagcaggtaggaggctcgcctgagaaactgcaggagacatctaactggcttctgtcccagcagcaggctgacggctcgttccaggacccctgtccagtgttagacaggagcatgcaggggggtttggtgggcaatgatgagactgtggcactcacagcctttgtgaccatcgcccttcatcatgggctggccgtcttccaggatgagggtgcagagccattgaagcagagagtggaagcctccatctcaaaggcaaactcatttttgggggagaaagcaagtgctgggctcctgggtgcccacgcagctgccatcacggcctatgccctgacactgaccaaggcgcctgtggacctgctcggtgttgcccacaacaacctcatggcaatggcccaggagactggagataacctgtactggggctcagtcactggttctcagagcaatgccgtgtcgcccaccccggctcctcgcaacccatccgaccccatgccccaggccccagccctgtggattgaaaccacagcctacgccctgctgcacctcctgcttcacgagggcaaagcagagatggcagaccaggctgcggcctggctcacccgtcagggcagcttccaagggggattccgcagtacccaagacacggtgattgccctggatgccctgtctgcctactggattgcctcccacaccactgaggagaggggtctcaatgtgactctcagctccacaggccggaatgggttcaagtcccacgcgctgcagctgaacaaccgccagattcgcggcctggaggaggagctgcagttttccttgggcagcaagatcaatgtgaaggtgggaggaaacagcaaaggaaccctgaaggtccttcgtacctacaatgtcctggacatgaagaacacgacctgccaggacctacagatagaagtgacagtcaaaggccacgtcgagtacacgatggaagcaaacgaggactatgaggactatgagtacgatgagcttccagccaaggatgacccagatgcccctctgcagcccgtgacacccctgcagctgtttgagggtcggaggaaccgccgcaggagggaggcgcccaaggtggtggaggagcaggagtccagggtgcactacaccgtgtgcatctggcggaacggcaaggtggggctgtctggcatggccatcgcggacgtcaccctcctgagtggattccacgccctgcgtgctgacctggagaagctgacctccctctctgaccgttacgtgagtcactttgagaccgaggggccccacgtcctgctgtattttgactcggtccccacctcccgggagtgcgtgggctttgaggctgtgcaggaagtgccggtggggctggtgcagccggccagcgcaaccctgtacgactactacaaccccgagcgcagatgttctgtgttttacggggcaccaagtaagagcagactcttggccaccttgtgttctgctgaagtctgccagtgtgctgaggggaagtgccctcgccagcgtcgcgccctggagcggggtctgcaggacgaggatggctacaggatgaagtttgcctgctactacccccgtgtggagtacggcttccaggttaaggttctccgagaagacagcagagctgctttccgcctctttgagaccaagatcacccaagtcctgcacttcaccaaggatgtcaaggccgctgctaatcagatgcgcaacttcctggttcgagcctcctgccgccttcgcttggaacctgggaaagaatatttgatcatgggtctggatggggccacctatgacctcgagggacacccccagtacctgctggactcgaatagctggatcgaggagatgccctctgaacgcctgtgccggagcacccgccagcgggcagcctgtgcccagctcaacgacttcctccaggagtatggcactcaggggtgccaggtgtgagggctgccctcccacctccgctgggaggaacctgaacctgggaaccatgaagctggaagcactgctgtgtccgctttcatga

SEQ ID NO: 121914 - DNA, 5460 bp, Homo sapiens
  Payload ID: 3891
  Gene Symbol: C4B
  Gene Name: complement component 4B (Chido blood group)
  Uniprot ID: P0C0L5
  ENST ID: ENST00000375177
  CDS Start-End: 85-5319
agagtcaactctgccccgaggcctagcttggccagaaggtagcagacagacagacggatctaacctctcttggatcctccagccatgaggctgctctgggggctgatctgggcatccagcttcttcaccttatctctgcagaagcccaggttgctcttgttctctccttctgtggttcatctgggggtccccctatcggtgggggtgcagctccaggatgtgccccgaggacaggtagtcaaaggatcagtgttcctgagaaacccatctcgtaataatgtcccctgctccccaaaggtggacttcacccttagctcagaaagagacttcgcactcctcagtctccaggtgcccttgaaagatgcgaagagctgtggcctccatcaactcctcagaggccctgaggtccagctggtggcccattcgccatggctaaaggactctctgtccagaacgacaaacatccagggtatcaacctgctcttctcctctcgccgggggcacctctttttgcagacggaccagcccatttacaaccctggccagcgggttcggtaccgggtctttgctctggatcagaagatgcgcccgagcactgacaccatcacagtcatggtggagaactctcacggcctccgcgtgcggaagaaggaggtgtacatgccctcgtccatcttccaggatgactttgtgatcccagacatctcagagccagggacctggaagatctcagcccgattctcagatggcctggaatccaacagcagcacccagtttgaggtgaagaaatatgtccttcccaactttgaggtgaagatcacccctggaaagccctacatcctgacggtgccaggccatcttgatgaaatgcagttagacatccaggccaggtacatctatgggaagccagtgcagggggtggcatatgtgcgctttgggctcctagatgaggatggtaagaagactttctttcgggggctggagagtcagaccaagctggtgaatggacagagccacatttccctctcaaaggcagagttccaggacgccctggagaagctgaatatgggcattactgacctccaggggctgcgcctctacgttgctgcagccatcattgagtatccaggtggggagatggaggaggcagagctcacatcctggtattttgtgtcatctcccttctccttggatcttagcaagaccaagcgacaccttgtgcctggggcccccttcctgctgcaggccttggtccgtgagatgtcaggctccccagcttctggcattcctgtcaaagtttctgccacggtgtcttctcctgggtctgttcctgaagtccaggacattcagcaaaacacagacgggagcggccaagtcagcattccaataattatccctcagaccatctcagagctgcagctctcagtatctgcaggctccccacatccagcgatagccaggctcactgtggcagccccaccttcaggaggccccgggtttctgtctattgagcggccggattctcgacctcctcgtgttggggacactctgaacctgaacttgcgagccgtgggcagtggggccaccttttctcattactactacatgatcctatcccgagggcagatcgtgttcatgaatcgagagcccaagaggaccctgacctcggtctcggtgtttgtggaccatcacctggcaccctccttctactttgtggccttctactaccatggagaccacccagtggccaactccctgcgagtggatgtccaggctggggcctgcgagggcaagctggagctcagcgtggacggtgccaagcagtaccggaacggggagtccgtgaagctccacttagaaaccgactccctagccctggtggcgctgggagccttggacacagctctgtatgctgcaggcagcaagtcccacaagcccctcaacatgggcaaggtctttgaagctatgaacagctatgacctcggctgtggtcctgggggtggggacagtgcccttcaggtgttccaggcagcgggcctggccttttctgatggagaccagtggaccttatccagaaagagactaagctgtcccaaggagaagacaacccggaaaaagagaaacgtgaacttccaaaaggcgattaatgagaaattgggtcagtatgcttccccgacagccaagcgctgctgccaggatggggtgacacgtctgcccatgatgcgttcctgcgagcagcgggcagcccgcgtgcagcagccggactgccgggagcccttcctgtcctgctgccaatttgctgagagtctgcgcaagaagagcagggacaagggccaggcgggcctccaacgagccctggagatcctgcaggaggaggacctgattgatgaggatgacattcccgtgcgcagcttcttcccagagaactggctctggagagtggaaacagtggaccgctttcaaatattgacactgtggctccccgactctctgaccacgtgggagatccatggcctgagcctgtccaaaaccaaaggcctatgtgtggccaccccagtccagctccgggtgttccgcgagttccacctgcacctccgcctgcccatgtctgtccgccgctttgagcagctggagctgcggcctgtcctctataactacctggataaaaacctgactgtgagcgtccacgtgtccccagtggaggggctgtgcctggctgggggcggagggctggcccagcaggtgctggtgcctgcgggctctgcccggcctgttgccttctctgtggtgcccacggcagccgccgctgtgtctctgaaggtggtggctcgagggtccttcgaattccctgtgggagatgcggtgtccaaggttctgcagattgagaaggaaggggccatccatagagaggagctggtctatgaactcaaccccttggaccaccgaggccggaccttggaaatacctggcaactctgatcccaatatgatccctgatggggactttaacagctacgtcagggttacagcctcagatccattggacactttaggctctgagggggccttgtcaccaggaggcgtggcctccctcttgaggcttcctcgaggctgtggggagcaaaccatgatctacttggctccgacactggctgcttcccgctacctggacaagacagagcagtggagcacactgcctcccgagaccaaggaccacgccgtggatctgatccagaaaggctacatgcggatccagcagtttcggaaggcggatggttcctatgcggcttggttgtcacggggcagcagcacctggctcacagcctttgtgttgaaggtcctgagtttggcccaggagcaggtaggaggctcgcctgagaaactgcaggagacatctaactggcttctgtcccagcagcaggctgacggctcgttccaggacctctctccagtgatacataggagcatgcaggggggtttggtgggcaatgatgagactgtggcactcacagcctttgtgaccatcgcccttcatcatgggctggccgtcttccaggatgagggtgcagagccattgaagcagagagtggaagcctccatctcaaaggcaagctcatttttgggggagaaagcaagtgctgggctcctgggtgcccacgcagctgccatcacggcctatgccctgacactgaccaaggcccctgcggacctgcggggtgttgcccacaacaacctcatggcaatggcccaggagactggagataacctgtactggggctcagtcactggttctcagagcaatgccgtgtcgcccaccccagctcctcgcaacccatccgaccccatgccccaggccccagccctgtggattgaaaccacagcctacgccctgctgcacctcctgcttcacgagggcaaagcagagatggcagaccaggctgcggcctggctcacccgtcagggcagcttccaagggggattccgcagtacccaagacacggtgattgccctggatgccctgtctgcctactggattgcctcccacaccactgaggagaggggtctcaatgtgactctcagctccacaggccggaatgggttcaagtcccacgcgctgcagctgaacaaccgccagattcgcggcctggaggaggagctgcagttttccttgggcagcaagatcaatgtgaaggtgggaggaaacagcaaaggaaccctgaaggtccttcgtacctacaatgtcctggacatgaagaacacgacctgccaggacctacagatagaagtgacagtcaaaggccacgtcgagtacacgatggaagcaaacgaggactatgaggactatgagtacgatgagcttccagccaaggatgacccagatgcccctctgcagcccgtgacacccctgcagctgtttgagggtcggaggaaccgccgcaggagggaggcgcccaaggtggtggaggagcaggagtccagggtgcactacaccgtgtgcatctggcggaacggcaaggtggggctgtctggcatggccatcgcggacgtcaccctcctgagtggattccacgccctgcgtgctgacctggagaagctgacctccctctctgaccgttacgtgagtcactttgagaccgaggggccccacgtcctgctgtattttgactcggtccccacctcccgggagtgcgtgggctttgaggctgtgcaggaagtgccggtggggctggtgcagccggccagcgcaaccctgtacgactactacaaccccgagcgcagatgttctgtgttttacggggcaccaagtaagagcagactcttggccaccttgtgttctgctgaagtctgccagtgtgctgaggggaagtgccctcgccagcgtcgcgccctggagcggggtctgcaggacgaggatggctacaggatgaagtttgcctgctactacccccgtgtggagtacggcttccaggttaaggttctccgagaagacagcagagctgctttccgcctctttgagaccaagatcacccaagtcctgcacttcaccaaggatgtcaaggccgctgctaatcagatgcgcaacttcctggttcgagcctcctgccgccttcgcttggaacctgggaaagaatatttgatcatgggtctagatggggccacctatgacctcgagggacacccccagtacctgctggactcgaatagctggatcgaggagatgccctctgaacgcctgtgccggagcacccgccagcgggcagcctgtgcccagctcaacgacttcctccaggagtatggcactcaggggtgccaggtgtgagggctgccctcccacctccgctgggaggaacctgaacctgggaaccatgaagctggaagcactgctgtgtccgctttcatgaacacagcctgggaccagggcatattaaaggcttttggcagcaaagtgtcagtgttggca

SEQ ID NO: 121915 - DNA, 5237 bp, Homo sapiens
  Payload ID: 3891
  Gene Symbol: C4B
  Gene Name: complement component 4B (Chido blood group)
  ENST ID: ENST00000425700
  CDS Start-End: 1-5097
atgaggctgctctgggggctgatctgggcatccagcttcttcaccttatctctgcagaagcccaggttgctcttgttctctccttctgtggttcatctgggggtccccctatcggtgggggtgcagctccaggatgtgccccgaggacaggtagtgaaaggatcagtgttcctgagaaacccatctcgtaataatgtcccctgctccccaaaggtggacttcacccttagctcagaaagagacttcgcactcctcagtctccaggtgcccttgaaagatgcgaagagctgtggcctccatcaactcctcagaggccctgaggtccagctggtggcccattcgccatggctaaaggactctctgtccagaacgacaaacatccagggtatcaacctgctcttctcctctcgccgggggcacctctttttgcagacggaccagcccatttacaaccctggccagcgggttcggtaccgggtctttgctctggatcagaagatgcgcccgagcactgacaccatcacagtcatggtggagaactctcacggcctccgcgtgcggaagaaggaggtgtacatgccctcgtccatcttccaggatgactttgtgatcccagacatctcagagccagggacctggaagatctcagcccgattctcagatggcctggaatccaacagcagcacccagtttgaggtgaagaaatatgtccttcccaactttgaggtgaagatcacccctggaaagccctacatcctgacggtgccaggccatcttgatgaaatgcagttagacatccaggccaggtacatctatgggaagccagtgcagggggtggcatatgtgcgctttgggctcctagatgaggatggtaagaagactttctttcgggggctggagagtcagaccaagctggtgaatggacagagccacatttccctctcaaaggcagagttccaggacgccctggagaagctgaatatgggcattactgacctccaggggctgcgcctctacgttgctgcagccatcattgagtctccaggtggggagatggaggaggcagagctcacatcctggtattttgtgtcatctcccttctccttggatcttagcaagaccaagcgacaccttgtgcctggggcccccttcctgctgcaggccttggtccgtgagatgtcaggctccccagcttctggcattcctgtcaaagtttctgccacggtgtcttctcctgggtctgttcctgaagtccaggacattcagcaaaacacagacgggagcggccaagtcagcattccaataattatccctcagaccatctcagagctgcagctctcagtatctgcaggctccccacatccagcgatagccaggctcactgtggcagccccaccttcaggaggccccgggtttctgtctattgagcggccggattctcgacctcctcgtgttggggacactctgaacctgaacttgcgagccgtgggcagtggggccaccttttctcattactactacatgatcctatcccgagggcagatcgtgttcatgaatcgagagcccaagaggaccctgacctcggtctcggtgtttgtggaccatcacctggcaccctccttctactttgtggccttctactaccatggagaccacccagtggccaactccctgcgagtggatgtccaggctggggcctgcgagggcaagctggagctcagcgtggacggtgccaagcagtaccggaacggggagtccgtgaagctccacttagaaaccgactccctagccctggtggcgctgggagccttggacacagctctgtatgctgcaggcagcaagtcccacaagcccctcaacatgggcaaggtctttgaagctatgaacagctatgacctcggctgtggtcctgggggtggggacagtgcccttcaggtgttccaggcagcgggcctggccttttctgatggagaccagtggaccttatccagaaagagactaagctgtcccaaggagaagacaacccggaaaaagagaaacgtgaacttccaaaaggcgattaatgagaaattgggtcagtatgcttccccgacagccaagcgctgctgccaggatggggtgacacgtctgcccatgatgcgttcctgcgagcagcgggcagcccgcgtgcagcagccggactgccgggagcccttcctgtcctgctgccaatttgctgagagtctgcgcaagaagagcagggacaagggccaggcgggcctccaacgagccctggagatcctgcaggaggaggacctgattgatgaggatgacattcccgtgcgcagcttcttcccagagaactggctctggagagtggaaacagtggaccgctttcaaatattgacactgtggctccccgactctctgaccacgtgggagatccatggcctgagcctgtccaaaaccaaaggcctatgtgtggccaccccagtccagctccgggtgttccgcgagttccacctgcacctccgcctgcccatgtctgtccgccgctttgagcagctggagctgcggcctgtcctctataactacctggataaaaacctgactgtgagcgtccacgtgtccccagtggaggggctgtgcctggctgggggcggagggctggcccagcaggtgctggtgcctgcgggctctgcccggcctgttgccttctctgtggtgcccacggcagccaccgctgtgtctctgaaggtggtggctcgagggtccttcgaattccctgtgggagatgcggtgtccaaggttctgcagattgagaaggaaggggccatccatagagaggagctggtctatgaactcaaccccttggaccaccgaggccggaccttggaaatacctggcaactctgatcccaatatgatccctgatggggactttaacagctacgtcagggttacagcctcagatccattggacactttaggctctgagggggccttgtcaccaggaggcgtggcctccctcttgaggcttcctcgaggctgtggggagcaaaccatgatctacttggctccgacactggctgcttcccgctacctggacaagacagagcagtggagcacactgcctcccgagaccaaggaccacgccgtggatctgatccagaaaggctacatgcggatccagcagtttcggaaggcggatggttcctatgcggcttggttgtcacggggcagcagcacctggctcacagcctttgtgttgaaggtcctgagtttggcccaggagcaggtaggaggctcgcctgagaaactgcaggagacatctaactggcttctgtcccagcagcaggctgacggctcgttccaggacctctctccagtgatacataggagcatgcaggggggtttggtgggcaatgatgagactgtggcactcacagcctttgtgaccatcgcccttcatcatgggctggccgtcttccaggatgagggtgcagagccattgaagcagagagtggaagcctccatctcaaaggcaagctcatttttgggggagaaagcaagtgctgggctcctgggtgcccacgcagctgccatcacggcctatgccctgacactgaccaaggcccctgcggacctgcggggtgttgcccacaacaacctcatggcaatggcccaggagactggagataacctgtactggggctcagtcactggttctcagagcaatgccgtgtcgcccaccccggctcctcgcaacccatccgaccccatgccccaggccccagccctgtggattgaaaccacagcctacgccctgctgcacctcctgcttcacgagggcaaagcagagatggcagaccaggctgcggcctggctcacccgtcagggcagcttccaagggggattccgcagtacccaagacacggtgattgccctggatgccctgtctgcctactggattgcctcccacaccactgaggagaggggtctcaatgtgactctcagctccacaggccggaatgggttcaagtcccacgcgctgcagctgaacaaccgccagattcgcggcctggaggaggagctgcagttttccttgggcagcaagatcaatgtgaaggtgggaggaaacagcaaaggaaccctgaaggtccttcgtacctacaatgtcctggacatgaagaacacgacctgccaggacctacagatagaagtgacagtcaaaggccacgtcgagtacacgatggaagcaaacgaggactatgaggactatgagtacgatgagcttccagccaaggatgacccagatgcccctctgcagcccgtgacacccctgcagctgtttgagggtcggaggaaccgccgcaggagggaggcgcccaagctgacctccctctctgaccgttacgtgagtcactttgagaccgaggggccccacgtcctgctgtattttgactcggtccccacctcccgggagtgcgtgggctttgaggctgtgcaggaagtgccggtggggctggtgcagccggccagcgcaaccctgtacgactactacaaccccgagcgcagatgttctgtgttttacggggcaccaagtaagagcagactcttggccaccttgtgttctgctgaagtctgccagtgtgctgaggggaagtgccctcgccagcgtcgcgccctggagcggggtctgcaggacgaggatggctacaggatgaagtttgcctgctactacccccgtgtggagtacggcttccaggttaaggttctccgagaagacagcagagctgctttccgcctctttgagaccaagatcacccaagtcctgcacttcaccaaggatgtcaaggccgctgctaatcagatgcgcaacttcctggttcgagcctcctgccgccttcgcttggaacctgggaaagaatatttgatcatgggtctggatggggccacctatgacctcgagggacacccccagtacctgctggactcgaatagctggatcgaggagatgccctctgaacgcctgtgccggagcacccgccagcgggcagcctgtgcccagctcaacgacttcctccaggagtatggcactcaggggtgccaggtgtgagggctgccctcccacctccgctgggaggaacctgaacctgggaaccatgaagctggaagcactgctgtgtccgctttcatgaacacagcctgggaccagggcatattaaaggcttttggcagcaaagtgtcagtgttggc

SEQ ID NO: 121916 - DNA, 5460 bp, Homo sapiens
  Payload ID: 3891
  Gene Symbol: C4B
  Gene Name: complement component 4B (Chido blood group)
  Uniprot ID: P0C0L5
  ENST ID: ENST00000411583
  CDS Start-End: 85-5319
agagtcaactctgccccgaggcctagcttggccagaaggtagcagacagacagacggatctaacctctcttggatcctccagccatgaggctgctctgggggctgatctgggcatccagcttcttcaccttatctctgcagaagcccaggttgctcttgttctctccttctgtggttcatctgggggtccccctatcggtgggggtgcagctccaggatgtgccccgaggacaggtagtgaaaggatcagtgttcctgagaaacccatctcgtaataatgtcccctgctccccaaaggtggacttcacccttagctcagaaagagacttcgcactcctcagtctccaggtgcccttgaaagatgcgaagagctgtggcctccatcaactcctcagaggccctgaggtccagctggtggcccattcgccatggctaaaggactctctgtccagaacgacaaacatccagggtatcaacctgctcttctcctctcgccgggggcacctctttttgcagacggaccagcccatttacaaccctggccagcgggttcggtaccgggtctttgctctggatcagaagatgcgcccgagcactgacaccatcacagtcatggtggagaactctcacggcctccgcgtgcggaagaaggaggtgtacatgccctcgtccatcttccaggatgactttgtgatcccagacatctcagagccagggacctggaagatctcagcccgattctcagatggcctggaatccaacagcagcacccagtttgaggtgaagaaatatgtccttcccaactttgaggtgaagatcacccctggaaagccctacatcctgacggtgccaggccatcttgatgaaatgcagttagacatccaggccaggtacatctatgggaagccagtgcagggggtggcatatgtgcgctttgggctcctagatgaggatggtaagaagactttctttcgggggctggagagtcagaccaagctggtgaatggacagagccacatttccctctcaaaggcagagttccaggacgccctggagaagctgaatatgggcattactgacctccaggggctgcgcctctacgttgctgcagccatcattgagtctccaggtggggagatggaggaggcagagctcacatcctggtattttgtgtcatctcccttctccttggatcttagcaagaccaagcgacaccttgtgcctggggcccccttcctgctgcaggccttggtccgtgagatgtcaggctccccagcttctggcattcctgtcaaagtttctgccacggtgtcttctcctgggtctgttcctgaagtccaggacattcagcaaaacacagacgggagcggccaagtcagcattccaataattatccctcagaccatctcagagctgcagctctcagtatctgcaggctccccacatccagcgatagccaggctcactgtggcagccccaccttcaggaggccccgggtttctgtctattgagcggccggattctcgacctcctcgtgttggggacactctgaacctgaacttgcgagccgtgggcagtggggccaccttttctcattactactacatgatcctatcccgagggcagatcgtgttcatgaatcgagagcccaagaggaccctgacctcggtctcggtgtttgtggaccatcacctggcaccctccttctactttgtggccttctactaccatggagaccacccagtggccaactccctgcgagtggatgtccaggctggggcctgcgagggcaagctggagctcagcgtggacggtgccaagcagtaccggaacggggagtccgtgaagctccacttagaaaccgactccctagccctggtggcgctgggagccttggacacagctctgtatgctgcaggcagcaagtcccacaagcccctcaacatgggcaaggtctttgaagctatgaacagctatgacctcggctgtggtcctgggggtggggacagtgcccttcaggtgttccaggcagcgggcctggccttttctgatggagaccagtggaccttatccagaaagagactaagctgtcccaaggagaagacaacccggaaaaagagaaacgtgaacttccaaaaggcgattaatgagaaattgggtcagtatgcttccccgacagccaagcgctgctgccaggatggggtgacacgtctgcccatgatgcgttcctgcgagcagcgggcagcccgcgtgcagcagccggactgccgggagcccttcctgtcctgctgccaatttgctgagagtctgcgcaagaagagcagggacaagggccaggcgggcctccaacgagccctggagatcctgcaggaggaggacctgattgatgaggatgacattcccgtgcgcagcttcttcccagagaactggctctggagagtggaaacagtggaccgctttcaaatattgacactgtggctccccgactctctgaccacgtgggagatccatggcctgagcctgtccaaaaccaaaggcctatgtgtggccaccccagttcagctccgggtgttccgcgagttccacctgcacctccgcctgcccatgtctgtccgccgctttgagcagctggagctgcggcctgtcctctataactacctggataaaaacctgactgtgagcgtccacgtgtccccagtggaggggctgtgcctggctgggggcggagggctggcccagcaggtgctggtgcctgcgggctctgcccggcctgttgccttctctgtggtgcccacggcagccaccgctgtgtctctgaaggtggtggctcgagggtccttcgaattccctgtgggagatgcggtgtccaaggttctgcagattgagaaggaaggggccatccatagagaggagctggtctatgaactcaaccccttggaccaccgaggccggaccttggaaatacctggcaactctgatcccaatatgatccctgatggggactttaacagctacgtcagggttacagcctcagatccattggacactttaggctctgagggggccttgtcaccaggaggcgtggcctccctcttgaggcttcctcgaggctgtggggagcaaaccatgatctacttggctccgacactggctgcttcccgctacctggacaagacagagcagtggagcacactgcctcccgagaccaaggaccacgccgtggatctgatccagaaaggctacatgcggatccagcagtttcggaaggcggatggttcctatgcggcttggttgtcacggggcagcagcacctggctcacagcctttgtgttgaaggtcctgagtttggcccaggagcaggtaggaggctcgcctgagaaactgcaggagacatctaactggcttctgtcccagcagcaggctgacggctcgttccaggacctctctccagtgatacataggagcatgcaggggggtttggtgggcaatgatgagactgtggcactcacagcctttgtgaccatcgcccttcatcatgggctggccgtcttccaggatgagggtgcagagccattgaagcagagagtggaagcctccatctcaaaggcaagctcatttttgggggagaaagcaagtgctgggctcctgggtgcccacgcagctgccatcacggcctatgccctgacactgaccaaggcccctgcggacctgcggggtgttgcccacaacaacctcatggcaatggcccaggagactggagataacctgtactggggctcagtcactggttctcagagcaatgccgtgtcgcccaccccggctcctcgcaacccatccgaccccatgccccaggccccagccctgtggattgaaaccacagcctacgccctgctgcacctcctgcttcacgagggcaaagcagagatggcagaccaggctgcggcctggctcacccgtcagggcagcttccaagggggattccgcagtacccaagacacggtgattgccctggatgccctgtctgcctactggattgcctcccacaccactgaggagaggggtctcaatgtgactctcagctccacaggccggaatgggttcaagtcccacgcgctgcagctgaacaaccgccagattcgcggcctggaggaggagctgcagttttccttgggcagcaagatcaatgtgaaggtgggaggaaacagcaaaggaaccctgaaggtccttcgtacctacaatgtcctggacatgaagaacacgacctgccaggacctacagatagaagtgacagtcaaaggccacgtcgagtacacgatggaagcaaacgaggactatgaggactatgagtacgatgagcttccagccaaggatgacccagatgcccctctgcagcccgtgacacccctgcagctgtttgagggtcggaggaaccgccgcaggagggaggcgcccaaggtggtggaggagcaggagtccagggtgcactacaccgtgtgcatctggcggaacggcaaggtggggctgtctggcatggccatcgcggacgtcaccctcctgagtggattccacgccctgcgtgctgacctggagaagctgacctccctctctgaccgttacgtgagtcactttgagaccgaggggccccacgtcctgctgtattttgactcggtccccacctcccgggagtgcgtgggctttgaggctgtgcaggaagtgccggtggggctggtgcagccggccagcgcaaccctgtacgactactacaaccccgagcgcagatgttctgtgttttacggggcaccaagtaagagcagactcttggccaccttgtgttctgctgaagtctgccagtgtgctgaggggaagtgccctcgccagcgtcgcgccctggagcggggtctgcaggacgaggatggctacaggatgaagtttgcctgctactacccccgtgtggagtacggcttccaggttaaggttctccgagaagacagcagagctgctttccgcctctttgagaccaagatcacccaagtcctgcacttcaccaaggatgtcaaggccgctgctaatcagatgcgcaacttcctggttcgagcctcctgccgccttcgcttggaacctgggaaagaatatttgatcatgggtctggatggggccacctatgacctcgagggacacccccagtacctgctggactcgaatagctggatcgaggagatgccctctgaacgcctgtgccggagcacccgccagcgggcagcctgtgcccagctcaacgacttcctccaggagtatggcactcaggggtgccaggtgtgagggctgccctcccacctccgctgggaggaacctgaacctgggaaccatgaagctggaagcactgctgtgtccgctttcatgaacacagcctgggaccagggcatattaaaggcttttggcagcaaagtgtcagtgttggca

SEQ ID NO: 121917 - DNA, 5460 bp, Homo sapiens
  Payload ID: 3891
  Gene Symbol: C4B
  Gene Name: complement component 4B (Chido blood group)
  Uniprot ID: P0C0L5
  ENST ID: ENST00000449788
  CDS Start-End: 85-5319
agagtcaactctgccccgaggcctagcttggccagaaggtagcagacagacagacggatctaacctctcttggatcctccagccatgaggctgctctgggggctgatctgggcatccagcttcttcaccttatctctgcagaagcccaggttgctcttgttctctccttctgtggttcatctgggggtccccctatcggtgggggtgcagctccaggatgtgccccgaggacaggtagtgaaaggatcagtgttcctgagaaacccatctcgtaataatgtcccctgctccccaaaggtggacttcacccttagctcagaaagagactttgcactcctcagtctccaggtgcccttgaaagatgcgaagagctgtggcctccatcaactcctcagaggccctgaggtccagctggtggcccattcgccatggctaaaggactctctgtccagaacgacaaacatccagggtatcaacctgctcttctcctctcgccgggggcacctctttttgcagacggaccagcccatttacaaccctggccagcgggttcggtaccgggtctttgctctggatcagaagatgcgcccgagcactgacaccatcacagtcatggtggagaactctcacggcctccgcgtgcggaagaaggaggtgtacatgccctcgtccatcttccaggatgactttgtgatcccagacatctcagagccagggacctggaagatctcagcccgattctcagatggcctggaatccaacagcagcacccagtttgaggtgaagaaatatgtccttcccaactttgaggtgaagatcacccctggaaagccctacatcctgacggtgccaggccatcttgatgaaatgcagttagacatccaggccaggtacatctatgggaagccagtgcagggggtggcatatgtgcgctttgggctcctagatgaggatggtaagaagactttctttcgggggctggagagtcagaccaagctggtgaatggacagagccacatttccctctcaaaggcagagttccaggacgccctggagaagctgaatatgggcattactgacctccaggggctgcgcctctacgttgctgcagccatcattgagtctccaggtggggagatggaggaggcagagctcacatcctggtattttgtgtcatctcccttctccttggatcttagcaagaccaagcgacaccttgtgcctggggcccccttcctgctgcaggccttggtccgtgagatgtcaggctccccagcttctggcattcctgtcaaagtttctgccacggtgtcttctcctgggtctgttcctgaagtccaggacattcagcaaaacacagacgggagcggccaagtcagcattccaataattatccctcagaccatctcagagctgcagctctcagtatctgcaggctccccacatccagcgatagccaggctcactgtggcagccccaccttcaggaggccccgggtttctgtctattgagcggccggattctcgacctcctcgtgttggggacactctgaacctgaacttgcgagccgtgggcagtggggccaccttttctcattactactacatgatcctatcccgagggcagatcgtgttcatgaatcgagagcccaagaggaccctgacctcggtctcggtgtttgtggaccatcacctggcaccctccttctactttgtggccttctactaccatggagaccacccagtggccaactccctgcgagtggatgtccaggctggggcctgcgagggcaagctggagctcagcgtggacggtgccaagcagtaccggaacggggagtccgtgaagctccacttagaaaccgactccctagccctggtggcgctgggagccttggacacagctctgtatgctgcaggcagcaagtcccacaagcccctcaacatgggcaaggtctttgaagctatgaacagctatgacctcggctgtggtcctgggggtggggacagtgcccttcaggtgttccaggcagcgggcctggccttttctgatggagaccagtggaccttatccagaaagagactaagctgtcccaaggagaagacaacccggaaaaagagaaacgtgaacttccaaaaggcgattaatgagaaattgggtcagtatgcttccccgacagccaagcgctgctgccaggatggggtgacacgtctgcccatgatgcgttcctgcgagcagcgggcagcccgcgtgcagcagccggactgccgggagcccttcctgtcctgctgccaatttgctgagagtctgcgcaagaagagcagggacaagggccaggcgggcctccaacgagccctggagatcctgcaggaggaggacctgattgatgaggatgacattcccgtgcgcagcttcttcccagagaactggctctggagagtggaaacagtggaccgctttcaaatattgacactgtggctccccgactctctgaccacgtgggagatccatggcctgagcctgtccaaaaccaaaggcctatgtgtggccaccccagtccagctccgggtgttccgcgagttccacctgcacctccgcctgcccatgtctgtccgccgctttgagcagctggagctgcggcctgtcctctataactacctggataaaaacctgactgtgagcgtccacgtgtccccagtggaggggctgtgcctggctgggggcggagggctggcccagcaggtgctggtgcctgcgggctctgcccggcctgttgccttctctgtggtgcccacggcagccgccgctgtgtctctgaaggtggtggctcgagggtccttcgaattccctgtgggagatgcggtgtccaaggttctgcagattgagaaggaaggggccatccatagagaggagctggtctatgaactcaaccccttggaccaccgaggccggaccttggaaatacctggcaactctgatcccaatatgatccctgatggggactttaacagctacgtcagggttacagcctcagatccattggacactttaggctctgagggggccttgtcaccaggaggcgtggcctccctcttgaggcttcctcgaggctgtggggagcaaaccatgatctacttggctccgacactggctgcttcccgctacctggacaagacagagcagtggagcacactgcctcccgagaccaaggaccacgccgtggatctgatccagaaaggctacatgcggatccagcagtttcggaaggcggatggttcctatgcggcttggttgtcacggggcagcagcacctggctcacagcctttgtgttgaaggtcctgagtttggcccaggagcaggtaggaggctcgcctgagaaactgcaggagacatctaactggcttctgtcccagcagcaggctgacggctcgttccaggacctctctccagtgatacataggagcatgcaggggggtttggtgggcaatgatgagactgtggcactcacagcctttgtgaccatcgcccttcatcatgggctggccgtcttccaggatgagggtgcagagccattgaagcagagagtggaagcctccatctcaaaggcaaactcatttttgggggagaaagcaagtgctgggctcctgggtgcccacgcagctgccatcacggcctatgccctgacactgaccaaggcccctgcggacctgcggggtgttgcccacaacaacctcatggcaatggcccaggagactggagataacctgtactggggctcagtcactggttctcagagcaatgccgtgtcgcccaccccggctcctcgcaacccatccgaccccatgccccaggccccagccctgtggattgaaaccacagcctacgccctgctgcacctcctgcttcacgagggcaaagcagagatggcagaccaggctgcggcctggctcacccgtcagggcagcttccaagggggattccgcagtacccaagacacggtgattgccctggatgccctgtctgcctactggattgcctcccacaccactgaggagaggggtctcaatgtgactctcagctccacaggccggaatgggttcaagtcccacgcgctgcagctgaacaaccgccagattcgcggcctggaggaggagctgcagttttccttgggcagcaagatcaatgtgaaggtgggaggaaacagcaaaggaaccctgaaggtccttcgtacctacaatgtcctggacatgaagaacacgacctgccaggacctacagatagaagtgacagtcaaaggccacgtcgagtacacgatggaagcaaacgaggactatgaggactatgagtacgatgagcttccagccaaggatgacccagatgcccctctgcagcccgtgacacccctgcagctgtttgagggtcggaggaaccgccgcaggagggaggcgcccaaggtggtggaggagcaggagtccagggtgcactacaccgtgtgcatctggcggaacggcaaggtggggctgtctggcatggccatcgcggacgtcaccctcctgagtggattccacgccctgcgtgctgacctggagaagctgacctccctctctgaccgttacgtgagtcactttgagaccgaggggccccacgtcctgctgtattttgactcggtccccacctcccgggagtgcgtgggctttgaggctgtgcaggaagtgccggtggggctggtgcagccggccagcgcaaccctgtacgactactacaaccccgagcgcagatgttctgtgttttacggggcaccaagtaagagcagactcttggccaccttgtgttctgctgaagtctgccagtgtgctgaggggaagtgccctcgccagcgtcgcgccctggagcggggtctgcaggacgaggatggctacaggatgaagtttgcctgctactacccccgtgtggagtacggcttccaggttaaggttctccgagaagacagcagagctgctttccgcctctttgagaccaagatcacccaagtcctgcacttcaccaaggatgtcaaggccgctgctaatcagatgcgcaacttcctggttcgagcctcctgccgccttcgcttggaacctgggaaagaatatttgatcatgggtctggatggggccacctatgacctcgagggacacccccagtacctgctggactcgaatagctggatcgaggagatgccctctgaacgcctgtgccggagcacccgccagcgggcagcctgtgcccagctcaacgacttcctccaggagtatggcactcaggggtgccaggtgtgagggctgccctcccacctccgctgggaggaacctgaacctgggaaccatgaagctggaagcactgctgtgtccgctttcatgaacacagcctgggaccagggcatattaaaggcttttggcagcaaagtgtcagtgttggca

SEQ ID NO: 121918 - DNA, 5460 bp, Homo sapiens
  Payload ID: 3891
  Gene Symbol: C4B
  Gene Name: complement component 4B (Chido blood group)
  Uniprot ID: P0C0L5
  ENST ID: ENST00000435363
  CDS Start-End: 85-5319
agagtcaactctgccccgaggcctagcttggccagaaggtagcagacagacagacggatctaacctctcttggatcctccagccatgaggctgctctgggggctgatctgggcatccagcttcttcaccttatctctgcagaagcccaggttgctcttgttctctccttctgtggttcatctgggggtccccctatcggtgggggtgcagctccaggatgtgccccgaggacaggtagtgaaaggatcagtgttcctgagaaacccatctcgtaataatgtcccctgctccccaaaggtggacttcacccttagctcagaaagagacttcgcactcctcagtctccaggtgcccttgaaagatgcgaagagctgtggcctccatcaactcctcagaggccctgaggtccagctggtggcccattcgccatggctaaaggactctctgtccagaacgacaaacatccagggtatcaacctgctcttctcctctcgccgggggcacctctttttgcagacggaccagcccatttacaaccctggccagcgggttcggtaccgggtctttgctctggatcagaagatgcgcccgagcactgacaccatcacagtcatggtggagaactctcacggcctccgcgtgcggaagaaggaggtgtacatgccctcgtccatcttccaggatgactttgtgatcccagacatctcagagccagggacctggaagatctcagcccgattctcagatggcctggaatccaacagcagcacccagtttgaggtgaagaaatatgtccttcccaactttgaggtgaagatcacccctggaaagccctacatcctgacggtgccaggccatcttgatgaaatgcagttagacatccaggccaggtacatctatgggaagccagtgcagggggtggcatatgtgcgctttgggctcctagatgaggatggtaagaagactttctttcgggggctggagagtcagaccaagctggtgaatggacagagccacatttccctctcaaaggcagagttccaggacgccctggagaagctgaatatgggcattactgacctccaggggctgcgcctctacgttgctgcagccatcattgagtctccaggtggggagatggaggaggcagagctcacatcctggtattttgtgtcatctcccttctccttggatcttagcaagaccaagcgacaccttgtgcctggggcccccttcctgctgcaggccttggtccgtgagatgtcaggctccccagcttctggcattcctgtcaaagtttctgccacggtgtcttctcctgggtctgttcctgaagtccaggacattcagcaaaacacagacgggagcggccaagtcagcattccaataattatccctcagaccatctcagagctgcagctctcagtatctgcaggctccccacatccagcgatagccaggctcactgtggcagccccaccttcaggaggccccgggtttctgtctattgagcggccggattctcgacctcctcgtgttggggacactctgaacctgaacttgcgagccgtgggcagtggggccaccttttctcattactactacatgatcctatcccgagggcagatcgtgttcatgaatcgagagcccaagaggaccctgacctcggtctcggtgtttgtggaccatcacctggcaccctccttctactttgtggccttctactaccatggagaccacccagtggccaactccctgcgagtggatgtccaggctggggcctgcgagggcaagctggagctcagcgtggacggtgccaagcagtaccggaacggggagtccgtgaagctccacttagaaaccgactccctagccctggtggcgctgggagccttggacacagctctgtatgctgcaggcagcaagtcccacaagcccctcaacatgggcaaggtctttgaagctatgaacagctatgacctcggctgtggtcctgggggtggggacagtgcccttcaggtgttccaggcagcgggcctggccttttctgatggagaccagtggaccttatccagaaagagactaagctgtcccaaggagaagacaacccggaaaaagagaaacgtgaacttccaaaaggcgattaatgagaaattgggtcagtatgcttccccgacagccaagcgctgctgccaggatggggtgacacgtctgcccatgatgcgttcctgcgagcagcgggcagcccgcgtgcagcagccggactgccgggagcccttcctgtcctgctgccaatttgctgagagtctgcgcaagaagagcagggacaagggccaggcgggcctccaacgagccctggagatcctgcaggaggaggacctgattgatgaggatgacattcccgtgcgcagcttcttcccagagaactggctctggagagtggaaacagtggaccgctttcaaatattgacactgtggctccccgactctctgaccacgtgggagatccatggcctgagcctgtccaaaaccaaaggcctatgtgtggccaccccagtccagctccgggtgttccgcgagttccacctgcacctccgcctgcccatgtctgtccgccgctttgagcagctggagctgcggcctgtcctctataactacctggataaaaacctgactgtgagcgtccacgtgtccccagtggaggggctgtgcctggctgggggcggagggctggcccagcaggtgctggtgcctgcgggctctgcccggcctgttgccttctctgtggtgcccacggcagccaccgctgtgtctctgaaggtggtggctcgagggtccttcgaattccctgtgggagatgcggtgtccaaggttctgcagattgagaaggaaggggccatccatagagaggagctggtctatgaactcaaccccttggaccaccgaggccggaccttggaaatacctggcaactctgatcccaatatgatccctgatggggactttaacagctacgtcagggttacagcctcagatccattggacactttaggctctgagggggccttgtcaccaggaggcgtggcctccctcttgaggcttcctcgaggctgtggggagcaaaccatgatctacttggctccgacactggctgcttcccgctacctggacaagacagagcagtggagcacactgcctcccgagaccaaggaccacgccgtggatctgatccagaaaggctacatgcggatccagcagtttcggaaggcggatggttcctatgcggcttggttgtcacggggcagcagcacctggctcacagcctttgtgttgaaggtcctgagtttggcccaggagcaggtaggaggctcgcctgagaaactgcaggagacatctaactggcttctgtcccagcagcaggctgacggctcgttccaggacctctctccagtgatacataggagcatgcaggggggtttggtgggcaatgatgagactgtggcactcacagcctttgtgaccatcgcccttcatcatgggctggccgtcttccaggatgagggtgcagagccattgaagcagagagtggaagcctccatctcaaaggcaagctcatttttgggggagaaagcaagtgctgggctcctgggtgcccacgcagctgccatcacggcctatgccctgacactgaccaaggcccctgcggacctgcggggtgttgcccacaacaacctcatggcaatggcccaggagactggagataacctgtactggggctcagtcactggttctcagagcaatgccgtgtcgcccaccccggctcctcgcaacccatccgaccccatgccccaggccccagccctgtggattgaaaccacagcctacgccctgctgcacctcctgcttcacgagggcaaagcagagatggcagaccaggctgcggcctggctcacccgtcagggcagcttccaagggggattccgcagtacccaagacacggtgattgccctggatgccctgtctgcctactggattgcctcccacaccactgaggagaggggtctcaatgtgactctcagctccacaggccggaatgggttcaagtcccacgcgctgcagctgaacaaccgccagattcgcggcctggaggaggagctgcagttttccttgggcagcaagatcaatgtgaaggtgggaggaaacagcaaaggaaccctgaaggtccttcgtacctacaatgtcctggacatgaagaacacgacctgccaggacctacagatagaagtgacagtcaaaggccacgtcgagtacacgatggaagcaaacgaggactatgaggactatgagtacgatgagcttccagccaaggatgacccagatgcccctctgcagcccgtgacacccctgcagctgtttgagggtcggaggaaccgccgcaggagggaggcgcccaaggtggtggaggagcaggagtccagggtgcactacaccgtgtgcatctggcggaacggcaaggtggggctgtctggcatggccatcgcggacgtcaccctcctgagtggattccacgccctgcgtgctgacctggagaagctgacctccctctctgaccgttacgtgagtcactttgagaccgaggggccccacgtcctgctgtattttgactcggtccccacctcccgggagtgcgtgggctttgaggctgtgcaggaagtgccggtggggctggtgcagccggccagcgcaaccctgtacgactactacaaccccgagcgcagatgttctgtgttttacggggcaccaagtaagagcagactcttggccaccttgtgttctgctgaagtctgccagtgtgctgaggggaagtgccctcgccagcgtcgcgccctggagcggggtctgcaggacgaggatggctacaggatgaagtttgcctgctactacccccgtgtggagtacggcttccaggttaaggttctccgagaagacagcagagctgctttccgcctctttgagaccaagatcacccaagtcctgcacttcaccaaggatgtcaaggccgctgctaatcagatgcgcaacttcctggttcgagcctcctgccgccttcgcttggaacctgggaaagaatatttgatcatgggtctggatggggccacctatgacctcgagggacacccccagtacctgctggactcgaatagctggatcgaggagatgccctctgaacgcctgtgccggagcacccgccagcgggcagcctgtgcccagctcaacgacttcctccaggagtatggcactcaggggtgccaggtgtgagggctgccctcccacctccgctgggaggaacctgaacctgggaaccatgaagctggaagcactgctgtgtccgctttcatgaacacagcctgggaccagggcatattaaaggcttttggcagcaaagtgtcagtgttggca

SEQ ID NO: 121919 - DNA, 5237 bp, Homo sapiens
  Payload ID: 3891
  Gene Symbol: C4B
  Gene Name: complement component 4B (Chido blood group)
  ENST ID: ENST00000546399
  CDS Start-End: 1-5097
atgaggctgctctgggggctgatctgggcatccagcttcttcaccttatctctgcagaagcccaggttgctcttgttctctccttctgtggttcatctgggggtccccctatcggtgggggtgcagctccaggatgtgccccgaggacaggtagtgaaaggatcagtgttcctgagaaacccatctcgtaataatgtcccctgctccccaaaggtggacttcacccttagctcagaaagagactttgcactcctcagtctccaggtgcccttgaaagatgcgaagagctgtggcctccatcaactcctcagaggccctgaggtccagctggtggcccattcgccatggctaaaggactctctgtccagaacgacaaacatccagggtatcaacctgctcttctcctctcgccgggggcacctctttttgcagacggaccagcccatttacaaccctggccagcgggttcggtaccgggtctttgctctggatcagaagatgcgcccgagcactgacaccatcacagtcatggtggagaactctcacggcctccgcgtgcggaagaaggaggtgtacatgccctcgtccatcttccaggatgactttgtgatcccagacatctcagagccagggacctggaagatctcagcccgattctcagatggcctggaatccaacagcagcacccagtttgaggtgaagaaatatgtccttcccaactttgaggtgaagatcacccctggaaagccctacatcctgacggtgccaggccatcttgatgaaatgcagttagacatccaggccaggtacatctatgggaagccagtgcagggggtggcatatgtgcgctttgggctcctagatgaggatggtaagaagactttctttcgggggctggagagtcagaccaagctggtgaatggacagagccacatttccctctcaaaggcagagttccaggacgccctggagaagctgaatatgggcattactgacctccaggggctgcgcctctacgttgctgcagccatcattgagtctccaggtggggagatggaggaggcagagctcacatcctggtattttgtgtcatctcccttctccttggatcttagcaagaccaagcgacaccttgtgcctggggcccccttcctgctgcaggccttggtccgtgagatgtcaggctccccagcttctggcattcctgtcaaagtttctgccacggtgtcttctcctgggtctgttcctgaagtccaggacattcagcaaaacacagacgggagcggccaagtcagcattccaataattatccctcagaccatctcagagctgcagctctcagtatctgcaggctccccacatccagcgatagccaggctcactgtggcagccccaccttcaggaggccccgggtttctgtctattgagcggccggattctcgacctcctcgtgttggggacactctgaacctgaacttgcgagccgtgggcagtggggccaccttttctcattactactacatgatcctatcccgagggcagatcgtgttcatgaatcgagagcccaagaggaccctgacctcggtctcggtgtttgtggaccatcacctggcaccctccttctactttgtggccttctactaccatggagaccacccagtggccaactccctgcgagtggatgtccaggctggggcctgcgagggcaagctggagctcagcgtggacggtgccaagcagtaccggaacggggagtccgtgaagctccacttagaaaccgactccctagccctggtggcgctgggagccttggacacagctctgtatgctgcaggcagcaagtcccacaagcccctcaacatgggcaaggtctttgaagctatgaacagctatgacctcggctgtggtcctgggggtggggacagtgcccttcaggtgttccaggcagcgggcctggccttttctgatggagaccagtggaccttatccagaaagagactaagctgtcccaaggagaagacaacccggaaaaagagaaacgtgaacttccaaaaggcgattaatgagaaattgggtcagtatgcttccccgacagccaagcgctgctgccaggatggggtgacacgtctgcccatgatgcgttcctgcgagcagcgggcagcccgcgtgcagcagccggactgccgggagcccttcctgtcctgctgccaatttgctgagagtctgcgcaagaagagcagggacaagggccaggcgggcctccaacgagccctggagatcctgcaggaggaggacctgattgatgaggatgacattcccgtgcgcagcttcttcccagagaactggctctggagagtggaaacagtggaccgctttcaaatattgacactgtggctccccgactctctgaccacgtgggagatccatggcctgagcctgtccaaaaccaaaggcctatgtgtggccaccccagtccagctccgggtgttccgcgagttccacctgcacctccgcctgcccatgtctgtccgccgctttgagcagctggagctgcggcctgtcctctataactacctggataaaaacctgactgtgagcgtccacgtgtccccagtggaggggctgtgcctggctgggggcggagggctggcccagcaggtgctggtgcctgcgggctctgcccggcctgttgccttctctgtggtgcccacggcagccgccgctgtgtctctgaaggtggtggctcgagggtccttcgaattccctgtgggagatgcggtgtccaaggttctgcagattgagaaggaaggggccatccatagagaggagctggtctatgaactcaaccccttggaccaccgaggccggaccttggaaatacctggcaactctgatcccaatatgatccctgatggggactttaacagctacgtcagggttacagcctcagatccattggacactttaggctctgagggggccttgtcaccaggaggcgtggcctccctcttgaggcttcctcgaggctgtggggagcaaaccatgatctacttggctccgacactggctgcttcccgctacctggacaagacagagcagtggagcacactgcctcccgagaccaaggaccacgccgtggatctgatccagaaaggctacatgcggatccagcagtttcggaaggcggatggttcctatgcggcttggttgtcacggggcagcagcacctggctcacagcctttgtgttgaaggtcctgagtttggcccaggagcaggtaggaggctcgcctgagaaactgcaggagacatctaactggcttctgtcccagcagcaggctgacggctcgttccaggacctctctccagtgatacataggagcatgcaggggggtttggtgggcaatgatgagactgtggcactcacagcctttgtgaccatcgcccttcatcatgggctggccgtcttccaggatgagggtgcagagccattgaagcagagagtggaagcctccatctcaaaggcaaactcatttttgggggagaaagcaagtgctgggctcctgggtgcccacgcagctgccatcacggcctatgccctgacactgaccaaggcccctgcggacctgcggggtgttgcccacaacaacctcatggcaatggcccaggagactggagataacctgtactggggctcagtcactggttctcagagcaatgccgtgtcgcccaccccggctcctcgcaacccatccgaccccatgccccaggccccagccctgtggattgaaaccacagcctacgccctgctgcacctcctgcttcacgagggcaaagcagagatggcagaccaggctgcggcctggctcacccgtcagggcagcttccaagggggattccgcagtacccaagacacggtgattgccctggatgccctgtctgcctactggattgcctcccacaccactgaggagaggggtctcaatgtgactctcagctccacaggccggaatgggttcaagtcccacgcgctgcagctgaacaaccgccagattcgcggcctggaggaggagctgcagttttccttgggcagcaagatcaatgtgaaggtgggaggaaacagcaaaggaaccctgaaggtccttcgtacctacaatgtcctggacatgaagaacacgacctgccaggacctacagatagaagtgacagtcaaaggccacgtcgagtacacgatggaagcaaacgaggactatgaggactatgagtacgatgagcttccagccaaggatgacccagatgcccctctgcagcccgtgacacccctgcagctgtttgagggtcggaggaaccgccgcaggagggaggcgcccaagctgacctccctctctgaccgttacgtgagtcactttgagaccgaggggccccacgtcctgctgtattttgactcggtccccacctcccgggagtgcgtgggctttgaggctgtgcaggaagtgccggtggggctggtgcagccggccagcgcaaccctgtacgactactacaaccccgagcgcagatgttctgtgttttacggggcaccaagtaagagcagactcttggccaccttgtgttctgctgaagtctgccagtgtgctgaggggaagtgccctcgccagcgtcgcgccctggagcggggtctgcaggacgaggatggctacaggatgaagtttgcctgctactacccccgtgtggagtacggcttccaggttaaggttctccgagaagacagcagagctgctttccgcctctttgagaccaagatcacccaagtcctgcacttcaccaaggatgtcaaggccgctgctaatcagatgcgcaacttcctggttcgagcctcctgccgccttcgcttggaacctgggaaagaatatttgatcatgggtctggatggggccacctatgacctcgagggacacccccagtacctgctggactcgaatagctggatcgaggagatgccctctgaacgcctgtgccggagcacccgccagcgggcagcctgtgcccagctcaacgacttcctccaggagtatggcactcaggggtgccaggtgtgagggctgccctcccacctccgctgggaggaacctgaacctgggaaccatgaagctggaagcactgctgtgtccgctttcatgaacacagcctgggaccagggcatattaaaggcttttggcagcaaagtgtcagtgttggc

SEQ ID NO: 121920 - DNA, 5237 bp, Homo sapiens
  Payload ID: 3891
  Gene Symbol: C4B
  Gene Name: complement component 4B (Chido blood group)
  ENST ID: ENST00000548301
  CDS Start-End: 1-5097
atgaggctgctctgggggctgatctgggcatccagcttcttcaccttatctctgcagaagcccaggttgctcttgttctctccttctgtggttcatctgggggtccccctatcggtgggggtgcagctccaggatgtgccccgaggacaggtagtcaaaggatcagtgttcctgagaaacccatctcgtaataatgtcccctgctccccaaaggtggacttcacccttagctcagaaagagacttcgcactcctcagtctccaggtgcccttgaaagatgcgaagagctgtggcctccatcaactcctcagaggccctgaggtccagctggtggcccattcgccatggctaaaggactctctgtccagaacgacaaacatccagggtatcaacctgctcttctcctctcgccgggggcacctctttttgcagacggaccagcccatttacaaccctggccagcgggttcggtaccgggtctttgctctggatcagaagatgcgcccgagcactgacaccatcacagtcatggtggagaactctcacggcctccgcgtgcggaagaaggaggtgtacatgccctcgtccatcttccaggatgactttgtgatcccagacatctcagagccagggacctggaagatctcagcccgattctcagatggcctggaatccaacagcagcacccagtttgaggtgaagaaatatgtccttcccaactttgaggtgaagatcacccctggaaagccctacatcctgacggtgccaggccatcttgatgaaatgcagttagacatccaggccaggtacatctatgggaagccagtgcagggggtggcatatgtgcgctttgggctcctagatgaggatggtaagaagactttctttcgggggctggagagtcagaccaagctggtgaatggacagagccacatttccctctcaaaggcagagttccaggacgccctggagaagctgaatatgggcattactgacctccaggggctgcgcctctacgttgctgcagccatcattgagtatccaggtggggagatggaggaggcagagctcacatcctggtattttgtgtcatctcccttctccttggatcttagcaagaccaagcgacaccttgtgcctggggcccccttcctgctgcaggccttggtccgtgagatgtcaggctccccagcttctggcattcctgtcaaagtttctgccacggtgtcttctcctgggtctgttcctgaagtccaggacattcagcaaaacacagacgggagcggccaagtcagcattccaataattatccctcagaccatctcagagctgcagctctcagtatctgcaggctccccacatccagcgatagccaggctcactgtggcagccccaccttcaggaggccccgggtttctgtctattgagcggccggattctcgacctcctcgtgttggggacactctgaacctgaacttgcgagccgtgggcagtggggccaccttttctcattactactacatgatcctatcccgagggcagatcgtgttcatgaatcgagagcccaagaggaccctgacctcggtctcggtgtttgtggaccatcacctggcaccctccttctactttgtggccttctactaccatggagaccacccagtggccaactccctgcgagtggatgtccaggctggggcctgcgagggcaagctggagctcagcgtggacggtgccaagcagtaccggaacggggagtccgtgaagctccacttagaaaccgactccctagccctggtggcgctgggagccttggacacagctctgtatgctgcaggcagcaagtcccacaagcccctcaacatgggcaaggtctttgaagctatgaacagctatgacctcggctgtggtcctgggggtggggacagtgcccttcaggtgttccaggcagcgggcctggccttttctgatggagaccagtggaccttatccagaaagagactaagctgtcccaaggagaagacaacccggaaaaagagaaacgtgaacttccaaaaggcgattaatgagaaattgggtcagtatgcttccccgacagccaagcgctgctgccaggatggggtgacacgtctgcccatgatgcgttcctgcgagcagcgggcagcccgcgtgcagcagccggactgccgggagcccttcctgtcctgctgccaatttgctgagagtctgcgcaagaagagcagggacaagggccaggcgggcctccaacgagccctggagatcctgcaggaggaggacctgattgatgaggatgacattcccgtgcgcagcttcttcccagagaactggctctggagagtggaaacagtggaccgctttcaaatattgacactgtggctccccgactctctgaccacgtgggagatccatggcctgagcctgtccaaaaccaaaggcctatgtgtggccaccccagtccagctccgggtgttccgcgagttccacctgcacctccgcctgcccatgtctgtccgccgctttgagcagctggagctgcggcctgtcctctataactacctggataaaaacctgactgtgagcgtccacgtgtccccagtggaggggctgtgcctggctgggggcggagggctggcccagcaggtgctggtgcctgcgggctctgcccggcctgttgccttctctgtggtgcccacggcagccgccgctgtgtctctgaaggtggtggctcgagggtccttcgaattccctgtgggagatgcggtgtccaaggttctgcagattgagaaggaaggggccatccatagagaggagctggtctatgaactcaaccccttggaccaccgaggccggaccttggaaatacctggcaactctgatcccaatatgatccctgatggggactttaacagctacgtcagggttacagcctcagatccattggacactttaggctctgagggggccttgtcaccaggaggcgtggcctccctcttgaggcttcctcgaggctgtggggagcaaaccatgatctacttggctccgacactggctgcttcccgctacctggacaagacagagcagtggagcacactgcctcccgagaccaaggaccacgccgtggatctgatccagaaaggctacatgcggatccagcagtttcggaaggcggatggttcctatgcggcttggttgtcacggggcagcagcacctggctcacagcctttgtgttgaaggtcctgagtttggcccaggagcaggtaggaggctcgcctgagaaactgcaggagacatctaactggcttctgtcccagcagcaggctgacggctcgttccaggacctctctccagtgatacataggagcatgcaggggggtttggtgggcaatgatgagactgtggcactcacagcctttgtgaccatcgcccttcatcatgggctggccgtcttccaggatgagggtgcagagccattgaagcagagagtggaagcctccatctcaaaggcaagctcatttttgggggagaaagcaagtgctgggctcctgggtgcccacgcagctgccatcacggcctatgccctgacactgaccaaggcccctgcggacctgcggggtgttgcccacaacaacctcatggcaatggcccaggagactggagataacctgtactggggctcagtcactggttctcagagcaatgccgtgtcgcccaccccagctcctcgcaacccatccgaccccatgccccaggccccagccctgtggattgaaaccacagcctacgccctgctgcacctcctgcttcacgagggcaaagcagagatggcagaccaggctgcggcctggctcacccgtcagggcagcttccaagggggattccgcagtacccaagacacggtgattgccctggatgccctgtctgcctactggattgcctcccacaccactgaggagaggggtctcaatgtgactctcagctccacaggccggaatgggttcaagtcccacgcgctgcagctgaacaaccgccagattcgcggcctggaggaggagctgcagttttccttgggcagcaagatcaatgtgaaggtgggaggaaacagcaaaggaaccctgaaggtccttcgtacctacaatgtcctggacatgaagaacacgacctgccaggacctacagatagaagtgacagtcaaaggccacgtcgagtacacgatggaagcaaacgaggactatgaggactatgagtacgatgagcttccagccaaggatgacccagatgcccctctgcagcccgtgacacccctgcagctgtttgagggtcggaggaaccgccgcaggagggaggcgcccaagctgacctccctctctgaccgttacgtgagtcactttgagaccgaggggccccacgtcctgctgtattttgactcggtccccacctcccgggagtgcgtgggctttgaggctgtgcaggaagtgccggtggggctggtgcagccggccagcgcaaccctgtacgactactacaaccccgagcgcagatgttctgtgttttacggggcaccaagtaagagcagactcttggccaccttgtgttctgctgaagtctgccagtgtgctgaggggaagtgccctcgccagcgtcgcgccctggagcggggtctgcaggacgaggatggctacaggatgaagtttgcctgctactacccccgtgtggagtacggcttccaggttaaggttctccgagaagacagcagagctgctttccgcctctttgagaccaagatcacccaagtcctgcacttcaccaaggatgtcaaggccgctgctaatcagatgcgcaacttcctggttcgagcctcctgccgccttcgcttggaacctgggaaagaatatttgatcatgggtctagatggggccacctatgacctcgagggacacccccagtacctgctggactcgaatagctggatcgaggagatgccctctgaacgcctgtgccggagcacccgccagcgggcagcctgtgcccagctcaacgacttcctccaggagtatggcactcaggggtgccaggtgtgagggctgccctcccacctccgctgggaggaacctgaacctgggaaccatgaagctggaagcactgctgtgtccgctttcatgaacacagcctgggaccagggcatattaaaggcttttggcagcaaagtgtcagtgttggc

SEQ ID NO: 121921 - DNA, 5288 bp, Homo sapiens
  Payload ID: 3891
  Gene Symbol: C4B
  Gene Name: complement component 4B (Chido blood group)
  ENST ID: ENST00000548530
  CDS Start-End: 52-5148
agaaggtagcagacagacagacggatctaacctctcttggatcctccagccatgaggctgctctgggggctgatctgggcatccagcttcttcaccttatctctgcagaagcccaggttgctcttgttctctccttctgtggttcatctgggggtccccctatcggtgggggtgcagctccaggatgtgccccgaggacaggtagtgaaaggatcagtgttcctgagaaacccatctcgtaataatgtcccctgctccccaaaggtggacttcacccttagctcagaaagagacttcgcactcctcagtctccaggtgcccttgaaagatgcgaagagctgtggcctccatcaactcctcagaggccctgaggtccagctggtggcccattcgccatggctaaaggactctctgtccagaacgacaaacatccagggtatcaacctgctcttctcctctcgccgggggcacctctttttgcagacggaccagcccatttacaaccctggccagcgggttcggtaccgggtctttgctctggatcagaagatgcgcccgagcactgacaccatcacagtcatggtggagaactctcacggcctccgcgtgcggaagaaggaggtgtacatgccctcgtccatcttccaggatgactttgtgatcccagacatctcagagccagggacctggaagatctcagcccgattctcagatggcctggaatccaacagcagcacccagtttgaggtgaagaaatatgtccttcccaactttgaggtgaagatcacccctggaaagccctacatcctgacggtgccaggccatcttgatgaaatgcagttagacatccaggccaggtacatctatgggaagccagtgcagggggtggcatatgtgcgctttgggctcctagatgaggatggtaagaagactttctttcgggggctggagagtcagaccaagctggtgaatggacagagccacatttccctctcaaaggcagagttccaggacgccctggagaagctgaatatgggcattactgacctccaggggctgcgcctctacgttgctgcagccatcattgagtctccaggtggggagatggaggaggcagagctcacatcctggtattttgtgtcatctcccttctccttggatcttagcaagaccaagcgacaccttgtgcctggggcccccttcctgctgcaggccttggtccgtgagatgtcaggctccccagcttctggcattcctgtcaaagtttctgccacggtgtcttctcctgggtctgttcctgaagtccaggacattcagcaaaacacagacgggagcggccaagtcagcattccaataattatccctcagaccatctcagagctgcagctctcagtatctgcaggctccccacatccagcgatagccaggctcactgtggcagccccaccttcaggaggccccgggtttctgtctattgagcggccggattctcgacctcctcgtgttggggacactctgaacctgaacttgcgagccgtgggcagtggggccaccttttctcattactactacatgatcctatcccgagggcagatcgtgttcatgaatcgagagcccaagaggaccctgacctcggtctcggtgtttgtggaccatcacctggcaccctccttctactttgtggccttctactaccatggagaccacccagtggccaactccctgcgagtggatgtccaggctggggcctgcgagggcaagctggagctcagcgtggacggtgccaagcagtaccggaacggggagtccgtgaagctccacttagaaaccgactccctagccctggtggcgctgggagccttggacacagctctgtatgctgcaggcagcaagtcccacaagcccctcaacatgggcaaggtctttgaagctatgaacagctatgacctcggctgtggtcctgggggtggggacagtgcccttcaggtgttccaggcagcgggcctggccttttctgatggagaccagtggaccttatccagaaagagactaagctgtcccaaggagaagacaacccggaaaaagagaaacgtgaacttccaaaaggcgattaatgagaaattgggtcagtatgcttccccgacagccaagcgctgctgccaggatggggtgacacgtctgcccatgatgcgttcctgcgagcagcgggcagcccgcgtgcagcagccggactgccgggagcccttcctgtcctgctgccaatttgctgagagtctgcgcaagaagagcagggacaagggccaggcgggcctccaacgagccctggagatcctgcaggaggaggacctgattgatgaggatgacattcccgtgcgcagcttcttcccagagaactggctctggagagtggaaacagtggaccgctttcaaatattgacactgtggctccccgactctctgaccacgtgggagatccatggcctgagcctgtccaaaaccaaaggcctatgtgtggccaccccagttcagctccgggtgttccgcgagttccacctgcacctccgcctgcccatgtctgtccgccgctttgagcagctggagctgcggcctgtcctctataactacctggataaaaacctgactgtgagcgtccacgtgtccccagtggaggggctgtgcctggctgggggcggagggctggcccagcaggtgctggtgcctgcgggctctgcccggcctgttgccttctctgtggtgcccacggcagccaccgctgtgtctctgaaggtggtggctcgagggtccttcgaattccctgtgggagatgcggtgtccaaggttctgcagattgagaaggaaggggccatccatagagaggagctggtctatgaactcaaccccttggaccaccgaggccggaccttggaaatacctggcaactctgatcccaatatgatccctgatggggactttaacagctacgtcagggttacagcctcagatccattggacactttaggctctgagggggccttgtcaccaggaggcgtggcctccctcttgaggcttcctcgaggctgtggggagcaaaccatgatctacttggctccgacactggctgcttcccgctacctggacaagacagagcagtggagcacactgcctcccgagaccaaggaccacgccgtggatctgatccagaaaggctacatgcggatccagcagtttcggaaggcggatggttcctatgcggcttggttgtcacggggcagcagcacctggctcacagcctttgtgttgaaggtcctgagtttggcccaggagcaggtaggaggctcgcctgagaaactgcaggagacatctaactggcttctgtcccagcagcaggctgacggctcgttccaggacctctctccagtgatacataggagcatgcaggggggtttggtgggcaatgatgagactgtggcactcacagcctttgtgaccatcgcccttcatcatgggctggccgtcttccaggatgagggtgcagagccattgaagcagagagtggaagcctccatctcaaaggcaagctcatttttgggggagaaagcaagtgctgggctcctgggtgcccacgcagctgccatcacggcctatgccctgacactgaccaaggcccctgcggacctgcggggtgttgcccacaacaacctcatggcaatggcccaggagactggagataacctgtactggggctcagtcactggttctcagagcaatgccgtgtcgcccaccccggctcctcgcaacccatccgaccccatgccccaggccccagccctgtggattgaaaccacagcctacgccctgctgcacctcctgcttcacgagggcaaagcagagatggcagaccaggctgcggcctggctcacccgtcagggcagcttccaagggggattccgcagtacccaagacacggtgattgccctggatgccctgtctgcctactggattgcctcccacaccactgaggagaggggtctcaatgtgactctcagctccacaggccggaatgggttcaagtcccacgcgctgcagctgaacaaccgccagattcgcggcctggaggaggagctgcagttttccttgggcagcaagatcaatgtgaaggtgggaggaaacagcaaaggaaccctgaaggtccttcgtacctacaatgtcctggacatgaagaacacgacctgccaggacctacagatagaagtgacagtcaaaggccacgtcgagtacacgatggaagcaaacgaggactatgaggactatgagtacgatgagcttccagccaaggatgacccagatgcccctctgcagcccgtgacacccctgcagctgtttgagggtcggaggaaccgccgcaggagggaggcgcccaagctgacctccctctctgaccgttacgtgagtcactttgagaccgaggggccccacgtcctgctgtattttgactcggtccccacctcccgggagtgcgtgggctttgaggctgtgcaggaagtgccggtggggctggtgcagccggccagcgcaaccctgtacgactactacaaccccgagcgcagatgttctgtgttttacggggcaccaagtaagagcagactcttggccaccttgtgttctgctgaagtctgccagtgtgctgaggggaagtgccctcgccagcgtcgcgccctggagcggggtctgcaggacgaggatggctacaggatgaagtttgcctgctactacccccgtgtggagtacggcttccaggttaaggttctccgagaagacagcagagctgctttccgcctctttgagaccaagatcacccaagtcctgcacttcaccaaggatgtcaaggccgctgctaatcagatgcgcaacttcctggttcgagcctcctgccgccttcgcttggaacctgggaaagaatatttgatcatgggtctggatggggccacctatgacctcgagggacacccccagtacctgctggactcgaatagctggatcgaggagatgccctctgaacgcctgtgccggagcacccgccagcgggcagcctgtgcccagctcaacgacttcctccaggagtatggcactcaggggtgccaggtgtgagggctgccctcccacctccgctgggaggaacctgaacctgggaaccatgaagctggaagcactgctgtgtccgctttcatgaacacagcctgggaccagggcatattaaaggcttttggcagcaaagtgtcagtgttggc

SEQ ID NO: 121922 - DNA, 5460 bp, Homo sapiens
  Payload ID: 3892
  Gene Symbol: C4B_2
  Gene Name: complement component 4B (Chido blood group), copy 2
  Uniprot ID: P0C0L5
  ENST ID: ENST00000435500
  CDS Start-End: 85-5319
agagtcaactctgccccgaggcctagcttggccagaaggtagcagacagacagacggatctaacctctcttggatcctccagccatgaggctgctctgggggctgatctgggcatccagcttcttcaccttatctctgcagaagcccaggttgctcttgttctctccttctgtggttcatctgggggtccccctatcggtgggggtgcagctccaggatgtgccccgaggacaggtagtgaaaggatcagtgttcctgagaaacccatctcgtaataatgtcccctgctccccaaaggtggacttcacccttagctcagaaagagacttcgcactcctcagtctccaggtgcccttgaaagatgcgaagagctgtggcctccatcaactcctcagaggccctgaggtccagctggtggcccattcgccatggctaaaggactctctgtccagaacgacaaacatccagggtatcaacctgctcttctcctctcgccgggggcacctctttttgcagacggaccagcccatttacaaccctggccagcgggttcggtaccgggtctttgctctggatcagaagatgcgcccgagcactgacaccatcacagtcatggtggagaactctcacggcctccgcgtgcggaagaaggaggtgtacatgccctcgtccatcttccaggatgactttgtgatcccagacatctcagagccagggacctggaagatctcagcccgattctcagatggcctggaatccaacagcagcacccagtttgaggtgaagaaatatgtccttcccaactttgaggtgaagatcacccctggaaagccctacatcctgacggtgccaggccatcttgatgaaatgcagttagacatccaggccaggtacatctatgggaagccagtgcagggggtggcatatgtgcgctttgggctcctagatgaggatggtaagaagactttctttcgggggctggagagtcagaccaagctggtgaatggacagagccacatttccctctcaaaggcagagttccaggacgccctggagaagctgaatatgggcattactgacctccaggggctgcgcctctacgttgctgcagccatcattgagtatccaggtggggagatggaggaggcagagctcacatcctggtattttgtgtcatctcccttctccttggatcttagcaagaccaagcgacaccttgtgcctggggcccccttcctgctgcaggccttggtccgtgagatgtcaggctccccagcttctggcattcctgtcaaagtttctgccacggtgtcttctcctgggtctgttcctgaagtccaggacattcagcaaaacacagacgggagcggccaagtcagcattccaataattatccctcagaccatctcagagctgcagctctcagtatctgcaggctccccacatccagcgatagccaggctcactgtggcagccccaccttcaggaggccccgggtttctgtctattgagcggccggattctcgacctcctcgtgttggggacactctgaacctgaacttgcgagccgtgggcagtggggccaccttttctcattactactacatgatcctatcccgagggcagatcgtgttcatgaatcgagagcccaagaggaccctgacctcggtctcggtgtttgtggaccatcacctggcaccctccttctactttgtggccttctactaccatggagaccacccagtggccaactccctgcgagtggatgtccaggctggggcctgcgagggcaagctggagctcagcgtggacggtgccaagcagtaccggaacggggagtccgtgaagctccacttagaaaccgactccctagccctggtggcgctgggagccttggacacagctctgtatgctgcaggcagcaagtcccacaagcccctcaacatgggcaaggtctttgaagctatgaacagctatgacctcggctgtggtcctgggggtggggacagtgcccttcaggtgttccaggcagcgggcctggccttttctgatggagaccagtggaccttatccagaaagagactaagctgtcccaaggagaagacaacccggaaaaagagaaacgtgaacttccaaaaggcgattaatgagaaattgggtcagtatgcttccccgacagccaagcgctgctgccaggatggggtgacacgtctgcccatgatgcgttcctgcgagcagcgggcagcccgcgtgcagcagccggactgccgggagcccttcctgtcctgctgccaatttgctgagagtctgcgcaagaagagcagggacaagggccaggcgggcctccaacgagccctggagatcctgcaggaggaggacctgattgatgaggatgacattcccgtgcgcagcttcttcccagagaactggctctggagagtggaaacagtggaccgctttcaaatattgacactgtggctccccgactctctgaccacgtgggagatccatggcctgagcctgtccaaaaccaaaggcctatgtgtggccaccccagtccagctccgggtgttccgcgagttccacctgcacctccgcctgcccatgtctgtccgccgctttgagcagctggagctgcggcctgtcctctataactacctggataaaaacctgactgtgagcgtccacgtgtccccagtggaggggctgtgcctggctgggggcggagggctggcccagcaggtgctggtgcctgcgggctctgcccggcctgttgccttctctgtggtgcccacggcagccgccgctgtgtctctgaaggtggtggctcgagggtccttcgaattccctgtgggagatgcggtgtccaaggttctgcagattgagaaggaaggggccatccatagagaggagctggtctatgaactcaaccccttggaccaccgaggccggaccttggaaatacctggcaactctgatcccaatatgatccctgatggggactttaacagctacgtcagggttacagcctcagatccattggacactttaggctctgagggggccttgtcaccaggaggcgtggcctccctcttgaggcttcctcgaggctgtggggagcaaaccatgatctacttggctccgacactggctgcttcccgctacctggacaagacagagcagtggagcacactgcctcccgagaccaaggaccacgccgtggatctgatccagaaaggctacatgcggatccagcagtttcggaaggcggatggttcctatgcggcttggttgtcacggggcagcagcacctggctcacagcctttgtgttgaaggtcctgagtttggcccaggagcaggtaggaggctcgcctgagaaactgcaggagacatctaactggcttctgtcccagcagcaggctgacggctcgttccaggacctctctccagtgatacataggagcatgcaggggggtttggtgggcaatgatgagactgtggcactcacagcctttgtgaccatcgcccttcatcatgggctggccgtcttccaggatgagggtgcagagccattgaagcagagagtggaagcctccatctcaaaggcaagctcatttttgggggagaaagcaagtgctgggctcctgggtgcccacgcagctgccatcacggcctatgccctgacactgaccaaggcccctgcggacctgcggggtgttgcccacaacaacctcatggcaatggcccaggagactggagataacctgtactggggctcagtcactggttctcagagcaatgccgtgtcgcccaccccagctcctcgcaacccatccgaccccatgccccaggccccagccctgtggattgaaaccacagcctacgccctgctgcacctcctgcttcacgagggcaaagcagagatggcagaccaggctgcggcctggctcacccgtcagggcagcttccaagggggattccgcagtacccaagacacggtgattgccctggatgccctgtctgcctactggattgcctcccacaccactgaggagaggggtctcaatgtgactctcagctccacaggccggaatgggttcaagtcccacgcgctgcagctgaacaaccgccagattcgcggcctggaggaggagctgcagttttccttgggcagcaagatcaatgtgaaggtgggaggaaacagcaaaggaaccctgaaggtccttcgtacctacaatgtcctggacatgaagaacacgacctgccaggacctacagatagaagtgacagtcaaaggccacgtcgagtacacgatggaagcaaacgaggactatgaggactatgagtacgatgagcttccagccaaggatgacccagatgcccctctgcagcccgtgacacccctgcagctgtttgagggtcggaggaaccgccgcaggagggaggcgcccaaggtggtggaggagcaggagtccagggtgcactacaccgtgtgcatctggcggaacggcaaggtggggctgtctggcatggccatcgcggacgtcaccctcctgagtggattccacgccctgcgtgctgacctggagaagctgacctccctctctgaccgttacgtgagtcactttgagaccgaggggccccacgtcctgctgtattttgactcggtccccacctcccgggagtgcgtgggctttgaggctgtgcaggaagtgccggtggggctggtgcagccggccagcgcaaccctgtacgactactacaaccccgagcgcagatgttctgtgttttacggggcaccaagtaagagcagactcttggccaccttgtgttctgctgaagtctgccagtgtgctgaggggaagtgccctcgccagcgtcgcgccctggagcggggtctgcaggacgaggatggctacaggatgaagtttgcctgctactacccccgtgtggagtacggcttccaggttaaggttctccgagaagacagcagagctgctttccgcctctttgagaccaagatcacccaagtcctgcacttcaccaaggatgtcaaggccgctgctaatcagatgcgcaacttcctggttcgagcctcctgccgccttcgcttggaacctgggaaagaatatttgatcatgggtctagatggggccacctatgacctcgagggacacccccagtacctgctggactcgaatagctggatcgaggagatgccctctgaacgcctgtgccggagcacccgccagcgggcagcctgtgcccagctcaacgacttcctccaggagtatggcactcaggggtgccaggtgtgagggctgccctcccacctccgctgggaggaacctgaacctgggaaccatgaagctggaagcactgctgtgtccgctttcatgaacacagcctgggaccagggcatattaaaggcttttggcagcaaagtgtcagtgttggca

SEQ ID NO: 121923 - DNA, 5148 bp, Homo sapiens
  Payload ID: 3892
  Gene Symbol: C4B_2
  Gene Name: complement component 4B (Chido blood group), copy 2
  ENST ID: ENST00000552464
  CDS Start-End: 52-5148
agaaggtagcagacagacagacggatctaacctctcttggatcctccagccatgaggctgctctgggggctgatctgggcatccagcttcttcaccttatctctgcagaagcccaggttgctcttgttctctccttctgtggttcatctgggggtccccctatcggtgggggtgcagctccaggatgtgccccgaggacaggtagtgaaaggatcagtgttcctgagaaacccatctcgtaataatgtcccctgctccccaaaggtggacttcacccttagctcagaaagagacttcgcactcctcagtctccaggtgcccttgaaagatgcgaagagctgtggcctccatcaactcctcagaggccctgaggtccagctggtggcccattcgccatggctaaaggactctctgtccagaacgacaaacatccagggtatcaacctgctcttctcctctcgccgggggcacctctttttgcagacggaccagcccatttacaaccctggccagcgggttcggtaccgggtctttgctctggatcagaagatgcgcccgagcactgacaccatcacagtcatggtggagaactctcacggcctccgcgtgcggaagaaggaggtgtacatgccctcgtccatcttccaggatgactttgtgatcccagacatctcagagccagggacctggaagatctcagcccgattctcagatggcctggaatccaacagcagcacccagtttgaggtgaagaaatatgtccttcccaactttgaggtgaagatcacccctggaaagccctacatcctgacggtgccaggccatcttgatgaaatgcagttagacatccaggccaggtacatctatgggaagccagtgcagggggtggcatatgtgcgctttgggctcctagatgaggatggtaagaagactttctttcgggggctggagagtcagaccaagctggtgaatggacagagccacatttccctctcaaaggcagagttccaggacgccctggagaagctgaatatgggcattactgacctccaggggctgcgcctctacgttgctgcagccatcattgagtatccaggtggggagatggaggaggcagagctcacatcctggtattttgtgtcatctcccttctccttggatcttagcaagaccaagcgacaccttgtgcctggggcccccttcctgctgcaggccttggtccgtgagatgtcaggctccccagcttctggcattcctgtcaaagtttctgccacggtgtcttctcctgggtctgttcctgaagtccaggacattcagcaaaacacagacgggagcggccaagtcagcattccaataattatccctcagaccatctcagagctgcagctctcagtatctgcaggctccccacatccagcgatagccaggctcactgtggcagccccaccttcaggaggccccgggtttctgtctattgagcggccggattctcgacctcctcgtgttggggacactctgaacctgaacttgcgagccgtgggcagtggggccaccttttctcattactactacatgatcctatcccgagggcagatcgtgttcatgaatcgagagcccaagaggaccctgacctcggtctcggtgtttgtggaccatcacctggcaccctccttctactttgtggccttctactaccatggagaccacccagtggccaactccctgcgagtggatgtccaggctggggcctgcgagggcaagctggagctcagcgtggacggtgccaagcagtaccggaacggggagtccgtgaagctccacttagaaaccgactccctagccctggtggcgctgggagccttggacacagctctgtatgctgcaggcagcaagtcccacaagcccctcaacatgggcaaggtctttgaagctatgaacagctatgacctcggctgtggtcctgggggtggggacagtgcccttcaggtgttccaggcagcgggcctggccttttctgatggagaccagtggaccttatccagaaagagactaagctgtcccaaggagaagacaacccggaaaaagagaaacgtgaacttccaaaaggcgattaatgagaaattgggtcagtatgcttccccgacagccaagcgctgctgccaggatggggtgacacgtctgcccatgatgcgttcctgcgagcagcgggcagcccgcgtgcagcagccggactgccgggagcccttcctgtcctgctgccaatttgctgagagtctgcgcaagaagagcagggacaagggccaggcgggcctccaacgagccctggagatcctgcaggaggaggacctgattgatgaggatgacattcccgtgcgcagcttcttcccagagaactggctctggagagtggaaacagtggaccgctttcaaatattgacactgtggctccccgactctctgaccacgtgggagatccatggcctgagcctgtccaaaaccaaaggcctatgtgtggccaccccagtccagctccgggtgttccgcgagttccacctgcacctccgcctgcccatgtctgtccgccgctttgagcagctggagctgcggcctgtcctctataactacctggataaaaacctgactgtgagcgtccacgtgtccccagtggaggggctgtgcctggctgggggcggagggctggcccagcaggtgctggtgcctgcgggctctgcccggcctgttgccttctctgtggtgcccacggcagccgccgctgtgtctctgaaggtggtggctcgagggtccttcgaattccctgtgggagatgcggtgtccaaggttctgcagattgagaaggaaggggccatccatagagaggagctggtctatgaactcaaccccttggaccaccgaggccggaccttggaaatacctggcaactctgatcccaatatgatccctgatggggactttaacagctacgtcagggttacagcctcagatccattggacactttaggctctgagggggccttgtcaccaggaggcgtggcctccctcttgaggcttcctcgaggctgtggggagcaaaccatgatctacttggctccgacactggctgcttcccgctacctggacaagacagagcagtggagcacactgcctcccgagaccaaggaccacgccgtggatctgatccagaaaggctacatgcggatccagcagtttcggaaggcggatggttcctatgcggcttggttgtcacggggcagcagcacctggctcacagcctttgtgttgaaggtcctgagtttggcccaggagcaggtaggaggctcgcctgagaaactgcaggagacatctaactggcttctgtcccagcagcaggctgacggctcgttccaggacctctctccagtgatacataggagcatgcaggggggtttggtgggcaatgatgagactgtggcactcacagcctttgtgaccatcgcccttcatcatgggctggccgtcttccaggatgagggtgcagagccattgaagcagagagtggaagcctccatctcaaaggcaagctcatttttgggggagaaagcaagtgctgggctcctgggtgcccacgcagctgccatcacggcctatgccctgacactgaccaaggcccctgcggacctgcggggtgttgcccacaacaacctcatggcaatggcccaggagactggagataacctgtactggggctcagtcactggttctcagagcaatgccgtgtcgcccaccccagctcctcgcaacccatccgaccccatgccccaggccccagccctgtggattgaaaccacagcctacgccctgctgcacctcctgcttcacgagggcaaagcagagatggcagaccaggctgcggcctggctcacccgtcagggcagcttccaagggggattccgcagtacccaagacacggtgattgccctggatgccctgtctgcctactggattgcctcccacaccactgaggagaggggtctcaatgtgactctcagctccacaggccggaatgggttcaagtcccacgcgctgcagctgaacaaccgccagattcgcggcctggaggaggagctgcagttttccttgggcagcaagatcaatgtgaaggtgggaggaaacagcaaaggaaccctgaaggtccttcgtacctacaatgtcctggacatgaagaacacgacctgccaggacctacagatagaagtgacagtcaaaggccacgtcgagtacacgatggaagcaaacgaggactatgaggactatgagtacgatgagcttccagccaaggatgacccagatgcccctctgcagcccgtgacacccctgcagctgtttgagggtcggaggaaccgccgcaggagggaggcgcccaagctgacctccctctctgaccgttacgtgagtcactttgagaccgaggggccccacgtcctgctgtattttgactcggtccccacctcccgggagtgcgtgggctttgaggctgtgcaggaagtgccggtggggctggtgcagccggccagcgcaaccctgtacgactactacaaccccgagcgcagatgttctgtgttttacggggcaccaagtaagagcagactcttggccaccttgtgttctgctgaagtctgccagtgtgctgaggggaagtgccctcgccagcgtcgcgccctggagcggggtctgcaggacgaggatggctacaggatgaagtttgcctgctactacccccgtgtggagtacggcttccaggttaaggttctccgagaagacagcagagctgctttccgcctctttgagaccaagatcacccaagtcctgcacttcaccaaggatgtcaaggccgctgctaatcagatgcgcaacttcctggttcgagcctcctgccgccttcgcttggaacctgggaaagaatatttgatcatgggtctagatggggccacctatgacctcgagggacacccccagtacctgctggactcgaatagctggatcgaggagatgccctctgaacgcctgtgccggagcacccgccagcgggcagcctgtgcccagctcaacgacttcctccaggagtatggcactcaggggtgccaggtgtga

SEQ ID NO: 121924 - DNA, 5465 bp, Homo sapiens
  Payload ID: 3893
  Gene Symbol: C5
  Gene Name: complement component 5
  Uniprot ID: P01031
  ENST ID: ENST00000223642
  CDS Start-End: 31-5061
tatatccgtggtttcctgctacctccaaccatgggccttttgggaatactttgttttttaatcttcctggggaaaacctggggacaggagcaaacatatgtcatttcagcaccaaaaatattccgtgttggagcatctgaaaatattgtgattcaagtttatggatacactgaagcatttgatgcaacaatctctattaaaagttatcctgataaaaaatttagttactcctcaggccatgttcatttatcctcagagaataaattccaaaactctgcaatcttaacaatacaaccaaaacaattgcctggaggacaaaacccagtttcttatgtgtatttggaagttgtatcaaagcatttttcaaaatcaaaaagaatgccaataacctatgacaatggatttctcttcattcatacagacaaacctgtttatactccagaccagtcagtaaaagttagagtttattcgttgaatgacgacttgaagccagccaaaagagaaactgtcttaactttcatagatcctgaaggatcagaagttgacatggtagaagaaattgatcatattggaattatctcttttcctgacttcaagattccgtctaatcctagatatggtatgtggacgatcaaggctaaatataaagaggacttttcaacaactggaaccgcatattttgaagttaaagaatatgtcttgccacatttttctgtctcaatcgagccagaatataatttcattggttacaagaactttaagaattttgaaattactataaaagcaagatatttttataataaagtagtcactgaggctgacgtttatatcacatttggaataagagaagacttaaaagatgatcaaaaagaaatgatgcaaacagcaatgcaaaacacaatgttgataaatggaattgctcaagtcacatttgattctgaaacagcagtcaaagaactgtcatactacagtttagaagatttaaacaacaagtacctttatattgctgtaacagtcatagagtctacaggtggattttctgaagaggcagaaatacctggcatcaaatatgtcctctctccctacaaactgaatttggttgctactcctcttttcctgaagcctgggattccatatcccatcaaggtgcaggttaaagattcgcttgaccagttggtaggaggagtcccagtaacactgaatgcacaaacaattgatgtaaaccaagagacatctgacttggatccaagcaaaagtgtaacacgtgttgatgatggagtagcttcctttgtgcttaatctcccatctggagtgacggtgctggagtttaatgtcaaaactgatgctccagatcttccagaagaaaatcaggccagggaaggttaccgagcaatagcatactcatctctcagccaaagttacctttatattgattggactgataaccataaggctttgctagtgggagaacatctgaatattattgttacccccaaaagcccatatattgacaaaataactcactataattacttgattttatccaagggcaaaattatccactttggcacgagggagaaattttcagatgcatcttatcaaagtataaacattccagtaacacagaacatggttccttcatcccgacttctggtctattacatcgtcacaggagaacagacagcagaattagtgtctgattcagtctggttaaatattgaagaaaaatgtggcaaccagctccaggttcatctgtctcctgatgcagatgcatattctccaggccaaactgtgtctcttaatatggcaactggaatggattcctgggtggcattagcagcagtggacagtgctgtgtatggagtccaaagaggagccaaaaagcccttggaaagagtatttcaattcttagagaagagtgatctgggctgtggggcaggtggtggcctcaacaatgccaatgtgttccacctagctggacttaccttcctcactaatgcaaatgcagatgactcccaagaaaatgatgaaccttgtaaagaaattctcaggccaagaagaacgctgcaaaagaagatagaagaaatagctgctaaatataaacattcagtagtgaagaaatgttgttacgatggagcctgcgttaataatgatgaaacctgtgagcagcgagctgcacggattagtttagggccaagatgcatcaaagctttcactgaatgttgtgtcgtcgcaagccagctccgtgctaatatctctcataaagacatgcaattgggaaggctacacatgaagaccctgttaccagtaagcaagccagaaattcggagttattttccagaaagctggttgtgggaagttcatcttgttcccagaagaaaacagttgcagtttgccctacctgattctctaaccacctgggaaattcaaggcgttggcatttcaaacactggtatatgtgttgctgatactgtcaaggcaaaggtgttcaaagatgtcttcctggaaatgaatataccatattctgttgtacgaggagaacagatccaattgaaaggaactgtttacaactataggacttctgggatgcagttctgtgttaaaatgtctgctgtggagggaatctgcacttcggaaagcccagtcattgatcatcagggcacaaagtcctccaaatgtgtgcgccagaaagtagagggctcctccagtcacttggtgacattcactgtgcttcctctggaaattggccttcacaacatcaatttttcactggagacttggtttggaaaagaaatcttagtaaaaacattacgagtggtgccagaaggtgtcaaaagggaaagctattctggtgttactttggatcctaggggtatttatggtaccattagcagacgaaaggagttcccatacaggatacccttagatttggtccccaaaacagaaatcaaaaggattttgagtgtaaaaggactgcttgtaggtgagatcttgtctgcagttctaagtcaggaaggcatcaatatcctaacccacctccccaaagggagtgcagaggcggagctgatgagcgttgtcccagtattctatgtttttcactacctggaaacaggaaatcattggaacatttttcattctgacccattaattgaaaagcagaaactgaagaaaaaattaaaagaagggatgttgagcattatgtcctacagaaatgctgactactcttacagtgtgtggaagggtggaagtgctagcacttggttaacagcttttgctttaagagtacttggacaagtaaataaatacgtagagcagaaccaaaattcaatttgtaattctttattgtggctagttgagaattatcaattagataatggatctttcaaggaaaattcacagtatcaaccaataaaattacagggtaccttgcctgttgaagcccgagagaacagcttatatcttacagcctttactgtgattggaattagaaaggctttcgatatatgccccctggtgaaaatcgacacagctctaattaaagctgacaactttctgcttgaaaatacactgccagcccagagcacctttacattggccatttctgcgtatgctctttccctgggagataaaactcacccacagtttcgttcaattgtttcagctttgaagagagaagctttggttaaaggtaatccacccatttatcgtttttggaaagacaatcttcagcataaagacagctctgtacctaacactggtacggcacgtatggtagaaacaactgcctatgctttactcaccagtctgaacttgaaagatataaattatgttaacccagtcatcaaatggctatcagaagagcagaggtatggaggtggcttttattcaacccaggacacaatcaatgccattgagggcctgacggaatattcactcctggttaaacaactccgcttgagtatggacatcgatgtttcttacaagcataaaggtgccttacataattataaaatgacagacaagaatttccttgggaggccagtagaggtgcttctcaatgatgacctcattgtcagtacaggatttggcagtggcttggctacagtacatgtaacaactgtagttcacaaaaccagtacctctgaggaagtttgcagcttttatttgaaaatcgatactcaggatattgaagcatcccactacagaggctacggaaactctgattacaaacgcatagtagcatgtgccagctacaagcccagcagggaagaatcatcatctggatcctctcatgcggtgatggacatctccttgcctactggaatcagtgcaaatgaagaagacttaaaagcccttgtggaaggggtggatcaactattcactgattaccaaatcaaagatggacatgttattctgcaactgaattcgattccctccagtgatttcctttgtgtacgattccggatatttgaactctttgaagttgggtttctcagtcctgccactttcacagtgtacgaataccacagaccagataaacagtgtaccatgttttatagcacttccaatatcaaaattcagaaagtctgtgaaggagccgcgtgcaagtgtgtagaagctgattgtgggcaaatgcaggaagaattggatctgacaatctctgcagagacaagaaaacaaacagcatgtaaaccagagattgcatatgcttataaagttagcatcacatccatcactgtagaaaatgtttttgtcaagtacaaggcaacccttctggatatctacaaaactggggaagctgttgctgagaaagactctgagattaccttcattaaaaaggtaacctgtactaacgctgagctggtaaaaggaagacagtacttaattatgggtaaagaagccctccagataaaatacaatttcagtttcaggtacatctaccctttagattccttgacctggattgaatactggcctagagacacaacatgttcatcgtgtcaagcatttttagctaatttagatgaatttgccgaagatatctttttaaatggatgctaaaattcctgaagttcagctgcatacagtttgcacttatggactcctgttgttgaagttcgtttttttgttttcttctttttttaaacattcatagctggtcttatttgtaaagctcactttacttagaattagtggcacttgcttttattagagaatgatttcaaatgctgtaactttctgaaataacatggccttggagggcatgaagacagatactcctccaaggttattggacaccggaaacaataaattggaacacctcctcaaacctaccactcaggaatgtttgctggggccgaaagaacagtccattgaaagggagtattacaaaaacatggcctttgcttgaaagaaaataccaaggaacaggaaactgatcattaaagcctgagtttgctttcaaa

SEQ ID NO: 121925 - DNA, 2311 bp, Homo sapiens
  Payload ID: 3894
  Gene Symbol: C5AR1
  Gene Name: complement component 5a receptor 1
  Uniprot ID: P21730
  ENST ID: ENST00000355085
  CDS Start-End: 23-1075
ggggagcccaggagaccagaacatggactccttcaattataccacccctgattatgggcactatgatgacaaggataccctggacctcaacacccctgtggataaaacttctaacacgctgcgtgttccagacatcctggccttggtcatctttgcagtcgtcttcctggtgggagtgctgggcaatgccctggtggtctgggtgacggcattcgaggccaagcggaccatcaatgccatctggttcctcaacttggcggtagccgacttcctctcctgcctggcgctgcccatcttgttcacgtccattgtacagcatcaccactggccctttggcggggccgcctgcagcatcctgccctccctcatcctgctcaacatgtacgccagcatcctgctcctggccaccatcagcgccgaccgctttctgctggtgtttaaacccatctggtgccagaacttccgaggggctggcttggcctggatcgcctgtgccgtggcttggggtttagccctgctgctgaccataccctccttcctgtaccgggtggtccgggaggagtactttccaccaaaggtgttgtgtggcgtggactacagccacgacaaacggcgggagcgagccgtggccatcgtccggctggtcctgggcttcctgtggcctctactcacgctcacgatttgttacactttcatcctgctccggacgtggagccgcagggccacgcggtccaccaagacactcaaggtggtggtggcagtggtggccagtttctttatcttctggttgccctaccaggtgacggggataatgatgtccttcctggagccatcgtcacccaccttcctgctgctgaagaagctggactccctgtgtgtctcctttgcctacatcaactgctgcatcaaccccatcatctacgtggtggccggccagggcttccagggccgactgcggaaatccctccccagcctcctccggaacgtgttgactgaagagtccgtggttagggagagcaagtcattcacgcgctccacagtggacactatggcccagaagacccaggcagtgtaggcgacagcctcatgggccactgtggcccgatgtccccttccttcccggccattctccctcttgttttcacttcacttttcgtgggatggtgttaccttagctaactaactctcctccatgttgcctgtctttcccagacttgtccctccttttccagcgggactcttctcatccttcctcatttgcaaggtgaacacttccttctagggagcaccctcccaccccccaccccccccacacacaccatctttccatcccaggcttttgaaaaacaaacagaaacccgtgtatctgggatatttccatatggcaataggtgtgaacagggaactcagaatacagacaagtagaaagattctcgcttaaaaaaaatgtatttattttatggcaagttggaaaatatgtaactggaatctcaaaagttctttgggacaaaacagaagtccatggagttatctaagctcttgtaagtgagttaatttaaaaaagaaaattaggctgagagcagtggctcacgcctgtaatcccagaactttgggaggctaaggtgggtggatcacctgaggtcaagagttccagaccaggctggccagcatggtgaaaccccgtctgtactaaaaatacaaaaaattaactgggcatggtagtgggtgcctgtaatcccagctacttgggaggctgaggtgggagaattgctcgaacttggaggtggaggttgtggtgagccatgatcgcaccactgcactctagcctgggtgaccgagggaggctctgtctcaaaagcaaagcaaaaacaaaaacaaaaacacctaaaaaacctgcagttttgtttgtactttgtttttaaattatgctttctattttgagatcattgcaaactcaacacaattgtaagtaatgatacagagggatcttgtgtacccttcacccagcctcccccaatggcaacatcttgcaaaactacaatgtagtctcataaccaggatattgacattgatacagtgaagatacaggacattctcatcaccacagggatccccaggatgcccacttccctccacccccacaccccagccgtgtccctaacccctggcaaccaggaatccactctccatttctataatgttgtcatttcaagaatgttattcaatggaatcatatagtatgtaacctgttttgagcttaaaaaaaaagtatacatgactttaatgaggaaaataaaaatgaatattgaaa

SEQ ID NO: 121926 - DNA, 781 bp, Homo sapiens
  Payload ID: 3894
  Gene Symbol: C5AR1
  Gene Name: complement component 5a receptor 1
  ENST ID: ENST00000594787
  CDS Start-End: 730-781
cagccctcctgcacccaggtgattaaaagctttattgctcacacaaagcctgtttggtggtgtcttcacacggacgcgagtgaaagatgggatcacaggcccccaccaccacgcccaggtggagtcttgctttgtcgcccaggctggagtgcagtggtgccatcttggctcactgcaacctccacctcccgggttcaagtaattcttgtgcctcagcctcccgagtagctgggactacaggcatgcaccaccacacccagagtcttgctcagtcaaggctggagtgcattggcatgatctcagcttactgcaacctccgcctcccaggttcaagtgattctcctgcctcagtctctggagtagctgggattacaggactccttcaattataccacccctgattatgggcactatgatgacaaggataccctggacctcaacacccctgtggataaaacttctaacacgctgcgtgttccagacatcctggccttggtcatctttgcagtcgtcttcctggtgggagtgctgggcaatgccctggtggtctgggtgacggcattcgaggccaagcggaccatcaatgccatctggttcctcaacttggcggtagccgacttcctctcctgcctggcgctgcccatcttgttcacgtccattgtacagcatcaccactggccctttggcggggccgcctgcagcatcctgccctccctcatcctgctcaacatgtacgccagcatcctgctcctggccaccatcagcgccgaccgctttctgc

SEQ ID NO: 121927 - DNA, 1287 bp, Homo sapiens
  Payload ID: 3895
  Gene Symbol: C5AR2
  Gene Name: complement component 5a receptor 2
  Uniprot ID: Q9P296
  ENST ID: ENST00000600626
  CDS Start-End: 72-1085
cctgtgtgccacgtgctggacaaatcttaactcctcaaggactcccaaaaccagagacaccaggagcctgaatggggaacgattctgtcagctacgagtatggggattacagcgacctctcggaccgccctgtggactgcctggatggcgcctgcctggccatcgacccgctgcgcgtggccccgctcccactgtatgccgccatcttcctggtgggggtgccgggcaatgccatggtggcctgggtggctgggaaggtggcccgccggagggtgggtgccacctggttgctccacctggccgtggcggatttgctgtgctgtttgtctctgcccatcctggcagtgcccattgcccgtggaggccactggccgtatggtgcagtgggctgtcgggcgctgccctccatcatcctgctgaccatgtatgccagcgtcctgctcctggcagctctcagtgccgacctctgcttcctggctctcgggcctgcctggtggtctacggttcagcgggcgtgcggggtgcaggtggcctgtggggcagcctggacactggccttgctgctcaccgtgccctccgccatctaccgccggctgcaccaggagcacttcccagcccggctgcagtgtgtggtggactacggcggctcctccagcaccgagaatgcggtgactgccatccggtttctttttggcttcctggggcccctggtggccgtggccagctgccacagtgccctcctgtgctgggcagcccgacgctgccggccgctgggcacagccattgtggtggggttttttgtctgctgggcaccctaccacctgctggggctggtgctcactgtggcggccccgaactccgcactcctggccagggccctgcgggctgaacccctcatcgtgggccttgccctcgctcacagctgcctcaatcccatgctcttcctgtattttgggagggctcaactccgccggtcactgccagctgcctgtcactgggccctgagggagtcccagggccaggacgaaagtgtggacagcaagaaatccaccagccatgacctggtctcggagatggaggtgtaggctggagagacattgtgggtgtgtatcttcttatctcatttcacaagactggcttcaggcatagctggatccaggagctcaatgatgtcttcattttattccttccttcattcaacagatatccatcatgcacttgctatgtgcaaggcctttttaggcactagagatatagcagtgaccaaaacagacacaaatcctgccc

SEQ ID NO: 121928 - DNA, 6746 bp, Homo sapiens
  Payload ID: 3895
  Gene Symbol: C5AR2
  Gene Name: complement component 5a receptor 2
  Uniprot ID: Q9P296
  ENST ID: ENST00000595464
  CDS Start-End: 219-1232
tataaagattcactgggactggtgaggtggcagtgctcagcagcatccgacaggagccctggcaaacaggacggatttccaggactctaccagctgccagacacggcagggagagaccccagacctcctgggtcctggctgtgggcccggattgggctcccaagtggcgtttgactcacgtggggacactcttggaagagacgacaccaggagcctgaatggggaacgattctgtcagctacgagtatggggattacagcgacctctcggaccgccctgtggactgcctggatggcgcctgcctggccatcgacccgctgcgcgtggccccgctcccactgtatgccgccatcttcctggtgggggtgccgggcaatgccatggtggcctgggtggctgggaaggtggcccgccggagggtgggtgccacctggttgctccacctggccgtggcggatttgctgtgctgtttgtctctgcccatcctggcagtgcccattgcccgtggaggccactggccgtatggtgcagtgggctgtcgggcgctgccctccatcatcctgctgaccatgtatgccagcgtcctgctcctggcagctctcagtgccgacctctgcttcctggctctcgggcctgcctggtggtctacggttcagcgggcgtgcggggtgcaggtggcctgtggggcagcctggacactggccttgctgctcaccgtgccctccgccatctaccgccggctgcaccaggagcacttcccagcccggctgcagtgtgtggtggactacggcggctcctccagcaccgagaatgcggtgactgccatccggtttctttttggcttcctggggcccctggtggccgtggccagctgccacagtgccctcctgtgctgggcagcccgacgctgccggccgctgggcacagccattgtggtggggttttttgtctgctgggcaccctaccacctgctggggctggtgctcactgtggcggccccgaactccgcactcctggccagggccctgcgggctgaacccctcatcgtgggccttgccctcgctcacagctgcctcaatcccatgctcttcctgtattttgggagggctcaactccgccggtcactgccagctgcctgtcactgggccctgagggagtcccagggccaggacgaaagtgtggacagcaagaaatccaccagccatgacctggtctcggagatggaggtgtaggctggagagacattgtgggtgtgtatcttcttatctcatttcacaagactggcttcaggcatagctggatccaggagctcaatgatgtcttcattttattccttccttcattcaacagatatccatcatgcacttgctatgtgcaaggcctttttaggcactagagatatagcagtgaccaaaacagacacaaatcctgccctcagggagctgatattcttctagtggaggaagacagactataaacaaagatatatagggccatttgcggtggctcacgcctgtaattccagggctttgggaggctgaggcaggtagatcacttgaggtcaggacttcaagaccagcctagccaatatggtgaaaccctgtctctactaaaaatacaaaaattagccgggcatggtggcgcatgcctgtagtcccagctacttgggaggctgaggcagaagaatcgttttgaacccgggaggcagaggtgacagtgagccaagattgagcccctgcactccagcctgggcgacagagcgagactccgtctcaaaaaataaataaataaaagattctatttatttatttatttttttgagatggagtctcgctctgtcgcccaggctggagtgcagtggcacaatctcggctcactgcaagctccgcctcctgagttcacgccattctcctgcctcagcctcctgagtagctgggactacaggcgcccgccaccatgcccagctaatttttgtatttttagtagagaaggggtttcaccttgttagccaggatggtcttgatctcctgacctggtgatccacccgcctcagcctcccaaagtgctgggattacaggcgtgagccaccgcacccggccaaaagattttaataggatccctctggttgctggtggaggtgagagtatggtgtaggggcagtgaagatcccagagaggaggctactgtaatggtccaagcaggaggtgatagcgatttggatcagggtaacagagctgaggtggtgagaggctgacaggtcatgcatctattttgaaggaaaggccaagtccaggctccttagctcggcattcaaggcttctctccaccactggacacacttactctctagcttctcagaccctgtagcaatcagaatcatgacccccggtgatgtccacatcttaatcccctgaacctgtgaagaggtgaccttccatggcaaaagggactttgcaggtgagattaagtaaaggatcttgagaaggggtggttatcctggattgtctgggtgggctcaatggagtcacgagggtccttttaagagggaggcaggagggtcagggtcagtcacaggaggtgacaacggaagcagatgtcatagtgacgtgaggaggtgccaagaaatgcaggcagcttccagaagctgaaacagacaaggaaacagattctctctgaagctcccagaaggaacacagacctcctgacacttttagacctctgatccgcagacctttaagaaaatacatttgtattgttttaagtcactatgtttggggtgatttgttatagcagccgtgggaagctaatacacacccttcgggctatattcacgcttctgcatctttcctgaagctgtgccactggctggaatgtccttctgatctatgttgtgcagttcaacaatcaagagccatctgtggctattcaaattcgaatcaattggccaggcctggtggctcctgcctataatctcagcactttgggaggccgaggtgggaggattgcatgagcccaggagtttgagaccagcctgggcgacatagcaagaccccatctctacaaaaaatacaaaaattagccagacgtggtggggcgtgcctgtagttccagctactgaggagggagttgcttgaatccttctgcttcaatcctccttaaagcaggtagattgcttgagcccgggaagtggagtttgcagtgagcttagatcacaccgctgcactccagcctggatgtcagaatgagactccatctcaaaaaaaaaaagaaagaaagaataaattttcatttcaaatttagttcctcgggcacactggccatagttcaagtgctcagtagccacatatggctggtgactgccatattcgacagcacagctatagaacattgccatcataacagagatttctgttacaaaatgctgttctagaatttacttttgaactctacctgctcagatcttttaaattacatggtaggccaggcatggtggctcacgcctgtgatcccagcactttcggaggcccagtcgggaggatcccttgagcccagaagctggagacctgcctgggcaacagagcaagaccccatctctacaaaaataaaaaaaagaaaattagcctggtttggtggcacatgcctgtagtgccagctactagggagactgaagtgggaggattgcttcagcctgggaggttgaggctgcagtgagccgtgatctcatcactgcactctagcctaggtgacggagcgggaccctgccgctaaataaataaataaataaataacatagtagtgatacctgtgtctgcggtcattactccagaacagcacttcacatatagtttctcctttaaggtcattctcacaacagcccagggagatagggtggcatgcttcattttataagctgaggtcctgggaggggaggtcatttacccaagatcacacagcaagaacaccagacagctggaatttgatcccagttttgactccaatgctcttgctcttcatcatcaataatttccttcaaggcgtccctcaaatgtcacttcctccaggaagccctccctgatttatgctccttccagaaagaatgggctcttcctttctctgagtctctggaacacaaggtcccagctaaactgtaaattccccaagggtaacaactggactaattttttttaatttaatttaattttatttttttgagatgaagtcttgctctgtcacccaggctggattgtagtggcacgatctcggctgaccgcaacctccacctcccgggttcaagcgattcttatgcctcagcctcccgagtagctgggattacaggcgctgccaccacacttggctaatttttgtatttttagtagagacagggtttcaccatgttggccaggctggtctcgaactcctgacctcaggtgatccacccaccttggcctcccaaagtgctgggaatacaggcatgagccaccgttcccggccttatccttgacttagaatacctaacctcctgggaatgcagcccataggtctcagccttatttcacccagctcctgttcaagatggagtcactctggttcacatgcctctgacatttccccgctcccttttataagagaacctttaatcctaagggttgtagagggaggaagatacaacttctgtgacttcttcaggctggacaggggtgacgatatacctgcctaactcttaggatctattggattcagggtagacaggagctcagtcagaaagcactggtatcactttttttttttttttttttttttgagacggagtttcactcttgttgcccaggctggagtgcaatggcacgatctcagctcaccacagcctccgcctcccaggttcaagcgattctcctgcctcagcctccccagtagctgggactacaggcgtgtgccaccaaacccagctaatgtttttttttttttatttttagtagagacggggtttctccatgttggccaggctggtctcgaactcccgacctcaggtgatccacccgcctcggcctcccaaagtgctgggattacagacatgagccaccacgcccggcctgatattttattacttagtattttactctgaattatcatgcgtgaattaagaccaaggctgtcttgtaaaataaaatttgttgtggaacaatttatacagctcctttgaggtaggaggcaggactcaactctggagatggggctcggctcgaatattggaccaaattgaggaccagctaaaacagggaggaggctgaagcaacttattatttttatttatttttattttttggagaaggagtcttgctctgttacccaggctggagtgcagtgacacgatctcggctcactgcaacctccaccttccggattcaagtgattctcctgccgcagcctcccgagtagctgggactacaggcgcatgccaccatgcccagctaatatttttgtattttttagtagagatggggtttcgccatattagccaggctggtcttgaactcctgactcaggtgatctgcccacctcggcctcccaaagtgctgggattacaggtgtgggccaccacgcctggcccgaagcaactttctatgacacgcctaccagtgtgccatgtcagtttgccattgccatggcaacacacccaggagttactgccccttcccatggcaatgaccccatgacccagaagttactgccccttccctagatatttctgcataaactgccccttaatctacatgtaattaaaaataggtataggctatttttatacctatataaataggtataggctaaaaataggtataggctgggcgtggtggctcatgtctgtaatcccagtactttgggaggccaatgcaggtggatcacctgaggtcaggagatcaagaccatcctggctaacatagtgaaaccctgtctctactaaaaatacaaaaaattagccaggcgtgttggcgggagcctgtagactcagctactcgggaggttgaggcaggagaatggcgtgaacccaggaggcggagcttgcagtgagccgagatcacaccactgcactccagcctgggtgacagagcaagactccgtctaaaaaaaaaaaatagtaagaaagaaggaaagacacaaagacagaaagaaggaaggaaagaaagcaagctgttttcccctgccttgcccctgctcacctttgaattcttttctgggcaaagccaagaaccctcgtgggctaaaaccccgctttggggcttaaagtttgcaaaatcctcccattaatctattgggaccagttgccacttaggagcattctttgataacttttacaaaacatcttttgtggtttttgaaatgttttcattttgtagatcattagcccttcttttttgaactggaatacatttcacgggaattttcaaatttaagtctgtgcaatgttacataaaatacctttgattattaaaagccatctgttttgctataacttcccttttttgttctaaagtttgtctatttctgctatttgtttttttaccatagaaatattgatttccttaagttttcaaagaaccaagttattaataatttctctaagaactagtctcaagcttgctatacaatcctatggttgatagactgtggctttcttgttgatttccatttgttgttcatttcctccaattttccttttttaaaaattataattattgtttggatta

SEQ ID NO: 121929 - DNA, 3661 bp, Homo sapiens
  Payload ID: 3896
  Gene Symbol: C6
  Gene Name: complement component 6
  Uniprot ID: P13671
  ENST ID: ENST00000263413
  CDS Start-End: 266-3070
ctaaaatatacccgtctctcttaattttgtatgtcttcaacataacattcattaaattttattctgaaactgagtcttaaaaactgaaatacttttaaagagagatgtttctagcttaaatatttcatcatatagtaagattcctgctgagagctcataataagaaatatgaaaccagttactctggacttggattttgatgtgctgaagtatctgctggtatttcttcaagtcatagatgcataggcctggaggctctcaaggcatggccagacgctctgtcttgtacttcatcctgctgaatgctctgatcaacaagggccaagcctgcttctgtgatcactatgcatggactcagtggaccagctgctcaaaaacttgcaattctggaacccagagcagacacagacaaatagtagtagataagtactaccaggaaaacttttgtgaacagatttgcagcaagcaggagactagagaatgtaactggcaaagatgccccatcaactgcctcctgggagattttggaccatggtcagactgtgacccttgtattgaaaaacagtctaaagttagatctgtcttgcgtcccagtcagtttgggggacagccatgcactgcgcctctggtagcctttcaaccatgcattccatctaagctctgcaaaattgaagaggctgactgcaagaataaatttcgctgtgacagtggccgctgcattgccagaaagttagaatgcaatggagaaaatgactgtggagacaattcagatgaaagggactgtgggaggacaaaggcagtatgcacacggaagtataatcccatccctagtgtacagttgatgggcaatgggtttcattttctggcaggagagcccagaggagaagtccttgataactctttcactggaggaatatgtaaaactgtcaaaagcagtaggacaagtaatccataccgtgttccggccaatctggaaaatgtcggctttgaggtacaaactgcagaagatgacttgaaaacagatttctacaaggatttaacttctcttggacacaatgaaaatcaacaaggctcattctcaagtcagggggggagctctttcagtgtaccaattttttattcctcaaagagaagtgaaaatatcaaccataattctgccttcaaacaagccattcaagcctctcacaaaaaggattctagttttattaggatccataaagtgatgaaagtcttaaacttcacaacgaaagctaaagatctgcacctttctgatgtctttttgaaagcacttaaccatctgcctctagaatacaactctgctttgtacagccgaatattcgatgactttgggactcattacttcacctctggctccctgggaggcgtgtatgaccttctctatcagtttagcagtgaggaactaaagaactcaggtttaaccgaggaagaagccaaacactgtgtcaggattgaaacaaagaaacgcgttttatttgctaagaaaacaaaagtggaacataggtgcaccaccaacaagctgtcagagaaacatgaaggttcatttatacagggagcagagaaatccatatccctgattcgaggtggaaggagtgaatatggagcagctttggcatgggagaaagggagctctggtctggaggagaagacattttctgagtggttagaatcagtgaaggaaaatcctgctgtgattgactttgagcttgcccccatcgtggacttggtaagaaacatcccctgtgcagtgacaaaacggaacaacctcaggaaagctttgcaagagtatgcagccaagttcgatccttgccagtgtgctccatgccctaataatggccgacccaccctctcagggactgaatgtctgtgtgtgtgtcagagtggcacctatggtgagaactgtgagaaacagtctccagattataaatccaatgcagtagacggacagtggggttgttggtcttcctggagtacctgtgatgctacttataagagatcgagaacccgagaatgcaataatcctgccccccaacgaggagggaaacgctgtgagggggagaagcgacaagaggaagactgcacattttcaatcatggaaaacaatggacaaccatgtatcaatgatgacgaagaaatgaaagaggtcgatcttcctgagatagaagcagattccgggtgtcctcagccagttcctccagaaaatggatttatccggaatgaaaagcaactatacttggttggagaagatgttgaaatttcatgccttactggctttgaaactgttggataccagtacttcagatgcttaccagacgggacctggagacaaggggatgtggaatgccaacggacggagtgcatcaagccagttgtgcaggaagtcctgacaattacaccatttcagagattgtatagaattggtgaatccattgagctaacttgccccaaaggctttgttgttgctgggccatcaaggtacacatgccaggggaattcctggacaccacccatttcaaactctctcacctgtgaaaaagatactctaacaaaattaaaaggccattgtcagctgggacagaaacaatcaggatctgaatgcatttgtatgtctccagaagaagactgtagccatcattcagaagatctctgtgtgtttgacacagactccaacgattactttacttcacccgcttgtaagtttttggctgagaaatgtttaaataatcagcaactccattttctacatattggttcctgccaagacggccgccagttagaatggggtcttgaaaggacaagactttcatccaacagcacaaagaaagaatcctgtggctatgacacctgctatgactgggaaaaatgttcagcctccacttccaaatgtgtctgcctattgcccccacagtgcttcaagggtggaaaccaactctactgtgtcaaaatgggatcatcaacaagtgagaaaacattgaacatctgtgaagtgggaactataagatgtgcaaacaggaagatggaaatactgcatcctggaaagtgtttggcctagcacaattactgctaggcccagcacaatgaacagatttaccatcccgaagaaccaactcctacaaatgagaattcttgcacaaacagcagactggcatgctcaaagttactgacaaaaattattttctgttagtttgagatcattattctcccctgactctcctgtttgggcatgtcttattcagttccagctcatgacgccctgtagcatacccctaggtaccaacttccacagcagtctcgtaaattctcctgttcacattgtacaaaaataatgtgacttctgaggcccttatgtagcctgtgacattaagcattctcgcaattagaaataagaataaaacccataattttcttcaatgagttaataaacagaaatctccagaacctctgaaacacattcttgaagcccagctttcatatcttcattcaacaaataatttctgagtgtgtatacaggatgtcaagtactgaccaaagtcctgagaactcggcagataataaaacagacaaaagcctttgccttcatgaagcatacattcattcaggggtagacacacaaaaaatgaaataaacaggtaaaatatgtagc

SEQ ID NO: 121930 - DNA, 3551 bp, Homo sapiens
  Payload ID: 3896
  Gene Symbol: C6
  Gene Name: complement component 6
  Uniprot ID: P13671
  ENST ID: ENST00000337836
  CDS Start-End: 156-2960
ttgccttgtgttagctagcaataagaaaagaagctttgtttggattaacatatataccctcttcattctgcatacctattttttccccaataatttgcagcttaggtccgaggacaccacaaactctgcttaaagggcctggaggctctcaaggcatggccagacgctctgtcttgtacttcatcctgctgaatgctctgatcaacaagggccaagcctgcttctgtgatcactatgcatggactcagtggaccagctgctcaaaaacttgcaattctggaacccagagcagacacagacaaatagtagtagataagtactaccaggaaaacttttgtgaacagatttgcagcaagcaggagactagagaatgtaactggcaaagatgccccatcaactgcctcctgggagattttggaccatggtcagactgtgacccttgtattgaaaaacagtctaaagttagatctgtcttgcgtcccagtcagtttgggggacagccatgcactgcgcctctggtagcctttcaaccatgcattccatctaagctctgcaaaattgaagaggctgactgcaagaataaatttcgctgtgacagtggccgctgcattgccagaaagttagaatgcaatggagaaaatgactgtggagacaattcagatgaaagggactgtgggaggacaaaggcagtatgcacacggaagtataatcccatccctagtgtacagttgatgggcaatgggtttcattttctggcaggagagcccagaggagaagtccttgataactctttcactggaggaatatgtaaaactgtcaaaagcagtaggacaagtaatccataccgtgttccggccaatctggaaaatgtcggctttgaggtacaaactgcagaagatgacttgaaaacagatttctacaaggatttaacttctcttggacacaatgaaaatcaacaaggctcattctcaagtcagggggggagctctttcagtgtaccaattttttattcctcaaagagaagtgaaaatatcaaccataattctgccttcaaacaagccattcaagcctctcacaaaaaggattctagttttattaggatccataaagtgatgaaagtcttaaacttcacaacgaaagctaaagatctgcacctttctgatgtctttttgaaagcacttaaccatctgcctctagaatacaactctgctttgtacagccgaatattcgatgactttgggactcattacttcacctctggctccctgggaggcgtgtatgaccttctctatcagtttagcagtgaggaactaaagaactcaggtttaaccgaggaagaagccaaacactgtgtcaggattgaaacaaagaaacgcgttttatttgctaagaaaacaaaagtggaacataggtgcaccaccaacaagctgtcagagaaacatgaaggttcatttatacagggagcagagaaatccatatccctgattcgaggtggaaggagtgaatatggagcagctttggcatgggagaaagggagctctggtctggaggagaagacattttctgagtggttagaatcagtgaaggaaaatcctgctgtgattgactttgagcttgcccccatcgtggacttggtaagaaacatcccctgtgcagtgacaaaacggaacaacctcaggaaagctttgcaagagtatgcagccaagttcgatccttgccagtgtgctccatgccctaataatggccgacccaccctctcagggactgaatgtctgtgtgtgtgtcagagtggcacctatggtgagaactgtgagaaacagtctccagattataaatccaatgcagtagacggacagtggggttgttggtcttcctggagtacctgtgatgctacttataagagatcgagaacccgagaatgcaataatcctgccccccaacgaggagggaaacgctgtgagggggagaagcgacaagaggaagactgcacattttcaatcatggaaaacaatggacaaccatgtatcaatgatgacgaagaaatgaaagaggtcgatcttcctgagatagaagcagattccgggtgtcctcagccagttcctccagaaaatggatttatccggaatgaaaagcaactatacttggttggagaagatgttgaaatttcatgccttactggctttgaaactgttggataccagtacttcagatgcttaccagacgggacctggagacaaggggatgtggaatgccaacggacggagtgcatcaagccagttgtgcaggaagtcctgacaattacaccatttcagagattgtatagaattggtgaatccattgagctaacttgccccaaaggctttgttgttgctgggccatcaaggtacacatgccaggggaattcctggacaccacccatttcaaactctctcacctgtgaaaaagatactctaacaaaattaaaaggccattgtcagctgggacagaaacaatcaggatctgaatgcatttgtatgtctccagaagaagactgtagccatcattcagaagatctctgtgtgtttgacacagactccaacgattactttacttcacccgcttgtaagtttttggctgagaaatgtttaaataatcagcaactccattttctacatattggttcctgccaagacggccgccagttagaatggggtcttgaaaggacaagactttcatccaacagcacaaagaaagaatcctgtggctatgacacctgctatgactgggaaaaatgttcagcctccacttccaaatgtgtctgcctattgcccccacagtgcttcaagggtggaaaccaactctactgtgtcaaaatgggatcatcaacaagtgagaaaacattgaacatctgtgaagtgggaactataagatgtgcaaacaggaagatggaaatactgcatcctggaaagtgtttggcctagcacaattactgctaggcccagcacaatgaacagatttaccatcccgaagaaccaactcctacaaatgagaattcttgcacaaacagcagactggcatgctcaaagttactgacaaaaattattttctgttagtttgagatcattattctcccctgactctcctgtttgggcatgtcttattcagttccagctcatgacgccctgtagcatacccctaggtaccaacttccacagcagtctcgtaaattctcctgttcacattgtacaaaaataatgtgacttctgaggcccttatgtagcctgtgacattaagcattctcgcaattagaaataagaataaaacccataattttcttcaatgagttaataaacagaaatctccagaacctctgaaacacattcttgaagcccagctttcatatcttcattcaacaaataatttctgagtgtgtatacaggatgtcaagtactgaccaaagtcctgagaactcggcagataataaaacagacaaaagcctttgccttcatgaagcatacattcattcaggggtagacacacaaaaaatgaaataaacaggtaaaatatgtagc

SEQ ID NO: 121931 - DNA, 530 bp, Homo sapiens
  Payload ID: 3896
  Gene Symbol: C6
  Gene Name: complement component 6
  ENST ID: ENST00000417809
  CDS Start-End: 131-530
atgcacagaaaaaaataataagaaataagaaattcagtaagtttacatggagatgtaaaggaagaacctatagctggggataaactagagcatcctcagaaatctgttggggcctggaggctctcaaggcatggccagacgctctgtcttgtacttcatcctgctgaatgctctgatcaacaagggccaagcctgcttctgtgatcactatgcatggactcagtggaccagctgctcaaaaacttgcaattctggaacccagagcagacacagacaaatagtagtagataagtactaccaggaaaacttttgtgaacagatttgcagcaagcaggagactagagaatgtaactggcaaagatgccccatcaactgcctcctgggagattttggaccatggtcagactgtgacccttgtattgaaaaacagtctaaagttagatctgtcttgcgtcccagtcagtttgggggacagccatgcactgcgcctctggtagcctttcaaccatgcattccatctaagctctgca

SEQ ID NO: 121932 - DNA, 490 bp, Homo sapiens
  Payload ID: 3896
  Gene Symbol: C6
  Gene Name: complement component 6
  ENST ID: ENST00000433294
  CDS Start-End: 398-490
gtaatcatttgcaaagttcaagttccagagaacatttattttgacaaccctctaggtgttgctaggcttctgggatatgacagcattgccttgtgttagctagcaataagaaaagaagctttgtttggattaacatatataccctcttcattctgcatacctattttttccccaataatttgcagcttaggtccgaggacaccacaaactctgcttaaagtgaacgttctctttagcaggtttccagcatgtcaggaaatgaaaaagagcttccagaagaatgatccaaacttctttcccagtcccagaaaagtaggaacagctgaaatgtacttgaggctattgctcacacaaaaggagcaggtgttttgagaaggggcctggaggctctcaaggcatggccagacgctctgtcttgtacttcatcctgctgaatgctctgatcaacaagggccaagcctgcttctgtgatcactatgcatggactcag

SEQ ID NO: 121933 - DNA, 4257 bp, Homo sapiens
  Payload ID: 3897
  Gene Symbol: C7
  Gene Name: complement component 7
  Uniprot ID: P10643
  ENST ID: ENST00000313164
  CDS Start-End: 360-2891
attgaactgagaacatttgctgtgtttcctgatttatagatatgtttctaagaaacatatctataacttccaaacagtcccagctggctgtagctaaggctgtgtaattgataagatgcatctggtttcaaggcacagattaagtacaaggtcaggctcttgctgtcgttggagaatccggttggggtaggagctaaatctcaggaccacttgctctatatatgagtgccaagataatctagagcagggagaggcagagaggcaggcagcctgctgggctcttcctgctgttgaaaacttacccggcccttacagaggaaatcttcctcctctcttctgccctgaatgttttcccaaacatgaaggtgataagcttattcattttggtgggatttataggagagttccaaagtttttcaagtgcctcctctccagtcaactgccagtgggacttctatgccccttggtcagaatgcaatggctgtaccaagactcagactcgcaggcggtcagttgctgtgtatgggcagtatggaggccagccttgtgttggaaatgcttttgaaacacagtcctgtgaacctacaagaggatgtccaacagaggagggatgtggagagcgtttcaggtgcttttcaggtcagtgcatcagcaaatcattggtttgcaatggggattctgactgtgatgaagacagtgctgatgaagacagatgtgaggactcagaaaggagaccttcctgtgatatcgataaacctcctcctaacatagaacttactggaaatggttacaatgaactcactggccagtttaggaacagagtcatcaataccaaaagttttggtggtcaatgtagaaaggtgtttagtggggatggaaaagatttctacaggctgagtggaaatgtcctgtcctatacattccaggtgaaaataaataatgattttaattatgaattttacaatagtacttggtcttatgtaaaacatacgtcgacagaacacacatcatctagtcggaagcgctccttttttagatcttcatcatcttcttcacgcagttatacttcacataccaatgaaatccataaaggaaagagttaccaactgctggttgttgagaacactgttgaagtggctcagttcattaataacaatccagaatttttacaacttgctgagccattctggaaggagctttcccacctcccctctctgtatgactacagtgcctaccgaagattaatcgaccagtacgggacacattatctgcaatctgggtcgttaggaggagaatacagagttctattttatgtggactcagaaaaattaaaacaaaatgattttaattcagtcgaagaaaagaaatgtaaatcctcaggttggcattttgtcgttaaattttcaagtcatggatgcaaggaactggaaaacgctttaaaagctgcttcaggaacccagaacaatgtattgcgaggagaaccgttcatcagagggggaggtgcaggcttcatatctggccttagttacctagagctggacaatcctgctggaaacaaaaggcgatattctgcctgggcagaatctgtgactaatcttcctcaagtcataaaacaaaagctgacacctttatatgagctggtaaaggaagtaccttgtgcctctgtgaaaaaactatacctgaaatgggctcttgaagagtatctggatgaatttgacccctgtcattgccggccttgtcaaaatggtggtttggctactgttgaggggacccattgtctgtgccattgcaaaccgtacacatttggtgcggcgtgtgagcaaggagtcctcgtagggaatcaagcaggaggggttgatggaggttggagttgctggtcctcttggagcccctgtgtccaagggaagaaaacaagaagccgtgaatgcaataacccacctcccagtgggggtgggagatcctgcgttggagaaacgacagaaagcacacaatgcgaagatgaggagctggagcacttgaggttgcttgaaccacattgctttcctttgtctttggttccaacagaattctgtccatcacctcctgccttgaaagatggatttgttcaagatgaaggtacaatgtttcctgtggggaaaaatgtagtgtacacttgcaatgaaggatactctcttattggaaacccagtggccagatgtggagaagatttacggtggcttgttggggaaatgcattgtcagaaaattgcctgtgttctacctgtactgatggatggcatacagagtcacccccaaaaacctttctacacagttggtgagaaggtgactgtttcctgttcaggtggcatgtccttagaaggtccttcagcatttctctgtggctccagccttaagtggagtcctgagatgaagaatgcccgctgtgtacaaaaagaaaatccgttaacacaggcagtgcctaaatgtcagcgctgggagaaactgcagaattcaagatgtgtttgtaaaatgccctacgaatgtggaccttccttggatgtatgtgctcaagatgagagaagcaaaaggatactgcctctgacagtttgcaagatgcatgttctccactgtcagggtagaaattacacccttactggtagggacagctgtactctgcctgcctcagctgagaaagcttgtggtgcctgcccactgtggggaaaatgtgatgctgagagcagcaaatgtgtctgccgagaagcatcggagtgcgaggaagaagggtttagcatttgtgtggaagtgaacggcaaggagcagacgatgtctgagtgtgaggcgggcgctctgagatgcagagggcagagcatctctgtcaccagcataaggccttgtgctgcggaaacccagtaggctcctggaggccctggtcagcttgcttggaatccagcaggcagctggggctgagtgaaaacatctgcacaactgggcactggacagcttttccttcttctccagtgtctaccttcctcctcaactcccagccatctgtataaacacaatcctttgttctcccaaatctgaatcgaattactcttttgcctcctttttaatgtcagtaaggatatgagcctttgcacaggctggctgcgtgttcttgaaataggtgttaccttctctgggccttggttttttaaaatctgtaaaattagaggattgcactagagaaacttgaatgctccattcaggcctatcattttattaagtatgattgacacagcccatgggccagaacacactctacaaaatgactaggataacagaaagaacgtgatctcctgattagagagggtggttttcctcaatggaaccaaatataaagaggacttgaacaaaaatgacagatacaaactatttctatcctgagtagtaatctcacacttcatcctatagagtcaaccaccacagataggaattccttattctttttttaatttttttaagacagagtctcactttgttgcccaggctggagcgcagtggggtgatctcatctccctgcaacctccgcctcctgggttcaagcgattcttgtgcctcagcttcccaagcagctgggattacaggtgcccgccaccacgcccagctaatttttgcatttttagtagagatggggtttcaccatgttggccacgctcgtctccaactcctgacctcaggtaatccgcctgccttggcctcccaaagtgctgggattacagacatgaaccaccacgcctggctggaatacttactcttgtcgggagattgaaccactaaaatgttagagcagaattcattatgctgtggtcacaggggtgtcttgtctgagaacaaatacaattcagtcttctctttggggttttagtatgtgtcaaacataggactggaagtttgcccctgttcttttttcttttgaaagaacatcagttcatgcctgaggcatgagtgactgtgcatttgagaatagttttccctattctgtggatacagtcccagagttttcagggagtacacaggtagattagtttgaagcattgaccttttatttattccttatttctctttcatcaaaacaaaacagcagctgtgggaggagaaatgagagggcttaaatgaaatttaaaataagctatattatacaaatactatctctgtattgttctgaccctggtaaatatatttcaaaacttcagatgacaaggattagaacactcattaaagatgctattcttcagaa

SEQ ID NO: 121934 - DNA, 2356 bp, Homo sapiens
  Payload ID: 3898
  Gene Symbol: C8A
  Gene Name: complement component 8, alpha polypeptide
  Uniprot ID: P07357
  ENST ID: ENST00000361249
  CDS Start-End: 97-1851
ttacaggtcccagcctgtagacatcttttactccaatttcctgaatagatagctttattccttcaaggtaatatagtgcggtggcttctggctgagatgtttgctgttgttttcttcatcttgtctttgatgacttgtcagcctggggtaactgcacaggagaaggtgaaccagagagtaagacgggcagctacacccgcagcagttacctgccagctgagcaactggtcagagtggacagattgctttccgtgccaggacaaaaagtaccgacaccggagcctcttgcagccaaacaagtttgggggaaccatctgcagtggtgacatctgggatcaagccagctgctccagttctacaacttgtgtaaggcaagcacagtgtggacaggatttccagtgtaaggagacaggtcgctgcctgaaacgccaccttgtgtgtaatggagaccaggactgccttgatggctctgatgaggacgactgtgaagatgtcagggccattgacgaagactgcagccagtatgaaccaattccaggatcacagaaggcagccttggggtacaatatcctgacccaggaagatgctcagagtgtgtacgatgccagttattatgggggccagtgtgagacggtatacaatggggaatggagggagcttcgatatgactccacctgtgaacgtctctactatggagatgatgagaaatactttcggaaaccctacaactttctgaagtaccactttgaagccctggcagatactggaatctcctcagagttttatgataatgcaaatgaccttctttccaaagttaaaaaagacaagtctgactcatttggagtgaccatcggcataggcccagccggcagccctttattggtgggtgtaggtgtatcccactcacaagacacttcattcttgaacgaattaaacaagtataatgagaagaaattcattttcacaagaatcttcacaaaggtgcagactgcacattttaagatgaggaaggatgacattatgctggatgaaggaatgctgcagtcattaatggagcttccagatcagtacaattatggcatgtatgccaagttcatcaatgactatggcacccattacatcacatctggatccatgggtggcatttatgaatatatcctggtgattgacaaagcaaaaatggaatcccttggtattaccagcagagatatcacgacatgttttggaggctccttgggcattcaatatgaagacaaaataaatgttggtggaggtttatcaggagaccattgtaaaaaatttggaggtggcaaaactgaaagggccaggaaggccatggctgtggaagacattatttctcgggtgcgaggtggcagttctggctggagcggtggcttggcacagaacaggagcaccattacataccgttcctgggggaggtcattaaagtataatcctgttgttatcgattttgagatgcagcctatccacgaggtgctgcggcacacaagcctggggcctctggaggccaagcgccagaacctgcgccgcgccttggaccagtatctgatggaattcaatgcctgccgatgtgggccttgcttcaacaatggggtgcccatcctcgagggcaccagctgcaggtgccagtgccgcctgggtagcttgggtgctgcctgtgagcaaacacagacagaaggagccaaagcagatgggagctggagttgctggagctcctggtctgtatgcagagcaggcatccaggaaaggagaagagagtgtgacaatccagcacctcagaatggaggggcctcgtgtccagggcggaaagtacagacgcaggcttgctgagggcctctggacacaggctggaccagatgctgtggatgtcgacccctgcactgactattggataaagacttctttcaactaagagaagatgcaaatcagcacacttttttctttgttctgccagcttccaggcctaagactaggttttgctgtctacagccaactattctattagttacaaaactcaatcattttattcagcaactggatgttgactgttaactagaagctctgtcctacttacagcactttggatcatcaaaaaaataaagtaaaatagaaaactgagaaaactcaatccatgaccagggagaacttacaggatgttagagacaaaacaagcagacacctgaaacaatcaacgcccaataaaacaaagtaggatgaaaattctcttagttctttgataacaatttgttcactcatagaaacattattaattggtagggtaagcagacactctgaaacaatgagaaaaatactaaaaattgacttgagttatttc

SEQ ID NO: 121935 - DNA, 2037 bp, Homo sapiens
  Payload ID: 3899
  Gene Symbol: C8B
  Gene Name: complement component 8, beta polypeptide
  Uniprot ID: P07358
  ENST ID: ENST00000371237
  CDS Start-End: 68-1843
ggcactcacagcacaggcttgttatgggtctagcagcctctgtggcatctcctgtcacattgggaaaatgaagaattccaggacatgggcttggagggcgccggtggagctatttcttctctgtgctgccctgggctgtctcagtttgcctggctccagaggtgaaaggccacattcctttgggtcaaatgcagtcaacaagagctttgctaagagcagacagatgcggagtgtggatgttaccctgatgcccattgattgtgagctgtctagttggtcctcttggaccacatgtgacccctgtcagaagaaaaggtacaggtatgcctacttgctccagccctctcagttccatggggaaccgtgcaacttctctgacaaggaagtcgaagactgtgttaccaacagaccatgcggaagtcaagtgcgatgtgaaggctttgtgtgtgcacagacaggaaggtgtgtaaaccgcagacttctttgcaatggggacaatgactgtggagaccagtcagatgaagcaaactgtagaaggatttataaaaaatgtcagcatgaaatggaccaatactggggaattggcagtctggccagtgggataaatttgttcacaaacagttttgagggcccagttcttgatcacaggtattatgcaggtggatgctccccgcattacatcctgaacacgaggtttaggaagccctacaatgtggaaagctacacgccacagacccaaggcaaatacgaattcatattaaaagagtatgaatcatactcagattttgaacgcaatgtcacagagaaaatggcaagcaagtctggtttcagttttggttttaaaatacctggaatatttgaacttggcatcagtagtcaaagtgatcgaggcaaacactatattaggagaaccaaacgattctctcatactaaaagcgtatttctgcatgcacgctctgaccttgaagtagcacattacaagctgaaacccagaagcctcatgctccattacgagttccttcagagagttaagcggctgcccctggagtacagctacggggaatacagagatctcttccgtgattttgggacccactacatcacagaggctgtgcttgggggcatttatgaatacaccctcgttatgaacaaagaggccatggagagaggagattatactcttaacaacgtccatgcctgtgccaaaaatgattttaaaattggtggtgccattgaagaggtctacgtcagtctgggtgtgtctgtaggcaaatgcagaggtattctgaatgaaataaaagacagaaacaagagggacaccatggtggaggacttggtggtcctggtacgaggaggggcaagtgagcacatcaccaccctggcataccaggagctgccgacggcggacctgatgcaggagtggggagacgctgtgcagtacaacccagccatcatcaaagttaaggtggagcctctgtatgaactagtgacagccacagattttgcctattccagcacagtgaggcagaacatgaagcaggcactggaggagttccagaaggaagttagttcctgccactgtgctccctgccaaggaaatggagtccctgtcctgaaaggatcacgctgtgactgcatctgtcctgttggatcccaaggcctagcctgtgaggtctcctatcggaagaatacccccattgatgggaagtggaattgctggtcaaattggtcttcatgctctggaagacgtaagacaagacaaaggcagtgtaacaatccacctcctcaaaatgggggtagcccctgttcaggccctgcttcagaaacacttgactgctcctagcagatgatacagcagtgggctacatacaatgagagccctgagccctcaagaactcatgccagctcagccctacaccagtttccacctggagttcatgcaagggcaaaaggcagtgccatgcaagctgtttaaaataaagatgttaccttgtaaaatgcaagttgatttaaataaatactgagttaaaggcttaa

SEQ ID NO: 121936 - DNA, 2289 bp, Homo sapiens
  Payload ID: 3899
  Gene Symbol: C8B
  Gene Name: complement component 8, beta polypeptide
  ENST ID: ENST00000535057
  CDS Start-End: 508-2097
attattctggttggtttccagagtgacaggtaagtttttggtctgtgcaaagtctgtttccagtcactagtggctttctgtttactttgcagagctatttgctcttggggacagaagctgacagtggcactcacagcacaggcttgttatgggtctagcagcctctgtggcatctcctgtcacattgggaaaatgaagaattccaggacatgggcttggagggcgccggtggagctatttcttctctgtgctgccctgggctgtctcagtttgcctggctccagaggtgaaaggccacattcctttgggtcaaatgcagtcaacaagagctttgctaagagcagacagatgcggagtgtggatgttaccctgatgcccattgattgtgagctgtctagttggtcctcttggaccacatgtgacccctgtcagaagaaaagggatcaagtccaggatcatggttttcgaggatccctgtgaccgaatctagcctacatttccagcacaatggacacttgtatgactctggccttcactctctctgggcgtttcttcatgctgctttctcagtacaggtatgcctacttgctccagccctctcagttccatggggaaccgtgcaacttctctgacaaggaagtcgaagactgtgttaccaacagaccatgcggaagtcaagtgcgatgtgaaggctttgtgtgtgcacagacaggaaggtgtgtaaaccgcagacttctttgcaatggggacaatgactgtggagaccagtcagatgaagcaaactgtagaaggatttataaaaaatgtcagcatgaaatggaccaatactggggaattggcagtctggccagtgggataaatttgttcacaaacagttttgagggcccagttcttgatcacaggtattatgcaggtggatgctccccgcattacatcctgaacacgaggtttaggaagccctacaatgtggaaagctacacgccacagacccaaggcaaatacgaattcatattaaaagagtatgaatcatactcagattttgaacgcaatgtcacagagaaaatggcaagcaagtctggtttcagttttggttttaaaatacctggaatatttgaacttggcatcagtagtcaaagtgatcgaggcaaacactatattaggagaaccaaacgattctctcatactaaaagcgtatttctgcatgcacgctctgaccttgaagtagcacattacaagctgaaacccagaagcctcatgctccattacgagttccttcagagagttaagcggctgcccctggagtacagctacggggaatacagagatctcttccgtgattttgggacccactacatcacagaggctgtgcttgggggcatttatgaatacaccctcgttatgaacaaagaggccatggagagaggagattatactcttaacaacgtccatgcctgtgccaaaaatgattttaaaattggtggtgccattgaagaggtctacgtcagtctgggtgtgtctgtaggcaaatgcagaggtattctgaatgaaataaaagacagaaacaagagggacaccatggtggaggacttggtggtcctggtacgaggaggggcaagtgagcacatcaccaccctggcataccaggagctgccgacggcggacctgatgcaggagtggggagacgctgtgcagtacaacccagccatcatcaaagttaaggtggagcctctgtatgaactagtgacagccacagattttgcctattccagcacagtgaggcagaacatgaagcaggcactggaggagttccagaaggaagttagttcctgccactgtgctccctgccaaggaaatggagtccctgtcctgaaaggatcacgctgtgactgcatctgtcctgttggatcccaaggcctagcctgtgaggtctcctatcggaagaatacccccattgatgggaagtggaattgctggtcaaattggtcttcatgctctggaagacgtaagacaagacaaaggcagtgtaacaatccacctcctcaaaatgggggtagcccctgttcaggccctgcttcagaaacacttgactgctcctagcagatgatacagcagtgggctacatacaatgagagccctgagccctcaagaactcatgccagctcagccctacaccagtttccacctggagttcatgcaagggcaaaaggcagtgccatgcaagctgtttaaaataaagatgttaccttgtaaaatgcaagttgatttaaataaatactgagttaaaggctt

SEQ ID NO: 121937 - DNA, 2382 bp, Homo sapiens
  Payload ID: 3899
  Gene Symbol: C8B
  Gene Name: complement component 8, beta polypeptide
  ENST ID: ENST00000543257
  CDS Start-End: 571-2190
attattctggttggtttccagagtgacaggtaagtttttggtctgtgcaaagtctgtttccagtcactagtggctttctgtttactttgcagagctatttgctcttggggacagaagctgacagtggcactcacagcacaggcttgttatgggtctagcagcctctgtggcatctcctgtcacattgggaaaatgaagaattccaggacatgggcttggagggcgccggtggagctatttcttctctgtgctgccctgggctgtctcagtttgcctggctccaggtatttgaattccatctgcgagtagaagaatagtctttggttctggaacagaaaatgctgagaccaccttcgtattggccaaaagagttttttgttcttacttactcttgtaatcaagtcagatgatgaaatcacaatcactgtgtcgtaagacctattatgtattgccactctgtgccagcaacttggaaacattagctataatcctcacagctattccagaggtgaaaggccacattcctttgggtcaaatgcagtcaacaagagctttgctaagagcagacagatgcggagtgtggatgttaccctgatgcccattgattgtgagctgtctagttggtcctcttggaccacatgtgacccctgtcagaagaaaaggtacaggtatgcctacttgctccagccctctcagttccatggggaaccgtgcaacttctctgacaaggaagtcgaagactgtgttaccaacagaccatgcggaagtcaagtgcgatgtgaaggctttgtgtgtgcacagacaggaaggtgtgtaaaccgcagacttctttgcaatggggacaatgactgtggagaccagtcagatgaagcaaactgtagaaggatttataaaaaatgtcagcatgaaatggaccaatactggggaattggcagtctggccagtgggataaatttgttcacaaacagttttgagggcccagttcttgatcacaggtattatgcaggtggatgctccccgcattacatcctgaacacgaggtttaggaagccctacaatgtggaaagctacacgccacagacccaaggcaaatacgaattcatattaaaagagtatgaatcatactcagattttgaacgcaatgtcacagagaaaatggcaagcaagtctggtttcagttttggttttaaaatacctggaatatttgaacttggcatcagtagtcaaagtgatcgaggcaaacactatattaggagaaccaaacgattctctcatactaaaagcgtatttctgcatgcacgctctgaccttgaagtagcacattacaagctgaaacccagaagcctcatgctccattacgagttccttcagagagttaagcggctgcccctggagtacagctacggggaatacagagatctcttccgtgattttgggacccactacatcacagaggctgtgcttgggggcatttatgaatacaccctcgttatgaacaaagaggccatggagagaggagattatactcttaacaacgtccatgcctgtgccaaaaatgattttaaaattggtggtgccattgaagaggtctacgtcagtctgggtgtgtctgtaggcaaatgcagaggtattctgaatgaaataaaagacagaaacaagagggacaccatggtggaggacttggtggtcctggtacgaggaggggcaagtgagcacatcaccaccctggcataccaggagctgccgacggcggacctgatgcaggagtggggagacgctgtgcagtacaacccagccatcatcaaagttaaggtggagcctctgtatgaactagtgacagccacagattttgcctattccagcacagtgaggcagaacatgaagcaggcactggaggagttccagaaggaagttagttcctgccactgtgctccctgccaaggaaatggagtccctgtcctgaaaggatcacgctgtgactgcatctgtcctgttggatcccaaggcctagcctgtgaggtctcctatcggaagaatacccccattgatgggaagtggaattgctggtcaaattggtcttcatgctctggaagacgtaagacaagacaaaggcagtgtaacaatccacctcctcaaaatgggggtagcccctgttcaggccctgcttcagaaacacttgactgctcctagcagatgatacagcagtgggctacatacaatgagagccctgagccctcaagaactcatgccagctcagccctacaccagtttccacctggagttcatgcaagggcaaaaggcagtgccatgcaagctgtttaaaataaagatgttaccttgtaaaatgcaagttgatttaaataaatactgagttaaaggctt

SEQ ID NO: 121938 - DNA, 855 bp, Homo sapiens
  Payload ID: 3900
  Gene Symbol: C8G
  Gene Name: complement component 8, gamma polypeptide
  Uniprot ID: P07360
  ENST ID: ENST00000224181
  CDS Start-End: 61-669
ctgggacttggtggtgctacccttggcctcccacagtcctgccaccctgctgccgccaccatgctgccccctgggactgcgaccctcttgactctgctcctggcagctggctcgctgggccagaagcctcagaggccacgccggcccgcatcccccatcagcaccatccagcccaaggccaattttgatgctcagcagtttgcagggacctggctccttgtggctgtgggctccgcttgccgtttcctgcaggagcagggccaccgggccgaggccaccacactgcatgtggctccccagggcacagccatggctgtcagtaccttccgaaagctggatgggatctgctggcaggtgcgccagctctatggagacacaggggtcctcggccgcttcctgcttcaagcccgagacgcccgaggggctgtgcacgtggttgtcgctgagaccgactaccagagtttcgctgtcctgtacctggagcgggcggggcagctgtcagtgaagctctacgcccgctcgctccctgtgagcgactcggtcctgagtgggtttgagcagcgggtccaggaggcccacctgactgaggaccagatcttctacttccccaagtacggcttctgcgaggctgcagaccagttccacgtcctggacgaagtgaggaggtgaggccggcacacagctccagtgctgagaagtcagtgccccgagagacgaccccaccagtggggtgcccgctgcctgtcctccgtgaaaccagcctcagatcagggccctgccacccagggcaggggatcttctgccggctgccccagaggacagtgggtggagtggtacctacttattaaatgtctc

SEQ ID NO: 121939 - DNA, 567 bp, Homo sapiens
  Payload ID: 3900
  Gene Symbol: C8G
  Gene Name: complement component 8, gamma polypeptide
  ENST ID: ENST00000371634
  CDS Start-End: 76-567
agagtagactctgtcctgggacttggtggtgctacccttggcctcccacagtcctgccaccctgctgccgccaccatgctgccccctgggactgcgaccctcttgactctgctcctggcagctggctcgctgggccagaagcctcagaggccacgccggcccgcatcccccatcagcaccatccagcccaaggccaattttgatgctcagcagtttgcagggacctggctccttgtggctgtgggctccgcttgccgtttcctgcaggagcagggccaccgggccgaggccaccacactgcatgtggctccccagggcacagccatggctgtcagtaccttccgaaagctggatgggatctgctggcaggtgcgccagctctatggagacacaggggtcctcggccgcttcctgcttcaagcccgagacgcccgaggggctgtgcacgtggttgtcgctgagaccgactaccagagtttcgctgtcctgtacctggagcgggcggggcagctgtcagtgaagctctacggggcccagggagtagtgacagacaggcctggtgtggga

SEQ ID NO: 121940 - DNA, 2713 bp, Homo sapiens
  Payload ID: 3901
  Gene Symbol: C9
  Gene Name: complement component 9
  Uniprot ID: P02748
  ENST ID: ENST00000263408
  CDS Start-End: 97-1776
aaacaatgcttgttccctgtcctctggccctttgcaaataaatgccttaccagacctgccctgccaccccactcgcagccacccagcaagagcagcatgtcagcctgccggagctttgcagttgcaatctgcattttagaaataagcatcctcacagcacagtacacgaccagttatgacccagagctaacagaaagcagtggctctgcatcacacatagactgcagaatgagcccctggagtgaatggtcacaatgcgatccttgtctcagacaaatgtttcgttcaagaagcattgaggtctttggacaatttaatgggaaaagatgcaccgacgctgtgggagacagacgacagtgtgtgcccacagagccctgtgaggatgctgaggatgactgcggaaatgactttcaatgcagtacaggcagatgcataaagatgcgacttcggtgtaatggtgacaatgactgcggagacttttcagatgaggatgattgtgaaagtgagccccgtcccccctgcagagacagagtggtagaagagtctgagctggcacgaacagcaggctatgggatcaacattttagggatggatcccctaagcacaccttttgacaatgagttctacaatggactctgtaaccgggatcgggatggaaacactctgacatactaccgaagaccttggaacgtggcttctttgatctatgaaaccaaaggcgagaaaaatttcagaaccgaacattacgaagaacaaattgaagcatttaaaagtatcatccaagagaagacatcaaattttaatgcagctatatctctaaaatttacacccactgaaacaaataaagctgaacaatgttgtgaggaaacagcctcctcaatttctttacatggcaagggtagttttcggttttcatattccaaaaatgaaacttaccaactatttttgtcatattcttcaaagaaggaaaaaatgtttctgcatgtgaaaggagaaattcatctgggaagatttgtaatgagaaatcgcgatgttgtgctcacaacaacttttgtggatgatataaaagctttgccaactacctatgaaaagggagaatattttgcctttttggaaacctatggaactcactacagtagctctgggtctctaggaggactctatgaactaatatatgttttggataaagcttccatgaagcggaaaggtgttgaactaaaagacataaagagatgccttgggtatcatctggatgtatctctggctttctctgaaatctctgttggagctgaatttaataaagatgattgtgtaaagaggggagagggtagagctgtaaacatcaccagtgaaaacctcatagatgatgttgtttcactcataagaggtggaaccagaaaatatgcatttgaactgaaagaaaagcttctccgaggaaccgtgattgatgtgactgactttgtcaactgggcctcttccataaatgatgctcctgttctcattagtcaaaaactgtctcctatatataatctggttccagtgaaaatgaaaaatgcacacctaaagaaacaaaacttggaaagagccattgaagactatatcaatgaatttagtgtaagaaaatgccacacatgccaaaatggaggtacagtgattctaatggatggaaagtgtttgtgtgcctgcccattcaaatttgagggaattgcctgtgaaatcagtaaacaaaaaatttctgaaggattgccagccctagagttccccaatgaaaaatagagctgttggcttctctgagctccagtggaagaagaaaacactagtaccttcagatcctacccctgaagataatcttagctgccaagtaaatagcaacatgcttcatgaaaatcctaccaacctctgaagtctcttctctcttaggtctataatttttttttaaatttttcttccttaaactcctgtgatgtttccattttttgttccctaatgagaagtcaacagtgaaatacgccagaactgctttatcccacggaaaatgccaatctcttctaaaaaaaaacaaaattaaattaaaaacagaatgttggtttaaaaaacttcaaagtaattttcaaacggctttgtatggttaacatattctgccaggtccatgaccacacgtctgtaccatgcaatttaactcttatttacattgttatgtttagtttggttatttgcttaggtgtgcatacattcattcagcaaatgctgagcaccagccacgtgcacagcagttgcttttactagtcttagctctacgatttaaatccatgtgtccaagggggaaaacatattatatttgtaaccaaaaactactagtttaccagaggactgaagggagataaagaggagttggttaatgggtacaaaaatccagttagatgaaaggaataatatagatagtgttcagtagcagaatagaatgaacataaactattagtttaaattatgtgaaattccttctatttgatcatattttacaagaaaaaacatcaattttatatagtccaacttaatacctagccttatgagttgtataaggtaaggttacctacctgagaagctgattaacattggttgtacaatcttattcattagagaacatggtgcttagggtctgagaccttttgaaaggtctgagaactctttaaaaaaaggaaagaaagaaagaaaa

SEQ ID NO: 121941 - DNA, 1921 bp, Homo sapiens
  Payload ID: 3902
  Gene Symbol: CFB
  Gene Name: complement factor B
  ENST ID: ENST00000375443
  CDS Start-End: 154-1921
aataaaaatcaatggtttccacatctctcagtgcctctatctggaggccaggtctggagtttcagcttggacactgagccaagcagacaagcaaagcaagccaggacacaccatcctgccccaggcccagcttctctcctgccttccaacgccatggggagcaatctcagcccccaactctgcctgatgccctttatcttgggcctcttgtctggaggtgtgaccaccactccatggtctttggcccagccccagggatcctgctctctggagggggtagagatcaaaggcggctccttccgacttctccaagagggccaggcactggagtacgtgtgtccttctggcttctacccgtaccctgtgcagacacgtacctgcagatctacggggtcctggagcaccctgaagactcaagaccaaaagactgtcaggaaggcagagtgcagagcaatccactgtccaagaccacacgacttcgagaacggggaatactggccccggtctccctactacaatgtgagtgatgagatctctttccactgctatgacggttacactctccggggctctgccaatcgcacctgccaagtgaatggccggtggagtgggcagacagcgatctgtgacaacggagcggggtactgctccaacccgggcatccccattggcacaaggaaggtgggcagccagtaccgccttgaagacagcgtcacctaccactgcagccgggggcttaccctgcgtggctcccagcggcgaacgtgtcaggaaggtggctcttggagcgggacggagccttcctgccaagactccttcatgtacgacacccctcaagaggtggccgaagctttcctgtcttccctgacagagaccatagaaggagtcgatgctgaggatgggcacggcccaggggaacaacagaagcggaagatcgtcctggacccttcaggctccatgaacatctacctggtgctagatggatcagacagcattggggccagcaacttcacaggagccaaaaagtgtctagtcaacttaattgagaaggtggcaagttatggtgtgaagccaagatatggtctagtgacatatgccacataccccaaaatttgggtcaaagtgtctgaagcagacagcagtaatgcagactgggtcacgaagcagctcaatgaaatcaattatgaagaccacaagttgaagtcagggactaacaccaagaaggccctccaggcagtgtacagcatgatgagctggccagatgacgtccctcctgaaggctggaaccgcacccgccatgtcatcatcctcatgactgatggattgcacaacatgggcggggacccaattactgtcattgatgagatccgggacttgctatacattggcaaggatcgcaaaaacccaagggaggattatctggatgtctatgtgtttggggtcgggcctttggtgaaccaagtgaacatcaatgctttggcttccaagaaagacaatgagcaacatgtgttcaaagtcaaggatatggaaaacctggaagatgttttctaccaaatgatcgatgaaagccagtctctgagtctctgtggcatggtttgggaacacaggaagggtaccgattaccacaagcaaccatggcaggccaagatctcagtcattcgcccttcaaagggacacgagagctgtatgggggctgtggtgtctgagtactttgtgctgacagcagcacattgtttcactgtggatgacaaggaacactcaatcaaggtcagcgtaggaggggagaagcgggacctggagatagaagtagtcctatttcaccccaactacaacattaatgggaaaaaagaagcaggaattcctgaattttatgactatgacgttgccctgatcaagctcaagaataagctgaaatatggcc

SEQ ID NO: 121942 - DNA, 1996 bp, Homo sapiens
  Payload ID: 3902
  Gene Symbol: CFB
  Gene Name: complement factor B
  ENST ID: ENST00000375455
  CDS Start-End: 229-1996
gcttggatgttccgggaaagtgatgtgggtaggacaggcggggcgagccgcaggtgccagaacacagattgtataaaaggctgggggctggtggggagcaggggaagggaatgtgaccaggtctaggtctggagtttcagcttggacactgagccaagcagacaagcaaagcaagccaggacacaccatcctgccccaggcccagcttctctcctgccttccaacgccatggggagcaatctcagcccccaactctgcctgatgccctttatcttgggcctcttgtctggaggtgtgaccaccactccatggtctttggcccagccccagggatcctgctctctggagggggtagagatcaaaggcggctccttccgacttctccaagagggccaggcactggagtacgtgtgtccttctggcttctacccgtaccctgtgcagacacgtacctgcagatctacggggtcctggagcaccctgaagactcaagaccaaaagactgtcaggaaggcagagtgcagagcaatccactgtccaagaccacacgacttcgagaacggggaatactggccccggtctccctactacaatgtgagtgatgagatctctttccactgctatgacggttacactctccggggctctgccaatcgcacctgccaagtgaatggccggtggagtgggcagacagcgatctgtgacaacggagcggggtactgctccaacccgggcatccccattggcacaaggaaggtgggcagccagtaccgccttgaagacagcgtcacctaccactgcagccgggggcttaccctgcgtggctcccagcggcgaacgtgtcaggaaggtggctcttggagcgggacggagccttcctgccaagactccttcatgtacgacacccctcaagaggtggccgaagctttcctgtcttccctgacagagaccatagaaggagtcgatgctgaggatgggcacggcccaggggaacaacagaagcggaagatcgtcctggacccttcaggctccatgaacatctacctggtgctagatggatcagacagcattggggccagcaacttcacaggagccaaaaagtgtctagtcaacttaattgagaaggtggcaagttatggtgtgaagccaagatatggtctagtgacatatgccacataccccaaaatttgggtcaaagtgtctgaagcagacagcagtaatgcagactgggtcacgaagcagctcaatgaaatcaattatgaagaccacaagttgaagtcagggactaacaccaagaaggccctccaggcagtgtacagcatgatgagctggccagatgacgtccctcctgaaggctggaaccgcacccgccatgtcatcatcctcatgactgatggattgcacaacatgggcggggacccaattactgtcattgatgagatccgggacttgctatacattggcaaggatcgcaaaaacccaagggaggattatctggatgtctatgtgtttggggtcgggcctttggtgaaccaagtgaacatcaatgctttggcttccaagaaagacaatgagcaacatgtgttcaaagtcaaggatatggaaaacctggaagatgttttctaccaaatgatcgatgaaagccagtctctgagtctctgtggcatggtttgggaacacaggaagggtaccgattaccacaagcaaccatggcaggccaagatctcagtcattcgcccttcaaagggacacgagagctgtatgggggctgtggtgtctgagtactttgtgctgacagcagcacattgtttcactgtggatgacaaggaacactcaatcaaggtcagcgtaggaggggagaagcgggacctggagatagaagtagtcctatttcaccccaactacaacattaatgggaaaaaagaagcaggaattcctgaattttatgactatgacgttgccctgatcaagctcaagaataagctgaaatatggcc

SEQ ID NO: 121943 - DNA, 2502 bp, Homo sapiens
  Payload ID: 3902
  Gene Symbol: CFB
  Gene Name: complement factor B
  Uniprot ID: P00751
  ENST ID: ENST00000399981
  CDS Start-End: 154-2448
aataaaaatcaatggtttccacatctctcagtgcctctatctggaggccaggtctggagtttcagcttggacactgagccaagcagacaagcaaagcaagccaggacacaccatcctgccccaggcccagcttctctcctgccttccaacgccatggggagcaatctcagcccccaactctgcctgatgccctttatcttgggcctcttgtctggaggtgtgaccaccactccatggtctttggcccggccccagggatcctgctctctggagggggtagagatcaaaggcggctccttccgacttctccaagagggccaggcactggagtacgtgtgtccttctggcttctacccgtaccctgtgcagacacgtacctgcagatctacggggtcctggagcaccctgaagactcaagaccaaaagactgtcaggaaggcagagtgcagagcaatccactgtccaagaccacacgacttcgagaacggggaatactggccccggtctccctactacaatgtgagtgatgagatctctttccactgctatgacggttacactctccggggctctgccaatcgcacctgccaagtgaatggccggtggagtgggcagacagcgatctgtgacaacggagcggggtactgctccaacccgggcatccccattggcacaaggaaggtgggcagccagtaccgccttgaagacagcgtcacctaccactgcagccgggggcttaccctgcgtggctcccagcggcgaacgtgtcaggaaggtggctcttggagcgggacggagccttcctgccaagactccttcatgtacgacacccctcaagaggtggccgaagctttcctgtcttccctgacagagaccatagaaggagtcgatgctgaggatgggcacggcccaggggaacaacagaagcggaagatcgtcctggacccttcaggctccatgaacatctacctggtgctagatggatcagacagcattggggccagcaacttcacaggagccaaaaagtgtctagtcaacttaattgagaaggtggcaagttatggtgtgaagccaagatatggtctagtgacatatgccacataccccaaaatttgggtcaaagtgtctgaagcagacagcagtaatgcagactgggtcacgaagcagctcaatgaaatcaattatgaagaccacaagttgaagtcagggactaacaccaagaaggccctccaggcagtgtacagcatgatgagctggccagatgacgtccctcctgaaggctggaaccgcacccgccatgtcatcatcctcatgactgatggattgcacaacatgggcggggacccaattactgtcattgatgagatccgggacttgctatacattggcaaggatcgcaaaaacccaagggaggattatctggatgtctatgtgtttggggtcgggcctttggtgaaccaagtgaacatcaatgctttggcttccaagaaagacaatgagcaacatgtgttcaaagtcaaggatatggaaaacctggaagatgttttctaccaaatgatcgatgaaagccagtctctgagtctctgtggcatggtttgggaacacaggaagggtaccgattaccacaagcaaccatggcaggccaagatctcagtcattcgcccttcaaagggacacgagagctgtatgggggctgtggtgtctgagtactttgtgctgacagcagcacattgtttcactgtggatgacaaggaacactcaatcaaggtcagcgtaggaggggagaagcgggacctggagatagaagtagtcctatttcaccccaactacaacattaatgggaaagaagaagcaggaattcctgaattttatgactatgacgttgccctgatcaagctcaagaataagctgaaatatggccagactatcaggcccatttgtctcccctgcaccgagggaacaactcgagctttgaggcttcctccaactaccacttgccagcaacaaaaggaagagctgctccctgcacaggatatcaaagctctgtttgtgtctgaggaggagaaaaagctgactcggaaggaggtctacatcaagaatggggataagaaaggcagctgtgagagagatgctcaatatgccccaggctatgacaaagtcaaggacatctcagaggtggtcacccctcggttcctttgtactggaggagtgagtccctatgctgaccccaatacttgcagaggtgattctggcggccccttgatagttcacaagagaagtcgtttcattcaagttggtgtaatcagctggggagtagtggatgtctgcaaaaaccagaagcggcaaaagcaggtacctgctcacgcccgagactttcacatcaacctctttcaagtgctgccctggctgaaggagaaactccaagatgaggatttgggttttctataaggggtttcctgctggacaggggcgtgggattgaattaaaacagctgcgacaaca

SEQ ID NO: 121944 - DNA, 2577 bp, Homo sapiens
  Payload ID: 3902
  Gene Symbol: CFB
  Gene Name: complement factor B
  Uniprot ID: P00751
  ENST ID: ENST00000433503
  CDS Start-End: 229-2523
gcttggatgttccgggaaagtgatgtgggtaggacaggcggggcgagccgcaggtgccagaacacagattgtataaaaggctgggggctggtggggagcaggggaagggaatgtgaccaggtctaggtctggagtttcagcttggacactgagccaagcagacaagcaaagcaagccaggacacaccatcctgccccaggcccagcttctctcctgccttccaacgccatggggagcaatctcagcccccaactctgcctgatgccctttatcttgggcctcttgtctggaggtgtgaccaccactccatggtctttggcccggccccagggatcctgctctctggagggggtagagatcaaaggcggctccttccgacttctccaagagggccaggcactggagtacgtgtgtccttctggcttctacccgtaccctgtgcagacacgtacctgcagatctacggggtcctggagcaccctgaagactcaagaccaaaagactgtcaggaaggcagagtgcagagcaatccactgtccaagaccacacgacttcgagaacggggaatactggccccggtctccctactacaatgtgagtgatgagatctctttccactgctatgacggttacactctccggggctctgccaatcgcacctgccaagtgaatggccggtggagtgggcagacagcgatctgtgacaacggagcggggtactgctccaacccgggcatccccattggcacaaggaaggtgggcagccagtaccgccttgaagacagcgtcacctaccactgcagccgggggcttaccctgcgtggctcccagcggcgaacgtgtcaggaaggtggctcttggagcgggacggagccttcctgccaagactccttcatgtacgacacccctcaagaggtggccgaagctttcctgtcttccctgacagagaccatagaaggagtcgatgctgaggatgggcacggcccaggggaacaacagaagcggaagatcgtcctggacccttcaggctccatgaacatctacctggtgctagatggatcagacagcattggggccagcaacttcacaggagccaaaaagtgtctagtcaacttaattgagaaggtggcaagttatggtgtgaagccaagatatggtctagtgacatatgccacataccccaaaatttgggtcaaagtgtctgaagcagacagcagtaatgcagactgggtcacgaagcagctcaatgaaatcaattatgaagaccacaagttgaagtcagggactaacaccaagaaggccctccaggcagtgtacagcatgatgagctggccagatgacgtccctcctgaaggctggaaccgcacccgccatgtcatcatcctcatgactgatggattgcacaacatgggcggggacccaattactgtcattgatgagatccgggacttgctatacattggcaaggatcgcaaaaacccaagggaggattatctggatgtctatgtgtttggggtcgggcctttggtgaaccaagtgaacatcaatgctttggcttccaagaaagacaatgagcaacatgtgttcaaagtcaaggatatggaaaacctggaagatgttttctaccaaatgatcgatgaaagccagtctctgagtctctgtggcatggtttgggaacacaggaagggtaccgattaccacaagcaaccatggcaggccaagatctcagtcattcgcccttcaaagggacacgagagctgtatgggggctgtggtgtctgagtactttgtgctgacagcagcacattgtttcactgtggatgacaaggaacactcaatcaaggtcagcgtaggaggggagaagcgggacctggagatagaagtagtcctatttcaccccaactacaacattaatgggaaaaaagaagcaggaattcctgaattttatgactatgacgttgccctgatcaagctcaagaataagctgaaatatggccagactatcaggcccatttgtctcccctgcaccgagggaacaactcgagctttgaggcttcctccaactaccacttgccagcaacaaaaggaagagctgctccctgcacaggatatcaaagctctgtttgtgtctgaggaggagaaaaagctgactcggaaggaggtctacatcaagaatggggataagaaaggcagctgtgagagagatgctcaatatgccccaggctatgacaaagtcaaggacatctcagaggtggtcacccctcggttcctttgtactggaggagtgagtccctatgctgaccccaatacttgcagaggtgattctggcggccccttgatagttcacaagagaagtcgtttcattcaagttggtgtaatcagctggggagtagtggatgtctgcaaaaaccagaagcggcaaaagcaggtacctgctcacgcccgagactttcacatcaacctctttcaagtgctgccctggctgaaggagaaactccaagatgaggatttgggttttctataaggggtttcctgctggacaggggcgtgggattgaattaaaacagctgcgacaaca

SEQ ID NO: 121945 - DNA, 2577 bp, Homo sapiens; identical to SEQ ID NO: 121944
  Payload ID: 3902
  Gene Symbol: CFB
  Gene Name: complement factor B
  Uniprot ID: P00751
  ENST ID: ENST00000436692
  CDS Start-End: 229-2523

SEQ ID NO: 121946 - DNA, 2577 bp, Homo sapiens; identical to SEQ ID NO: 121944
  Payload ID: 3902
  Gene Symbol: CFB
  Gene Name: complement factor B
  Uniprot ID: P00751
  ENST ID: ENST00000419411
  CDS Start-End: 229-2523

SEQ ID NO: 121947 - DNA, 2502 bp, Homo sapiens
  Payload ID: 3902
  Gene Symbol: CFB
  Gene Name: complement factor B
  Uniprot ID: P00751
  ENST ID: ENST00000424727
  CDS Start-End: 154-2448
aataaaaatcaatggtttccacatctctcagtgcctctatctggaggccaggtctggagtttcagcttggacactgagccaagcagacaagcaaagcaagccaggacacaccatcctgccccaggcccagcttctctcctgccttccaacgccatggggagcaatctcagcccccaactctgcctgatgccctttatcttgggcctcttgtctggaggtgtgaccaccactccatggtctttggcccggccccagggatcctgctctctggagggggtagagatcaaaggcggctccttccgacttctccaagagggccaggcactggagtacgtgtgtccttctggcttctacccgtaccctgtgcagacacgtacctgcagatctacggggtcctggagcaccctgaagactcaagaccaaaagactgtcaggaaggcagagtgcagagcaatccactgtccaagaccacacgacttcgagaacggggaatactggccccggtctccctactacaatgtgagtgatgagatctctttccactgctatgacggttacactctccggggctctgccaatcgcacctgccaagtgaatggccggtggagtgggcagacagcgatctgtgacaacggagcggggtactgctccaacccgggcatccccattggcacaaggaaggtgggcagccagtaccgccttgaagacagcgtcacctaccactgcagccgggggcttaccctgcgtggctcccagcggcgaacgtgtcaggaaggtggctcttggagcgggacggagccttcctgccaagactccttcatgtacgacacccctcaagaggtggccgaagctttcctgtcttccctgacagagaccatagaaggagtcgatgctgaggatgggcacggcccaggggaacaacagaagcggaagatcgtcctggacccttcaggctccatgaacatctacctggtgctagatggatcagacagcattggggccagcaacttcacaggagccaaaaagtgtctagtcaacttaattgagaaggtggcaagttatggtgtgaagccaagatatggtctagtgacatatgccacataccccaaaatttgggtcaaagtgtctgaagcagacagcagtaatgcagactgggtcacgaagcagctcaatgaaatcaattatgaagaccacaagttgaagtcagggactaacaccaagaaggccctccaggcagtgtacagcatgatgagctggccagatgacgtccctcctgaaggctggaaccgcacccgccatgtcatcatcctcatgactgatggattgcacaacatgggcggggacccaattactgtcattgatgagatccgggacttgctatacattggcaaggatcgcaaaaacccaagggaggattatctggatgtctatgtgtttggggtcgggcctttggtgaaccaagtgaacatcaatgctttggcttccaagaaagacaatgagcaacatgtgttcaaagtcaaggatatggaaaacctggaagatgttttctaccaaatgatcgatgaaagccagtctctgagtctctgtggcatggtttgggaacacaggaagggtaccgattaccacaagcaaccatggcaggccaagatctcagtcattcgcccttcaaagggacacgagagctgtatgggggctgtggtgtctgagtactttgtgctgacagcagcacattgtttcactgtggatgacaaggaacactcaatcaaggtcagcgtaggaggggagaagcgggacctggagatagaagtagtcctatttcaccccaactacaacattaatgggaaaaaagaagcaggaattcctgaattttatgactatgacgttgccctgatcaagctcaagaataagctgaaatatggccagactatcaggcccatttgtctcccctgcaccgagggaacaactcgagctttgaggcttcctccaactaccacttgccagcaacaaaaggaagagctgctccctgcacaggatatcaaagctctgtttgtgtctgaggaggagaaaaagctgactcggaaggaggtctacatcaagaatggggataagaaaggcagctgtgagagagatgctcaatatgccccaggctatgacaaagtcaaggacatctcagaggtggtcacccctcggttcctttgtactggaggagtgagtccctatgctgaccccaatacttgcagaggtgattctggcggccccttgatagttcacaagagaagtcgtttcattcaagttggtgtaatcagctggggagtagtggatgtctgcaaaaaccagaagcggcaaaagcaggtacctgctcacgcccgagactttcacatcaacctctttcaagtgctgccctggctgaaggagaaactccaagatgaggatttgggttttctataaggggtttcctgctggacaggggcgtgggattgaattaaaacagctgcgacaaca

SEQ ID NO: 121948 - DNA, 2577 bp, Homo sapiens
  Payload ID: 3902
  Gene Symbol: CFB
  Gene Name: complement factor B
  Uniprot ID: P00751
  ENST ID: ENST00000419920
  CDS Start-End: 229-2523
gcttggatgttccgggaaagtgatgtgggtaggacaggcggggcgagccgcaggtgccagaacacagattgtataaaaggctgggggctggtggggagcaggggaagggaatgtgaccaggtctaggtctggagtttcagcttggacactgagccaagcagacaagcaaagcaagccaggacacaccatcctgccccaggcccagcttctctcctgccttccaacgccatggggagcaatctcagcccccaactctgcctgatgccctttatcttgggcctcttgtctggaggtgtgaccaccactccatggtctttggcccggccccagggatcctgctctctggagggggtagagatcaaaggcggctccttccgacttctccaagagggccaggcactggagtacgtgtgtccttctggcttctacccgtaccctgtgcagacacgtacctgcagatctacggggtcctggagcaccctgaagactcaagaccaaaagactgtcaggaaggcagagtgcagagcaatccactgtccaagaccacacgacttcgagaacggggaatactggccccggtctccctactacaatgtgagtgatgagatctctttccactgctatgacggttacactctccggggctctgccaatcgcacctgccaagtgaatggccggtggagtgggcagacagcgatctgtgacaacggagcggggtactgctccaacccgggcatccccattggcacaaggaaggtgggcagccagtaccgccttgaagacagcgtcacctaccactgcagccgggggcttaccctgcgtggctcccagcggcgaacgtgtcaggaaggtggctcttggagcgggacggagccttcctgccaagactccttcatgtacgacacccctcaagaggtggccgaagctttcctgtcttccctgacagagaccatagaaggagtcgatgctgaggatgggcacggcccaggggaacaacagaagcggaagatcgtcctggacccttcaggctccatgaacatctacctggtgctagatggatcagacagcattggggccagcaacttcacaggagccaaaaagtgtctagtcaacttaattgagaaggtggcaagttatggtgtgaagccaagatatggtctagtgacatatgccacataccccaaaatttgggtcaaagtgtctgaagcagacagcagtaatgcagactgggtcacgaagcagctcaatgaaatcaattatgaagaccacaagttgaagtcagggactaacaccaagaaggccctccaggcagtgtacagcatgatgagctggccagatgacgtccctcctgaaggctggaaccgcacccgccatgtcatcatcctcatgactgatggattgcacaacatgggcggggacccaattactgtcattgatgagatccgggacttgctatacattggcaaggatcgcaaaaacccaagggaggattatctggatgtctatgtgtttggggtcgggcctttggtgaaccaagtgaacatcaatgctttggcttccaagaaagacaatgagcaacatgtgttcaaagtcaaggatatggaaaacctggaagatgttttctaccaaatgatcgatgaaagccagtctctgagtctctgtggcatggtttgggaacacaggaagggtaccgattaccacaagcaaccatggcaggccaagatctcagtcattcgcccttcaaagggacacgagagctgtatgggggctgtggtgtctgagtactttgtgctgacagcagcacattgtttcactgtggatgacaaggaacactcaatcaaggtcagcgtaggaggggagaagcgggacctggagatagaagtagtcctatttcaccccaactacaacattaatgggaaagaagaagcaggaattcctgaattttatgactatgacgttgccctgatcaagctcaagaataagctgaaatatggccagactatcaggcccatttgtctcccctgcaccgagggaacaactcgagctttgaggcttcctccaactaccacttgccagcaacaaaaggaagagctgctccctgcacaggatatcaaagctctgtttgtgtctgaggaggagaaaaagctgactcggaaggaggtctacatcaagaatggggataagaaaggcagctgtgagagagatgctcaatatgccccaggctatgacaaagtcaaggacatctcagaggtggtcacccctcggttcctttgtactggaggagtgagtccctatgctgaccccaatacttgcagaggtgattctggcggccccttgatagttcacaagagaagtcgtttcattcaagttggtgtaatcagctggggagtagtggatgtctgcaaaaaccagaagcggcaaaagcaggtacctgctcacgcccgagactttcacatcaacctctttcaagtgctgccctggctgaaggagaaactccaagatgaggatttgggttttctataaggggtttcctgctggacaggggcgtgggattgaattaaaacagctgcgacaaca

SEQ ID NO: 121949 - DNA, 2577 bp, Homo sapiens; identical to SEQ ID NO: 121944
  Payload ID: 3902
  Gene Symbol: CFB
  Gene Name: complement factor B
  Uniprot ID: P00751
  ENST ID: ENST00000427888
  CDS Start-End: 229-2523

SEQ ID NO: 121950 - DNA, 2502 bp, Homo sapiens; identical to SEQ ID NO: 121947
  Payload ID: 3902
  Gene Symbol: CFB
  Gene Name: complement factor B
  Uniprot ID: P00751
  ENST ID: ENST00000426239
  CDS Start-End: 154-2448

SEQ ID NO: 121951 - DNA, 2502 bp, Homo sapiens; identical to SEQ ID NO: 121947
  Payload ID: 3902
  Gene Symbol: CFB
  Gene Name: complement factor B
  Uniprot ID: P00751
  ENST ID: ENST00000455591
  CDS Start-End: 154-2448

SEQ ID NO: 121952 - DNA, 2502 bp, Homo sapiens; identical to SEQ ID NO: 121947
  Payload ID: 3902
  Gene Symbol: CFB
  Gene Name: complement factor B
  Uniprot ID: P00751
  ENST ID: ENST00000417261
  CDS Start-End: 154-2448

SEQ ID NO: 121953 - DNA, 2862 bp, Homo sapiens
  Payload ID: 3902
  Gene Symbol: CFB
  Gene Name: complement factor B
  Uniprot ID: P00751
  ENST ID: ENST00000425368
  CDS Start-End: 514-2808
ggccttgggggagggggaggccagaatgactccaagagctacaggaaggcaggtcagagaccccactggacaaacagtggctggactctgcaccataacacacaatcaacaggggagtgagctggatccttatttctggtccctaagtgggtggtttgggcttactggggaggagctaaggccggagaggaggtactgaaggggagagtcctggacctttggcagcaaagggtgggacttctgcagtttctgtttccttgactggcagctcagcggggccctcccgcttggatgttccgggaaagtgatgtgggtaggacaggcggggcgagccgcaggtgccagaacacagattgtataaaaggctgggggctggtggggagcaggggaagggaatgtgaccaggtctaggtctggagtttcagcttggacactgagccaagcagacaagcaaagcaagccaggacacaccatcctgccccaggcccagcttctctcctgccttccaacgccatggggagcaatctcagcccccaactctgcctgatgccctttatcttgggcctcttgtctggaggtgtgaccaccactccatggtctttggcccggccccagggatcctgctctctggagggggtagagatcaaaggcggctccttccgacttctccaagagggccaggcactggagtacgtgtgtccttctggcttctacccgtaccctgtgcagacacgtacctgcagatctacggggtcctggagcaccctgaagactcaagaccaaaagactgtcaggaaggcagagtgcagagcaatccactgtccaagaccacacgacttcgagaacggggaatactggccccggtctccctactacaatgtgagtgatgagatctctttccactgctatgacggttacactctccggggctctgccaatcgcacctgccaagtgaatggccgatggagtgggcagacagcgatctgtgacaacggagcggggtactgctccaacccgggcatccccattggcacaaggaaggtgggcagccagtaccgccttgaagacagcgtcacctaccactgcagccgggggcttaccctgcgtggctcccagcggcgaacgtgtcaggaaggtggctcttggagcgggacggagccttcctgccaagactccttcatgtacgacacccctcaagaggtggccgaagctttcctgtcttccctgacagagaccatagaaggagtcgatgctgaggatgggcacggcccaggggaacaacagaagcggaagatcgtcctggacccttcaggctccatgaacatctacctggtgctagatggatcagacagcattggggccagcaacttcacaggagccaaaaagtgtctagtcaacttaattgagaaggtggcaagttatggtgtgaagccaagatatggtctagtgacatatgccacataccccaaaatttgggtcaaagtgtctgaagcagacagcagtaatgcagactgggtcacgaagcagctcaatgaaatcaattatgaagaccacaagttgaagtcagggactaacaccaagaaggccctccaggcagtgtacagcatgatgagctggccagatgacgtccctcctgaaggctggaaccgcacccgccatgtcatcatcctcatgactgatggattgcacaacatgggcggggacccaattactgtcattgatgagatccgggacttgctatacattggcaaggatcgcaaaaacccaagggaggattatctggatgtctatgtgtttggggtcgggcctttggtgaaccaagtgaacatcaatgctttggcttccaagaaagacaatgagcaacatgtgttcaaagtcaaggatatggaaaacctggaagatgttttctaccaaatgatcgatgaaagccagtctctgagtctctgtggcatggtttgggaacacaggaagggtaccgattaccacaagcaaccatggcaggccaagatctcagtcattcgcccttcaaagggacacgagagctgtatgggggctgtggtgtctgagtactttgtgctgacagcagcacattgtttcactgtggatgacaaggaacactcaatcaaggtcagcgtaggaggggagaagcgggacctggagatagaagtagtcctatttcaccccaactacaacattaatgggaaaaaagaagcaggaattcctgaattttatgactatgacgttgccctgatcaagctcaagaataagctgaaatatggccagactatcaggcccatttgtctcccctgcaccgagggaacaactcgagctttgaggcttcctccaactaccacttgccagcaacaaaaggaagagctgctccctgcacaggatatcaaagctctgtttgtgtctgaggaggagaaaaagctgactcggaaggaggtctacatcaagaatggggataagaaaggcagctgtgagagagatgctcaatatgccccaggctatgacaaagtcaaggacatctcagaggtggtcacccctcggttcctttgtactggaggagtgagtccctatgctgaccccaatacttgcagaggtgattctggcggccccttgatagttcacaagagaagtcgtttcattcaagttggtgtaatcagctggggagtagtggatgtctgcaaaaaccagaagcggcaaaagcaggtacctgctcacgcccgagactttcacatcaacctctttcaagtgctgccctggctgaaggagaaactccaagatgaggatttgggttttctataaggggtttcctgctggacaggggcgtgggattgaattaaaacagctgcgacaaca

SEQ ID NO: 121954 - DNA, 768 bp, Homo sapiens
  Payload ID: 3902
  Gene Symbol: CFB
  Gene Name: complement factor B
  ENST ID: ENST00000460718
  CDS Start-End: 97-357
agtttcagcttggacactgagccaagcagacaagcaaagcaagccaggacacaccatcctgccccaggcccagcttctctcctgccttccaacgccatggggagcaatctcagcccccaactctgcctgatgccctttatcttgggcctcttgtctggagtacgtgtgtccttctggcttctacccgtaccctgtgcagacacgtacctgcagatctacggggtcctggagcaccctgaagactcaagaccaaaagactgtcaggaaggcagagtgcagagcaatccactgtccaagaccacacgacttcgagaacggggaatactggccccggtctccctactacaatgtgagtgatgagatctctttccactgctatgacggttacactctccggggctctgccaatcgcacctgccaagtgaatggccgatggagtgggcagacagcgatctgtgacaacggagcggggtactgctccaacccgggcatccccattggcacaaggaaggtgggcagccagtaccgccttgaagacagcgtcacctaccactgcagccgggggcttaccctgcgtggctcccagcggcgaacgtgtcaggaaggtggctcttggagcgggacggagccttcctgccaagactccttcatgtacgacacccctcaagaggtggccgaagctttcctgtcttccctgacagagaccatagaaggagtcgatgctgaggatgggcacggcccaggggaacaacagaagcggaagatcgt

SEQ ID NO: 121955 - DNA, 589 bp, Homo sapiens
  Payload ID: 3902
  Gene Symbol: CFB
  Gene Name: complement factor B
  ENST ID: ENST00000498317
  CDS Start-End: 1-205
ccctcggttcctttgtactggaggagtgagtccctatgctgaccccaatacttgcagaggtgattctggcggccccttgatagttcacaagagaagtcgtttcattcaagtgagtcctccctttcctatctggggagatgccaagtggtcagcatgggccccaaagcaggaaagctcaatgcatgtggctagtaattcgaggtaggcagagcctgcctcaccttaggaccgcatgtcttgcctgcgtgtgtcaagaacgaggctgagctgggtccctagtctgattcctttaggtcagctaagacacaagcaggaacagccatgcttccaggattaggaattctactgaatgatccatggcaccccactgcctctgcaggttggtgtaatcagctggggagtagtggatgtctgcaaaaaccagaagcggcaaaagcaggtacctgctcacgcccgagactttcacatcaacctctttcaagtgctgccctggctgaaggagaaactccaagatgaggatttgggttttctataaggggtttcctgctggacaggggcgtgggattgaattaaaacagctgcgacaaca

SEQ ID NO: 121956 - DNA, 940 bp, Homo sapiens
  Payload ID: 3902
  Gene Symbol: CFB
  Gene Name: complement factor B
  ENST ID: ENST00000483004
  CDS Start-End: 1-917
ctgatggattgcacaacatgggcggggacccaattactgtcattgatgagatccgggacttgctatacattggcaaggatcgcaaaaacccaagggaggattatctggatgtctatgtgtttggggtcgggcctttggtgaaccaagtgaacatcaatgctttggcttccaagaaagacaatgagcaacatgtgttcaaagtcaaggatatggaaaacctggaagatgttttctaccaaatgatcggaggggagaagcgggacctggagatagaagtagtcctatttcaccccaactacaacattaatgggaaaaaagaagcaggaattcctgaattttatgactatgacgttgccctgatcaagctcaagaataagctgaaatatggccagactatcaggcccatttgtctcccctgcaccgagggaacaactcgagctttgaggcttcctccaactaccacttgccagcaacaaaaggaagagctgctccctgcacaggatatcaaagctctgtttgtgtctgaggaggagaaaaagctgactcggaaggaggtctacatcaagaatggggataagaaaggcagctgtgagagagatgctcaatatgccccaggctatgacaaagtcaaggacatctcagaggtggtcacccctcggttcctttgtactggaggagtgagtccctatgctgaccccaatacttgcagaggtgattctggcggccccttgatagttcacaagagaagtcgtttcattcaagttggtgtaatcagctggggagtagtggatgtctgcaaaaaccagaagcggcaaaagcaggtacctgctcacgcccgagactttcacatcaacctctttcaagtgctgccctggctgaaggagaaactccaagatgaggatttgggttttctataaggggtttcctgctggacaggggc

SEQ ID NO: 121957 - DNA, 586 bp, Homo sapiens
  Payload ID: 3902
  Gene Symbol: CFB
  Gene Name: complement factor B
  ENST ID: ENST00000475617
  CDS Start-End: 154-586
aataaaaatcaatggtttccacatctctcagtgcctctatctggaggccaggtctggagtttcagcttggacactgagccaagcagacaagcaaagcaagccaggacacaccatcctgccccaggcccagcttctctcctgccttccaacgccatggggagcaatctcagcccccaactctgcctgatgccctttatcttgggcctcttgtctggaggtgtgaccaccactccatggtctttggcccggccccagggatcctgctctctggagggggtagagatcaaaggcggctccttccgacttctccaagagggccaggcactggagtacgtgtgtccttctggcttctacccgtaccctgtgcagacacgtacctgcagatctacggggtcctggagcaccctgaagactcaagaccaaaagactgtcaggaaggcagagtgcagagcaatccactgtccaagaccacacgacttcgagaacggggaatactggccccggtctccctactacaatgtgagtgatgagatctctttccactgctatgacggttacactctccggggctctgccaatcgcacct

SEQ ID NO: 121958 - DNA, 1201 bp, Homo sapiens
  Payload ID: 3903
  Gene Symbol: CFD
  Gene Name: complement factor D (adipsin)
  Uniprot ID: P00746
  ENST ID: ENST00000327726
  CDS Start-End: 48-809
ccccagggccctgcctgggtcagtgtctcagccacagcggcttcaccatgcacagctgggagcgcctggcagttctggtcctcctaggagcggccgcctgcgcggcgccgccccgtggtcggatcctgggcggcagagaggccgaggcgcacgcgcggccctacatggcgtcggtgcagctgaacggcgcgcacctgtgcggcggcgtcctggtggcggagcagtgggtgctgagcgcggcgcactgcctggaggacgcggccgacgggaaggtgcaggttctcctgggcgcgcactccctgtcgcagccggagccctccaagcgcctgtacgacgtgctccgcgcagtgccccacccggacagccagcccgacaccatcgaccacgacctcctgctgctacagctgtcggagaaggccacactgggccctgctgtgcgccccctgccctggcagcgcgtggaccgcgacgtggcaccgggaactctctgcgacgtggccggctggggcatagtcaaccacgcgggccgccgcccggacagcctgcagcacgtgctcttgccagtgctggaccgcgccacctgcaaccggcgcacgcaccacgacggcgccatcaccgagcgcttgatgtgcgcggagagcaatcgccgggacagctgcaagggtgactccgggggcccgctggtgtgcgggggcgtgctcgagggcgtggtcacctcgggctcgcgcgtttgcggcaaccgcaagaagcccgggatctacacccgcgtggcgagctatgcggcctggatcgacagcgtcctggcctagggtgccggggcctgaaggtcagggtcacccaagcaacaaagtcccgagcaatgaagtcatccactcctgcatctggttggtctttattgagcacctactatatgcagaaggggaggccgaggtgggaggatcattggatctcaggagttcgagatcagcatgggccacgtagcgcgactccatctctacaaataaataaaaaattagctgggcaattggcgggcatggaggtgggtgcttgtagttccagctactcaggaggctgaggtgggaggatgacttgaacgcaggaggctgaggctgcagtgagttgtgattgcaccactgccctccagcctgggcaacagagtgaaaccttgtctctctctacaaaaaaaaaaaaaaaattctgc

SEQ ID NO: 121959 - DNA, 809 bp, Homo sapiens
  Payload ID: 3903
  Gene Symbol: CFD
  Gene Name: complement factor D (adipsin)
  ENST ID: ENST00000592860
  CDS Start-End: 27-809
agtgtctcagccacagcggcttcaccatgcacagctgggagcgcctggcagttctggtcctcctaggagcggccgcctgcggtgaggaggcctgggcctgggcggcgccgccccgtggtcggatcctgggcggcagagaggccgaggcgcacgcgcggccctacatggcgtcggtgcagctgaacggcgcgcacctgtgcggcggcgtcctggtggcggagcagtgggtgctgagcgcggcgcactgcctggaggacgcggccgacgggaaggtgcaggttctcctgggcgcgcactccctgtcgcagccggagccctccaagcgcctgtacgacgtgctccgcgcagtgccccacccggacagccagcccgacaccatcgaccacgacctcctgctgctacagctgtcggagaaggccacactgggccctgctgtgcgccccctgccctggcagcgcgtggaccgcgacgtggcaccgggaactctctgcgacgtggccggctggggcatagtcaaccacgcgggccgccgcccggacagcctgcagcacgtgctcttgccagtgctggaccgcgccacctgcaaccggcgcacgcaccacgacggcgccatcaccgagcgcttgatgtgcgcggagagcaatcgccgggacagctgcaagggtgactccgggggcccgctggtgtgcgggggcgtgctcgagggcgtggtcacctcgggctcgcgcgtttgcggcaaccgcaagaagcccgggatctacacccgcgtggcgagctatgcggcctggatcgacagcgtcctggcctag

SEQ ID NO: 121960 - DNA, 1201 bp, Homo sapiens; identical to SEQ ID NO: 121958
  Payload ID: 3903
  Gene Symbol: CFD
  Gene Name: complement factor D (adipsin)
  Uniprot ID: P00746
  ENST ID: ENST00000617994
  CDS Start-End: 48-809

SEQ ID NO: 121961 - DNA, 809 bp, Homo sapiens; identical to SEQ ID NO: 121959
  Payload ID: 3903
  Gene Symbol: CFD
  Gene Name: complement factor D (adipsin)
  ENST ID: ENST00000632706
  CDS Start-End: 27-809

SEQ ID NO: 121962 - DNA, 1454 bp, Homo sapiens
  Payload ID: 3904
  Gene Symbol: CFH
  Gene Name: complement factor H
  ENST ID: ENST00000359637
  CDS Start-End: 63-1220
gaggagaactggacgttgtgaacagagttagctggtaaatgtcctcttaaaagatccaaaaaatgagacttctagcaaagattatttgccttatgttatgggctatttgtgtagcagaagattgcaatgaacttcctccaagaagaaatacagaaattctgacaggttcctggtctgaccaaacatatccagaaggcacccaggctatctataaatgccgccctggatatagatctcttggaaatgtaataatggtatgcaggaagggagaatgggttgctcttaatccattaaggaaatgtcagaaaaggccctgtggacatcctggagatactccttttggtacttttacccttacaggaggaaatgtgtttgaatatggtgtaaaagctgtgtatacatgtaatgaggggtatcaattgctaggtgagattaattaccgtgaatgtgacacagatggatggaccaatgatattcctatatgtgaagaaatttcatgcaaatccccagatgttataaatggatctcctatatctcagaagattatttataaggagaatgaacgatttcaatataaatgtaacatgggttatgaatacagtgaaagaggagatgctgtatgcactgaatctggatggcgtccgttgccttcatgtgaagaaaaatcatgtgataatccttatattccaaatggtgactactcacctttaaggattaaacacagaactggagatgaaatcacgtaccagtgtagaaatggtttttatcctgcaacccggggaaatacagcaaaatgcacaagtactggctggatacctgctccgagatgtaccttgaaaccttgtgattatccagacattaaacatggaggtctatatcatgagaatatgcgtagaccatactttccagtagctgtaggaaaatattactcctattactgtgatgaacattttgagactccgtcaggaagttactgggatcacattcattgcacacaagatggatggtcgccagcagtaccatgcctcagaaaatgttattttccttatttggaaaatggatataatcaaaatcatggaagaaagtttgtacagggtaaatctatagacgttgcctgccatcctggctacgctcttccaaaagcgcagaccacagttacatgtatggagaatggctggtctcctactcccagatgcatccgtgtcagctttaccctctgaacttctgatcgaaggtcatccctctccagcttgagtggatcaaagatgacaagggccaatggaaccaagtttgagtcttgccaggtcaatacttgggtcctgagtatggtgactagtatctgttttgttatgtgtgtattattccagccagaatgggaaatgctaattcagctcctccaggcagcccaatggggctggtggctttgagattattaaactctttctctgctgcaa

SEQ ID NO: 121963 - DNA, 4127 bp, Homo sapiens
  Payload ID: 3904
  Gene Symbol: CFH
  Gene Name: complement factor H
  Uniprot ID: P08603
  ENST ID: ENST00000367429
  CDS Start-End: 241-3936
acagcattaacatttagtgggagtgcagtgagaattgggtttaacttctggcatttctgggcttgtggcttgtggttgattttttatttactttgcaaaagtttctgataggcggagcatctagtttcaacttccttttgcagcaagttctttcctgcactaatcacaattcttggaagaggagaactggacgttgtgaacagagttagctggtaaatgtcctcttaaaagatccaaaaaatgagacttctagcaaagattatttgccttatgttatgggctatttgtgtagcagaagattgcaatgaacttcctccaagaagaaatacagaaattctgacaggttcctggtctgaccaaacatatccagaaggcacccaggctatctataaatgccgccctggatatagatctcttggaaatgtaataatggtatgcaggaagggagaatgggttgctcttaatccattaaggaaatgtcagaaaaggccctgtggacatcctggagatactccttttggtacttttacccttacaggaggaaatgtgtttgaatatggtgtaaaagctgtgtatacatgtaatgaggggtatcaattgctaggtgagattaattaccgtgaatgtgacacagatggatggaccaatgatattcctatatgtgaagttgtgaagtgtttaccagtgacagcaccagagaatggaaaaattgtcagtagtgcaatggaaccagatcgggaataccattttggacaagcagtacggtttgtatgtaactcaggctacaagattgaaggagatgaagaaatgcattgttcagacgatggtttttggagtaaagagaaaccaaagtgtgtggaaatttcatgcaaatccccagatgttataaatggatctcctatatctcagaagattatttataaggagaatgaacgatttcaatataaatgtaacatgggttatgaatacagtgaaagaggagatgctgtatgcactgaatctggatggcgtccgttgccttcatgtgaagaaaaatcatgtgataatccttatattccaaatggtgactactcacctttaaggattaaacacagaactggagatgaaatcacgtaccagtgtagaaatggtttttatcctgcaacccggggaaatacagcaaaatgcacaagtactggctggatacctgctccgagatgtaccttgaaaccttgtgattatccagacattaaacatggaggtctatatcatgagaatatgcgtagaccatactttccagtagctgtaggaaaatattactcctattactgtgatgaacattttgagactccgtcaggaagttactgggatcacattcattgcacacaagatggatggtcgccagcagtaccatgcctcagaaaatgttattttccttatttggaaaatggatataatcaaaatcatggaagaaagtttgtacagggtaaatctatagacgttgcctgccatcctggctacgctcttccaaaagcgcagaccacagttacatgtatggagaatggctggtctcctactcccagatgcatccgtgtcaaaacatgttccaaatcaagtatagatattgagaatgggtttatttctgaatctcagtatacatatgccttaaaagaaaaagcgaaatatcaatgcaaactaggatatgtaacagcagatggtgaaacatcaggatcaattacatgtgggaaagatggatggtcagctcaacccacgtgcattaaatcttgtgatatcccagtatttatgaatgccagaactaaaaatgacttcacatggtttaagctgaatgacacattggactatgaatgccatgatggttatgaaagcaatactggaagcaccactggttccatagtgtgtggttacaatggttggtctgatttacccatatgttatgaaagagaatgcgaacttcctaaaatagatgtacacttagttcctgatcgcaagaaagaccagtataaagttggagaggtgttgaaattctcctgcaaaccaggatttacaatagttggacctaattccgttcagtgctaccactttggattgtctcctgacctcccaatatgtaaagagcaagtacaatcatgtggtccacctcctgaactcctcaatgggaatgttaaggaaaaaacgaaagaagaatatggacacagtgaagtggtggaatattattgcaatcctagatttctaatgaagggacctaataaaattcaatgtgttgatggagagtggacaactttaccagtgtgtattgtggaggagagtacctgtggagatatacctgaacttgaacatggctgggcccagctttcttcccctccttattactatggagattcagtggaattcaattgctcagaatcatttacaatgattggacacagatcaattacgtgtattcatggagtatggacccaacttccccagtgtgtggcaatagataaacttaagaagtgcaaatcatcaaatttaattatacttgaggaacatttaaaaaacaagaaggaattcgatcataattctaacataaggtacagatgtagaggaaaagaaggatggatacacacagtctgcataaatggaagatgggatccagaagtgaactgctcaatggcacaaatacaattatgcccacctccacctcagattcccaattctcacaatatgacaaccacactgaattatcgggatggagaaaaagtatctgttctttgccaagaaaattatctaattcaggaaggagaagaaattacatgcaaagatggaagatggcagtcaataccactctgtgttgaaaaaattccatgttcacaaccacctcagatagaacacggaaccattaattcatccaggtcttcacaagaaagttatgcacatgggactaaattgagttatacttgtgagggtggtttcaggatatctgaagaaaatgaaacaacatgctacatgggaaaatggagttctccacctcagtgtgaaggccttccttgtaaatctccacctgagatttctcatggtgttgtagctcacatgtcagacagttatcagtatggagaagaagttacgtacaaatgttttgaaggttttggaattgatgggcctgcaattgcaaaatgcttaggagaaaaatggtctcaccctccatcatgcataaaaacagattgtctcagtttacctagctttgaaaatgccatacccatgggagagaagaaggatgtgtataaggcgggtgagcaagtgacttacacttgtgcaacatattacaaaatggatggagccagtaatgtaacatgcattaatagcagatggacaggaaggccaacatgcagagacacctcctgtgtgaatccgcccacagtacaaaatgcttatatagtgtcgagacagatgagtaaatatccatctggtgagagagtacgttatcaatgtaggagcccttatgaaatgtttggggatgaagaagtgatgtgtttaaatggaaactggacggaaccacctcaatgcaaagattctacaggaaaatgtgggccccctccacctattgacaatggggacattacttcattcccgttgtcagtatatgctccagcttcatcagttgagtaccaatgccagaacttgtatcaacttgagggtaacaagcgaataacatgtagaaatggacaatggtcagaaccaccaaaatgcttacatccgtgtgtaatatcccgagaaattatggaaaattataacatagcattaaggtggacagccaaacagaagctttattcgagaacaggtgaatcagttgaatttgtgtgtaaacggggatatcgtctttcatcacgttctcacacattgcgaacaacatgttgggatgggaaactggagtatccaacttgtgcaaaaagatagaatcaatcataaagtgcacacctttattcagaactttagtattaaatcagttctcaatttcattttttatgtattgttttactcctttttattcatacgtaaaattttggattaatttgtgaaaatgtaattataagctgagaccggtggctctcttcttaaaagcaccatattaaatcctggaaaactaa

SEQ ID NO: 121964 - DNA, 1658 bp, Homo sapiens
  Payload ID: 3904
  Gene Symbol: CFH
  Gene Name: complement factor H
  ENST ID: ENST00000630130
  CDS Start-End: 74-1423
aattcttggaagaggagaactggacgttgtgaacagagttagctggtaaatgtcctcttaaaagatccaaaaaatgagacttctagcaaagattatttgccttatgttatgggctatttgtgtagcagaagattgcaatgaacttcctccaagaagaaatacagaaattctgacaggttcctggtctgaccaaacatatccagaaggcacccaggctatctataaatgccgccctggatatagatctcttggaaatgtaataatggtatgcaggaagggagaatgggttgctcttaatccattaaggaaatgtcagaaaaggccctgtggacatcctggagatactccttttggtacttttacccttacaggaggaaatgtgtttgaatatggtgtaaaagctgtgtatacatgtaatgaggggtatcaattgctaggtgagattaattaccgtgaatgtgacacagatggatggaccaatgatattcctatatgtgaagttgtgaagtgtttaccagtgacagcaccagagaatggaaaaattgtcagtagtgcaatggaaccagatcgggaataccattttggacaagcagtacggtttgtatgtaactcaggctacaagattgaaggagatgaagaaatgcattgttcagacgatggtttttggagtaaagagaaaccaaagtgtgtggaaatttcatgcaaatccccagatgttataaatggatctcctatatctcagaagattatttataaggagaatgaacgatttcaatataaatgtaacatgggttatgaatacagtgaaagaggagatgctgtatgcactgaatctggatggcgtccgttgccttcatgtgaagaaaaatcatgtgataatccttatattccaaatggtgactactcacctttaaggattaaacacagaactggagatgaaatcacgtaccagtgtagaaatggtttttatcctgcaacccggggaaatacagcaaaatgcacaagtactggctggatacctgctccgagatgtaccttgaaaccttgtgattatccagacattaaacatggaggtctatatcatgagaatatgcgtagaccatactttccagtagctgtaggaaaatattactcctattactgtgatgaacattttgagactccgtcaggaagttactgggatcacattcattgcacacaagatggatggtcgccagcagtaccatgcctcagaaaatgttattttccttatttggaaaatggatataatcaaaatcatggaagaaagtttgtacagggtaaatctatagacgttgcctgccatcctggctacgctcttccaaaagcgcagaccacagttacatgtatggagaatggctggtctcctactcccagatgcatccgtgtcagctttaccctctgaacttctgatcgaaggtcatccctctccagcttgagtggatcaaagatgacaagggccaatggaaccaagtttgagtcttgccaggtcaatacttgggtcctgagtatggtgactagtatctgttttgttatgtgtgtattattccagccagaatgggaaatgctaattcagctcctccaggcagcccaatggggctggtggctttgagattattaaactctttctctgctgcaaa

SEQ ID NO: 121965 - DNA, 1271 bp, Homo sapiens
  Payload ID: 3905
  Gene Symbol: CFHR1
  Gene Name: complement factor H-related 1
  Uniprot ID: Q03591
  ENST ID: ENST00000320493
  CDS Start-End: 89-1081
atgctcataactgttaatgaaagcagattcaaagcaacaccaccaccactgaagtatttttagttatataagattggaactaccaagcatgtggctcctggtcagtgtaattctaatctcacggatatcctctgttgggggagaagcaacattttgtgattttccaaaaataaaccatggaattctatatgatgaagaaaaatataagccattttcccaggttcctacaggggaagttttctattactcctgtgaatataattttgtgtctccttcaaaatcattttggactcgcataacatgcacagaagaaggatggtcaccaacaccaaagtgtctcagactgtgtttctttccttttgtggaaaatggtcattctgaatcttcaggacaaacacatctggaaggtgatactgtgcaaattatttgcaacacaggatacagacttcaaaacaatgagaacaacatttcatgtgtagaacggggctggtccacccctcccaaatgcaggtccactgacacttcctgtgtgaatccgcccacagtacaaaatgctcatatactgtcgagacagatgagtaaatatccatctggtgagagagtacgttatgaatgtaggagcccttatgaaatgtttggggatgaagaagtgatgtgtttaaatggaaactggacagaaccacctcaatgcaaagattctacgggaaaatgtgggccccctccacctattgacaatggggacattacttcattcccgttgtcagtatatgctccagcttcatcagttgagtaccaatgccagaacttgtatcaacttgagggtaacaagcgaataacatgtagaaatggacaatggtcagaaccaccaaaatgcttacatccgtgtgtaatatcccgagaaattatggaaaattataacatagcattaaggtggacagccaaacagaagctttatttgagaacaggtgaatcagctgaatttgtgtgtaaacggggatatcgtctttcatcacgttctcacacattgcgaacaacatgttgggatgggaaactggagtatccaacttgtgcaaaaagatagaatcaatcataaaatgcacacctttattcagaactttagtattaaatcagttcttaatttcatttttaagtattgttttactcctttttattcatacgtaaaattttggattaatttgtgaaaatgtaattataagctgagaccggtggctctcttcttaaaagcaccatattaaaacttggaaaactaa

SEQ ID NO: 121966 - DNA, 1070 bp, Homo sapiens
  Payload ID: 3905
  Gene Symbol: CFHR1
  Gene Name: complement factor H-related 1
  ENST ID: ENST00000367424
  CDS Start-End: 65-880
agattcaaagcaacaccaccaccactgaagtatttttagttatataagattggaactaccaagcatgtggctcctggtcagtgtaattctaatctcacggatatcctctgttgggggagaagcaacattttgtgattttccaaaaataaaccatggaattctatatgatgaagaaaaatataagccattttcccaggttcctacaggggaagttttctattactcctgtgaatataattttgtgtctccttcaaaatcattttggactcgcataacatgcacagaagaaggatggtcaccaacaccaaagtgtctcagactgtgtttctttccttttgtggaaaatggtcattctgaatcttcaggacaaacacatctggaaggtgatactgtgcaaattatttgcaacacaggatacagacttcaaaacaatgagaacaacatttcatgtgtagaacggggctggtccacccctcccaaatgcaggtccactgattctacgggaaaatgtgggccccctccacctattgacaatggggacattacttcattcccgttgtcagtatatgctccagcttcatcagttgagtaccaatgccagaacttgtatcaacttgagggtaacaagcgaataacatgtagaaatggacaatggtcagaaccaccaaaatgcttacatccgtgtgtaatatcccgagaaattatggaaaattataacatagcattaaggtggacagccaaacagaagctttatttgagaacaggtgaatcagctgaatttgtgtgtaaacggggatatcgtctttcatcacgttctcacacattgcgaacaacatgttgggatgggaaactggagtatccaacttgtgcaaaaagatagaatcaatcataaaatgcacacctttattcagaactttagtattaaatcagttcttaatttcatttttaagtattgttttactcctttttattcatacgtaaaattttggattaatttgtgaaaatgtaattataagctgagaccggtggctctcttcttaaaagcaccatattaaaacttggaaaactaa

SEQ ID NO: 121967 - DNA, 1059 bp, Homo sapiens
  Payload ID: 3906
  Gene Symbol: CFHR2
  Gene Name: complement factor H-related 2
  Uniprot ID: P36980
  ENST ID: ENST00000367415
  CDS Start-End: 101-913
aaattcaaagtcatgctcataactgttaatgaaagcagattcaaagcaacaccaccaccactgaagtatttttagttatataagattggaactaccaagcatgtggctcctggtcagtgtaattctaatctcacggatatcctctgttgggggagaagcaatgttctgtgattttccaaaaataaaccatggaattctatatgatgaagaaaaatataagccattttcccaagttcctacaggggaagttttctattactcctgtgaatataattttgtgtctccttcaaaatccttttggactcgcataacgtgcgcagaagaaggatggtcaccaacaccaaagtgtctcagactgtgtttctttccttttgtggaaaatggtcattctgaatcttcaggacaaacacatctggaaggtgatactgtacaaattatttgcaacacaggatacagacttcaaaacaatgagaacaacatttcatgtgtagaacggggctggtccactcctcccaaatgcaggtccactatttctgcagaaaaatgtgggccccctccacctattgacaatggagacattacttcattcctgttgtcagtatatgctccaggttcatcagttgagtaccagtgccagaacttgtatcaacttgagggtaacaatcaaataacatgtagaaacggacaatggtcagaaccaccaaaatgcttagatccatgtgtaatatcacaagaaattatggaaaaatataacataaaattaaagtggacaaaccaacaaaagctttattcaagaacaggtgacatagttgaatttgtttgtaaatctggatatcatccaacaaaatctcattcatttcgagcaatgtgtcagaatgggaaactggtatatcccagttgtgaagaaaaatagaatcaatggcattactattagtaaaatgcacacctttttctgaatttactattatatttgttttcaatttcatttttcaagtactgttttactcatttttattcataaataaagttttgtgttgatttgtgaaaatgcaattacaa

SEQ ID NO: 121968 - DNA, 1020 bp, Homo sapiens
  Payload ID: 3906
  Gene Symbol: CFHR2
  Gene Name: complement factor H-related 2
  ENST ID: ENST00000476712
  CDS Start-End: 110-874
agtacactgaaattcaaagtcatgctcataactgttaatgaaagcagattcaaagcaacaccaccaccactgaagtatttttagttatataagattggaactaccaagcatgtggctcctggtcagtgtaattctaatctcacggatatcctctgttgggggagaagcaatgttctgtgattttccaaaaataaaccatggaattctatatgatgaagaaaaatataagccattttcccaagttcctacaggggaagttttctattactcctgtgaatataattttgtgtctccttcaaaatccttttggactcgcataacgtgcgcagaagaaggatggtcaccaacaccaaagtgtctcagacaaacacatctggaaggtgatactgtacaaattatttgcaacacaggatacagacttcaaaacaatgagaacaacatttcatgtgtagaacggggctggtccactcctcccaaatgcaggtccactatttctgcagaaaaatgtgggccccctccacctattgacaatggagacattacttcattcctgttgtcagtatatgctccaggttcatcagttgagtaccagtgccagaacttgtatcaacttgagggtaacaatcaaataacatgtagaaacggacaatggtcagaaccaccaaaatgcttagatccatgtgtaatatcacaagaaattatggaaaaatataacataaaattaaagtggacaaaccaacaaaagctttattcaagaacaggtgacatagttgaatttgtttgtaaatctggatatcatccaacaaaatctcattcatttcgagcaatgtgtcagaatgggaaactggtatatcccagttgtgaagaaaaatagaatcaatggcattactattagtaaaatgcacacctttttctgaatttactattatatttgttttcaatttcatttttcaagtactgttttactcatttttattcataaataaagttttgtgttgatttgtgaaaatgcaattacaa

SEQ ID NO: 121969 - DNA, 1645 bp, Homo sapiens
  Payload ID: 3907
  Gene Symbol: CFHR3
  Gene Name: complement factor H-related 3
  Uniprot ID: Q02985
  ENST ID: ENST00000367425
  CDS Start-End: 93-1085
gaaccacacttggtaactaataatgaaagatttcaaaccccaaacagtgcaactgaaacttttgtattagcatactactgagaatatctaacatgttgttactaatcaatgtcattctgaccttgtgggtttcctgtgctaatggacaagtgaaaccttgtgattttccagacattaaacatggaggtctatttcatgagaatatgcgtagaccatactttccagtagctgtaggaaaatattactcctattactgtgatgaacattttgagactccttcaggaagttactgggattacattcattgcacacaaaatgggtggtcaccagcagtaccatgtctcagaaaatgttattttccttatttggaaaatggatataatcaaaattatggaagaaagtttgtacagggtaactctacagaagttgcctgccatcctggctacggtcttccaaaagcgcagaccacagttacatgtacggagaaaggctggtctcctactcccagatgcatccgtgtcagaacatgctcaaaatcagatatagaaattgaaaatggattcatttccgaatcttcctctatttatattttaaataaagaaatacaatataaatgtaaaccaggatatgcaacagcagatggaaattcttcaggatcaattacatgtttgcaaaatggatggtcagcacaaccaatttgcattaattcttcagaaaagtgtgggcctcctccacctattagcaatggtgataccacctcctttctactaaaagtgtatgtgccacagtcaagagtcgagtaccaatgccagccctactatgaacttcagggttctaattatgtaacatgtagtaatggagagtggtcggaaccaccaagatgcatacatccatgtataataactgaagaaaacatgaataaaaataacataaagttaaaaggaagaagtgacagaaaatattatgcaaaaacaggggataccattgaatttatgtgtaaattgggatataatgcaaatacatcaattctatcatttcaagcagtgtgtcgggaagggatagtggaataccccagatgcgaataaggcagcattgttaccctaaatgtatgtccaacttccacttttccacttctcactcttatggtctcaaagcttgcaaagatagcttctgatattgttgtaatttctactttatttcaaagaaaattaatataatagtttcaatttgcaacttaatatattctcaaaaatatattaaaacaaactaaattattgcttatgcttgtactaaaataataaaaactactcttatattggacttcttatcaatgaattagtaagtatagagacagacagctgaatggctttctgcatattgtatagtatacctagacatagaaacaaaatgactttagattttatttggggaagtaataataccataaaattagatattaaaattgtaagtgaagataaacacactatagtattcccttattgtagccatggtcctctagatgcagttaaccaaatagggtcatttttattaaaagtagtgtttcctggcaaacactgacattacatcattatcatgatttaaaggaaatagtactagagaaggtgaattattatcattttcctgt

SEQ ID NO: 121970 - DNA, 1242 bp, Homo sapiens
  Payload ID: 3907
  Gene Symbol: CFHR3
  Gene Name: complement factor H-related 3
  ENST ID: ENST00000367427
  CDS Start-End: 75-773
aataatgaaagatttcaaaccccaaacagtgcaactgaaacttttgtattagcatactactgagaatatctaacatgttgttactaatcaatgtcattctgaccttgtgggtttcctgtgctaatggacaagtgaaaccttgtgattttccagacattaaacatggaggtctatttcatgagaatatgcgtagaccatactttccagtagctgtaggaaaatattactcctattactgtgatgaacattttgagactccttcaggaagttactgggattacattcattgcacacaaaatgggtggtcaccagcagtaccatgtctcagaaaatgttattttccttatttggaaaatggatataatcaaaattatggaagaaagtttgtacagggtaactctacagaagttgcctgccatcctggctacggtcttccaaaagcgcagaccacagttacatgtacggagaaaggctggtctcctactcccagatgcatccgtgtcagaacatgctcaaaatcagatatagaaattgaaaatggattcatttccgaatcttcctctatttatattttaaataaagaaatacaatataaatgtaaaccaggatatgcaacagcagatggaaattcttcaggatcaattacatgtttgcaaaatggatggtcagcacaaccaatttgcattactgcttgtattgcattccgtgctcacgctcagaaaagttgtacatgtcgggggagaaatgagtgcttaattctgaatttctgctagcgtcaggagaatcagaccttaataatttgtatcaatgatgctactgaggatatccaatcaaaaaattatctctaccctattgtttactacagagaaaacaagtaaaggaaaaggattcttcagaaaagtgtgggcctcctccacctattagcaatggtgataccacctcctttctactaaaagtgtatgtgccacagtcaagagtcgagtaccaatgccagccctactatgaacttcagggttctaattatgtaacatgtagtaatggagagtggtcggaaccaccaagatgcatacatccatgtataataactgaagaaaacatgaataaaaataacataaagttaaaaggaagaagtgacagaaaatattatgcaaaaacaggggataccattgaatttatgtgtaaattgggatataatgcaaatacatcaattctatcatttcaagcagtgtgtcgggaagggat

SEQ ID NO: 121971 - DNA, 1043 bp, Homo sapiens
  Payload ID: 3907
  Gene Symbol: CFHR3
  Gene Name: complement factor H-related 3
  Uniprot ID: Q02985
  ENST ID: ENST00000391985
  CDS Start-End: 72-881
aatgaaagatttcaaaccccaaacagtgcaactgaaacttttgtattagcatactactgagaatatctaacatgttgttactaatcaatgtcattctgaccttgtgggtttcctgtgctaatggacaagtgaaaccttgtgattttccagacattaaacatggaggtctatttcatgagaatatgcgtagaccatactttccagtagctgtaggaaaatattactcctattactgtgatgaacattttgagactccttcaggaagttactgggattacattcattgcacacaaaatgggtggtcaccagcagtaccatgtctcagaaaatgttattttccttatttggaaaatggatataatcaaaattatggaagaaagtttgtacagggtaactctacagaagttgcctgccatcctggctacggtcttccaaaagcgcagaccacagttacatgtacggagaaaggctggtctcctactcccagatgcatccgtgtcaattcttcagaaaagtgtgggcctcctccacctattagcaatggtgataccacctcctttctactaaaagtgtatgtgccacagtcaagagtcgagtaccaatgccagccctactatgaacttcagggttctaattatgtaacatgtagtaatggagagtggtcggaaccaccaagatgcatacatccatgtataataactgaagaaaacatgaataaaaataacataaagttaaaaggaagaagtgacagaaaatattatgcaaaaacaggggataccattgaatttatgtgtaaattgggatataatgcaaatacatcaattctatcatttcaagcagtgtgtcgggaagggatagtggaataccccagatgcgaataaggcagcattgttaccctaaatgtatgtccaacttccacttttccacttctcactcttatggtctcaaagcttgcaaagatagcttctgatattgttgtaatttctactttatttcaaagaaaattaatataatagtttcaatttgcaacttaatatattctc

SEQ ID NO: 121972 - DNA, 1965 bp, Homo sapiens
  Payload ID: 3907
  Gene Symbol: CFHR3
  Gene Name: complement factor H-related 3
  ENST ID: ENST00000471440
  CDS Start-End: 75-773
aataatgaaagatttcaaaccccaaacagtgcaactgaaacttttgtattagcatactactgagaatatctaacatgttgttactaatcaatgtcattctgaccttgtgggtttcctgtgctaatggacaagtgaaaccttgtgattttccagacattaaacatggaggtctatttcatgagaatatgcgtagaccatactttccagtagctgtaggaaaatattactcctattactgtgatgaacattttgagactccttcaggaagttactgggattacattcattgcacacaaaatgggtggtcaccagcagtaccatgtctcagaaaatgttattttccttatttggaaaatggatataatcaaaattatggaagaaagtttgtacagggtaactctacagaagttgcctgccatcctggctacggtcttccaaaagcgcagaccacagttacatgtacggagaaaggctggtctcctactcccagatgcatccgtgtcagaacatgctcaaaatcagatatagaaattgaaaatggattcatttccgaatcttcctctatttatattttaaataaagaaatacaatataaatgtaaaccaggatatgcaacagcagatggaaattcttcaggatcaattacatgtttgcaaaatggatggtcagcacaaccaatttgcattactgcttgtattgcattccgtgctcacgctcagaaaagttgtacatgtcgggggagaaatgagtgcttaattctgaatttctgctagcgtcaggagaatcagaccttaataatttgtatcaatgatgctactgaggatatccaatcaaaaaattatctctaccctattgtttactacagagaaaacaagtaaaggaaaagggtaagtgggtgggctgaatgtttacaaacctcatacttgccaatggattctttacatgtaaagttctctgaacgtgctcgacctttacttagtatgataaagagaatgcataatgaacaaaggaaatctttcagtggcaaaagttgattttttttctttcctctttatatattcacaaagagttttaaagataaattgctgaatgtatttttaacccaaatactgttgtataatttacatactcccaaatccacttcattttcaagggtacaattcaactatttttagtcatgagataatatggaaccttgatacataatacaacatggaagactctcaaaaatattaagctaagagagaaaaaagatacacttacaaagtgattatctcaatgttatcatgagttttgggggttatatgaattcctacatttctagaatactgttttcaatttctatacttatcaagggctctgtgtaaagaaaaaggtgtatacttcaattttactcagctttgataaatgatctactttaaaacttgtgaaataaaagacaggatgcttcataaattttatagaacttatatccaattaatataatttttatctaatatatacacccttactgttagtaaatcgttacataactacataaatggttacattaacttttaaattcacaaatttaaaagcggtttaagctccgtgacacattggactacgaatgctacgatggatatgaaatcagttatggaaacaccacaggttccatagtgtgtggtgaagatgggtagtcccatttcccaacatgttatagtaagtattttattcaagtattttttattagaattaaataaaataataaatagacacctacatatgtatatgtacacatatgtgtgtacatatatgtacatatatatgtagtcctcctatgagtgtgaattatcttgagacttaaaaagaaaaaacaacgttgaaaatgcagatgtcttcctaagaaatcaaataagatacagttaagagtatataaaaagctttatttagaaagtttccaataagactattgatttttcccca

SEQ ID NO: 121973 - DNA, 1462 bp, Homo sapiens
  Payload ID: 3907
  Gene Symbol: CFHR3
  Gene Name: complement factor H-related 3
  ENST ID: ENST00000617219
  CDS Start-End: 72-659
aatgaaagatttcaaaccccaaacagtgcaactgaaacttttgtattagcatactactgagaatatctaacatgttgttactaatcaatgtcattctgaccttgtgggtttcctgtgctaatggacaagtgaaaccttgtgattttccagacattaaacatggaggtctatttcatgagaatatgcgtagaccatactttccagtagctgtaggaaaatattactcctattactgtgatgaacattttgagactccttcaggaagttactgggattacattcattgcacacaaaatgggtggtcaccagcagtaccatgtctcagaaaatgttattttccttatttggaaaatggatataatcaaaattatggaagaaagtttgtacagggtaactctacagaagttgcctgccatcctggctacggtcttccaaaagcgcagaccacagttacatgtacggagaaaggctggtctcctactcccagatgcatccgtgtcagaacatgctcaaaatcagatatagaaattgaaaatggattcatttccgaatcttcctctatttatattttaaataaagaaatacaatataaatgtaaaccaggatatgcaacagcagatggaaattcttcagatatggttttttgcatttcttattaagttttgcttcagatttttttttgtcttttctcctgttaattgccttcactctctttctgttctgtacttttctttgtatataaggattttttgaaaagattgtatatccctgttaacaaattgaaatctctattcactttaatagatttttacccccagttagcatatggttagtgagaagttgcagggtaagaagaaaacaatgttccctttcccaacacttttcctgattatagagaaaaaagcatgaacttgtataatgatctagtcctgtacagaatgagaaatattaattgctagactgagaatgttttggtggctaaagctaggaataactttttaagactgaagaatgatataagctatcaaatctaactcagttttcaaataacaggtttgcagagactggagaataaaaagtaaaaaattgttttattaattccagtgactaattctacttcatcaacatacatcataaataaaatttcaaaaataattgctgatatggtttggctgtgtcccacccaattttcaccttgaattatataatcaccatgcatcaaaggtagggccaggtggagataatggaatcatgggagcagtttccccataccccactcatggtagtaaatacatctcatgagatctaatggttttataaatgaaagttcccctggacaagttctcttgcctgccaccatgtaagatgtacctttgctactcattcaccttctgtcatgatggtgaggccttcccagcaatgtggaactgtgagtccattaaacctctttcctttataaatt

SEQ ID NO: 121974 - DNA, 1292 bp, Homo sapiens
  Payload ID: 3908
  Gene Symbol: CFHR4
  Gene Name: complement factor H-related 4
  Uniprot ID: Q92496
  ENST ID: ENST00000251424
  CDS Start-End: 70-1065
tgaaagatttcaaaccccaaacagtgcaactgaaacttttgcattactatactactgagaatatctaacatgttgttactaatcaatgtcattctgaccttgtgggtttcctgtgctaatggacaagaagtgaaaccttgtgattttccagaaattcaacatggaggtctatattataagagtttgcgtagactatactttccagcagctgcaggacaatcttattcctattactgtgatcaaaattttgtgactccttcaggaagttactgggattacattcattgcacacaagatggttggtcaccaacggtcccatgcctcagaacatgctcaaaatcagatatagaaattgaaaatggattcatttctgaatcttcctctatttatattttaaataaagaaatacaatataaatgtaaaccaggatatgcaacagcagatggaaattcttcaggttcaattacatgtttgcaaaatggatggtcagcacaaccaatttgcattaaattttgtgatatgcctgtttttgagaattccagagccaagagtaatggcatgcggtttaagctccatgacacattggactacgaatgctacgatggatatgaaatcagttatggaaacaccacaggttccatagtgtgtggtgaagatgggtggtcccatttcccaacatgttataattcttcagaaaagtgtgggcctcctccacctattagcaatggtgataccacctcctttctactaaaagtgtatgtgccacagtcaagagtcgagtaccaatgccagtcctactatgaacttcagggttctaattatgtaacatgtagtaatggagagtggtcggaaccaccaagatgcatacatccatgtataataactgaagaaaacatgaataaaaataacatacagttaaaaggaaaaagtgacataaaatattatgcaaaaacaggggataccattgaatttatgtgtaaattgggatataatgcgaatacatcagttctatcatttcaagcagtgtgtagggaaggcatagtggaataccccagatgcgaataaggcagcattgttaccctaaatgtatgtccaacttccacttctcactcttatggtctcaaagcttgcaaagatagcttctgatattgttgtaatttctactttatttcaaagaaaattaatataatagtttcaatttgcaacttaatatgttctcaaaaatatgttaaaacaaactaaattattgcttatgcttgtactaaaataataaaaactacccttatattgga

SEQ ID NO: 121975 - DNA, 2178 bp, Homo sapiens
  Payload ID: 3908
  Gene Symbol: CFHR4
  Gene Name: complement factor H-related 4
  Uniprot ID: Q92496
  ENST ID: ENST00000367416
  CDS Start-End: 138-1871
aagtgaccttaaagccctagctttgtggtagtgcacttaaattcagaatcacacttggtaactaataatgaaagatttcaaaccccaaacagtgcaactgaaacttttgcattactatactactgagaatatctaacatgttgttactaatcaatgtcattctgaccttgtgggtttcctgtgctaatggacaagtgaaaccttgtgattttccagaaattcaacatggaggtctatattataagagtttgcgtagactatactttccagcagctgcaggacaatcttattcctattactgtgatcaaaattttgtgactccttcaggaagttactgggattacattcattgcacacaagatggttggtcaccaacggtcccatgcctcagaacatgctcaaaatcagatgtagaaattgaaaatggattcatttctgaatcttcctctatttatattttaaatgaagaaacacaatataattgtaaaccaggatatgcaacagcagagggaaattcttcaggatcaattacatgtttgcaaaatggatggtcaacacaaccaatttgcattaaattttgtgatatgcctgtttttgagaattccagagccaagagtaatggcatgtggtttaagctccatgacacattggactatgaatgctatgatggatatgaaagcagttatggaaacaccacagattccatagtgtgtggtgaagatggctggtcccatttgccaacatgctataattcttcagaaaactgtgggcctcctccacctattagcaatggagataccacgtccttcccgcaaaaagtgtatctgccatggtcaagagtcgagtaccagtgccagtcctactatgaacttcagggttctaaatatgtaacatgtagtaatggagactggtcagaaccaccaagatgcatatcaatgaaaccttgtgagtttccagaaattcaacatggacatctatattatgagaatacgcgtagaccatactttccagtagctacaggacaatcttactcctattactgtgaccaaaattttgtgactccttcaggaagttactgggattacattcactgcacacaagatgggtggttgccaacagtcccatgcctcagaacatgctcaaaatcagatatagaaattgaaaatggattcatttctgaatcttcctctatttatattttaaataaagaaatacaatataaatgtaaaccaggatatgcaacagcagatggaaattcttcaggttcaattacatgtttgcaaaatggatggtcagcacaaccaatttgcattaaattttgtgatatgcctgtttttgagaattccagagccaagagtaatggcatgcggtttaagctccatgacacattggactacgaatgctacgatggatatgaaatcagttatggaaacaccacaggttccatagtgtgtggtgaagatgggtggtcccatttcccaacatgttataattcttcagaaaagtgtgggcctcctccacctattagcaatggtgataccacctcctttctactaaaagtgtatgtgccacagtcaagagtcgagtaccaatgccagtcctactatgaacttcagggttctaattatgtaacatgtagtaatggagagtggtcggaaccaccaagatgcatacatccatgtataataactgaagaaaacatgaataaaaataacatacagttaaaaggaaaaagtgacataaaatattatgcaaaaacaggggataccattgaatttatgtgtaaattgggatataatgcgaatacatcagttctatcatttcaagcagtgtgtagggaaggcatagtggaataccccagatgcgaataaggcagcattgttaccctaaatgtatgtccaacttccacttctcactcttatggtctcaaagcttgcaaagatagcttctgatattgttgtaatttctactttatttcaaagaaaattaatataatagtttcaatttgcaacttaatatgttctcaaaaatatgttaaaacaaactaaattattgcttatgcttgtactaaaataataaaaactacccttatattggacttcctatcaatgaattagtaagtatagaaacagataactgaatggctttctgcatattgtacagtatacctagacatag

SEQ ID NO: 121976 - DNA, 1066 bp, Homo sapiens
  Payload ID: 3908
  Gene Symbol: CFHR4
  Gene Name: complement factor H-related 4
  ENST ID: ENST00000367418
  CDS Start-End: 49-1044
cagtgcaactgaaacttttgcattactatactactgagaatatctaacatgttgttactaatcaatgtcattctgaccttgtgggtttcctgtgctaatggacaagaagtgaaaccttgtgattttccagaaattcaacatggaggtctatattataagagtttgcgtagactatactttccagcagctgcaggacaatcttactcctattactgtgaccaaaattttgtgactccttcaggaagttactgggattacattcactgcacacaagatgggtggttgccaacagtcccatgcctcagaacatgctcaaaatcagatatagaaattgaaaatggattcatttctgaatcttcctctatttatattttaaataaagaaatacaatataaatgtaaaccaggatatgcaacagcagatggaaattcttcaggttcaattacatgtttgcaaaatggatggtcagcacaaccaatttgcattaaattttgtgatatgcctgtttttgagaattccagagccaagagtaatggcatgcggtttaagctccatgacacattggactacgaatgctacgatggatatgaaatcagttatggaaacaccacaggttccatagtgtgtggtgaagatgggtggtcccatttcccaacatgttataattcttcagaaaagtgtgggcctcctccacctattagcaatggtgataccacctcctttctactaaaagtgtatgtgccacagtcaagagtcgagtaccaatgccagtcctactatgaacttcagggttctaattatgtaacatgtagtaatggagagtggtcggaaccaccaagatgcatacatccatgtataataactgaagaaaacatgaataaaaataacatacagttaaaaggaaaaagtgacataaaatattatgcaaaaacaggggataccattgaatttatgtgtaaattgggatataatgcgaatacatcagttctatcatttcaagcagtgtgtagggaaggcatagtggaataccccagatgcgaataaggcagcattgttaccctaaatg

SEQ ID NO: 121977 - DNA, 1601 bp, Homo sapiens
  Payload ID: 3908
  Gene Symbol: CFHR4
  Gene Name: complement factor H-related 4
  ENST ID: ENST00000608469
  CDS Start-End: 430-1035
aactgaaacttttgcattactatactactgagaatatctaacatgttgttactaattaatgtcattctcaccttgtgggtttcctatgctaatggacaagtgaaatcttgtgattttccagacattaaacatggaggtctatattatgaaagtatgtgtagaccatactttccagtagctgtaggaaaatcttactcctattactgtgatgaatcttttgagactccttcaggaagttactaggattacatttattgcacacaagatgggtggtcgccagcagtaccatgtctcagaaaacgttattttccttatttggaaaatggacataatgaaaattacggaagaaagtttgtacagggtaactctgtagaagttgccttccttcctggctgtggtcttccaaatgagcagaccacagttacatgtatggagaatggctggtctcctccttgcagatgcatccgtgtcagaacatgctcaaaatcagatatagaaattgaaaatggattcatttctgaatcttcctctatttatattttaaataaagaaatacaatataaatgtaaaccaggatatgcaacagcagatggaaattcttcaggttcaattacatgtttgcaaaatggatggtcagcacaaccaatttgcattaattcttcagaaaagtgtgggcctcctccacctattagcaatggtgataccacctcctttctactaaaagtgtatgtgccacagtcaagagtcgagtaccaatgccagtcctactatgaacttcagggttctaattatgtaacatgtagtaatggagagtggtcggaaccaccaagatgcatacatccatgtataataactgaagaaaacatgaataaaaataacatacagttaaaaggaaaaagtgacataaaatattatgcaaaaacaggggataccattgaatttatgtgtaaattgggatataatgcgaatacatcagttctatcatttcaagcagtgtgtagggaaggcatagtggaataccccagatgcgaataaggcagcattgttaccctaaatgtatgtccaacttccacttctcactcttatggtctcaaagcttgcaaagatagcttctgatattgttgtaatttctactttatttcaaagaaaattaatataatagtttcaatttgcaacttaatatgttctcaaaaatatgttaaaacaaactaaattattgcttatgcttgtactaaaataataaaaactacccttatattggacttcctatcaatgaattagtaagtatagaaacagataactgaatggctttctgcatattgtacagtatacctagacatagaaacaaaatgactttagactttatttggggaagtaataataacataaaattagatgttaaaattgtaagtgaaaataaacacactatagtattcccttattgcagccatggtcctctagatgcagttaaccaaatagggtcatttttattaaaagtagtgtttcctgccaaacactgacattacatcattatcatgatttaaaggaaaaagtactaaagaaggtgaattatcatcattttcctgtgaaaaaagaaaaga

SEQ ID NO: 121978 - DNA, 2810 bp, Homo sapiens
  Payload ID: 3909
  Gene Symbol: CFHR5
  Gene Name: complement factor H-related 5
  Uniprot ID: Q9BXR6
  ENST ID: ENST00000256785
  CDS Start-End: 110-1819
agtacattgaaattcaaagtcatgcttgtaactgttaatgaaagcagatttaaagcaacaccaccatcactggagtatttttagttatatacgattgagactaccaagcatgttgctcttattcagtgtaatcctaatctcatgggtatccactgttgggggagaaggaacactttgtgattttccaaaaatacaccatggatttctgtatgatgaagaagattataaccctttttcccaagttcctacaggggaagttttctattactcctgtgaatataattttgtgtctccttcaaaatccttttggactcgcataacatgcacagaagaaggatggtcaccaacaccgaagtgtctcagaatgtgttcctttccttttgtgaaaaatggtcattctgaatcttcaggactaatacatctggaaggtgatactgtacaaattatttgcaacacaggatacagccttcaaaacaatgagaaaaacatttcgtgtgtagaacggggctggtccactcctcccatatgcagcttcactaaaggagaatgtcatgttccaattttagaagccaatgtagatgctcagccaaaaaaagaaagctacaaagttggagacgtgttgaaattctcctgcagaaaaaatcttataagagttggatcagactcagttcaatgttaccaatttgggtggtcacctaactttccaacatgcaaaggacaagtacgatcatgtggtccacctcctcaactctccaatggtgaagttaaggagataagaaaagaggaatatggacacaatgaagtagtggaatatgattgcaatcctaattttataataaacgggcctaagaaaatacaatgtgtggatggagaatggacaactttacccacttgtgttgaacaagtgaaaacatgtggatacatacctgaactcgagtacggttatgttcagccgtctgtccctccctatcaacatggagtttcagtcgaggtgaattgcagaaatgaatatgcaatgattggaaataacatgattacctgtattaatggaatatggacagagcttcctatgtgtgttgcaacacaccaacttaagaggtgcaaaatagcaggagttaatataaaaacattactcaagctatctgggaaagaatttaatcataattctagaatacgttacagatgttcagacatcttcagatacaggcactcagtctgtataaacgggaaatggaatcctgaagtagactgcacagaaaaaagggaacaattctgcccaccgccacctcagatacctaatgctcagaatatgacaaccacagtgaattatcaggatggagaaaaagtagctgttctctgtaaagaaaactatctacttccagaagcaaaagaaattgtatgtaaagatggacgatggcaatcattaccacgctgtgttgagtctactgcatattgtgggccccctccatctattaacaatggagataccacctcattcccattatcagtatatcctccagggtcaacagtgacgtaccgttgccagtccttctataaactccagggctctgtaactgtaacatgcagaaataaacagtggtcagaaccaccaagatgcctagatccatgtgtggtatctgaagaaaacatgaacaaaaataacatacagttaaaatggagaaacgatggaaaactctatgcaaaaacaggggatgctgttgaattccagtgtaaattcccacataaagcgatgatatcatcaccaccatttcgagcaatctgtcaggaagggaaatttgaatatcctatatgtgaatgaagcaagcataattttcctgaatatattcttcaaacatccatctatgctaaaagtagccattatgtagccaattctgtagttacttcttttattctttcaggtgttgtttaactcagttttatttagaactctggatttttagagctttagaaatttgtaagctgagagaacaatgtttcacttaataggagggtgtcttagtccatattacattgttataacagagtatcacagactggataacttctaaccaatagtttatttgtttcataaatctaaaagctgagaagtccaagatggtggggctgcctctggtgagggtcttctcgaagcatcataatatgctggaaggcatcacaacatggtggaagggatcacgtggcaaaagagcatgtacatgggagtgagagaaaaagagagagagagacagagtggcgggggcggggaggagcgcaaactcatcctttataaagacaccactcctgagataacaatccaatcccatgataatgacattaatccattcaagaagatagagctctcgtgacttaatcaccttctaaagatctcacctgacaacactgttgcattggcagttaagtttccacgtaaactttcggggacacattcaaaccacaggagaaactcaaattgttcctgggcaaatcacaacatggggaattttattcataaatgtccacagaaacagtaaatgttctcgcttcagtacttaattcatctaatccctcctgtttgtctcaaattataggataactttgaaactttctgaattaacgttatttaaaaggaaatgtagatgttattttagtctctatcttcatgttattatcacttaaaaacctgcgaaagctgtcaacttttgtggttgtagcaagtattaataaatatttataaatcctctaatgtaagtctagctacctatccaatactaaataccccttaaagtattaaatgcactatctgctgtaaa

SEQ ID NO: 121979 - DNA, 1043 bp, Homo sapiens
  Payload ID: 3910
  Gene Symbol:
  Gene Name: Complement factor H-related protein 2 [Source:UniProtKB/Swiss-Prot
  Acc:P36980]
  Uniprot ID: P36980
  ENST ID: ENST00000367421
  CDS Start-End: 101-913
aaattcaaagtcatgctcataactgttaatgaaagcagattcaaagcaacaccaccaccactgaagtatttttagttatataagattggaactaccaagcatgtggctcctggtcagtgtaattctaatctcacggatatcctctgttgggggagaagcaatgttctgtgattttccaaaaataaaccatggaattctatatgatgaagaaaaatataagccattttcccaagttcctacaggggaagttttctattactcctgtgaatataattttgtgtctccttcaaaatccttttggactcgcataacgtgcgcagaagaaggatggtcaccaacaccaaagtgtctcagactgtgtttctttccttttgtggaaaatggtcattctgaatcttcaggacaaacacatctggaaggtgatactgtacaaattatttgcaacacaggatacagacttcaaaacaatgagaacaacatttcatgtgtagaacggggctggtccactcctcccaaatgcaggtccactatttctgcagaaaaatgtgggccccctccacctattgacaatggagacattacttcattcctgttgtcagtatatgctccaggttcatcagttgagtaccagtgccagaacttgtatcaacttgagggtaacaatcaaataacatgtagaaacggacaatggtcagaaccaccaaaatgcttagatccatgtgtaatatcacaagaaattatggaaaaatataacataaaattaaagtggacaaaccaacaaaagctttattcaagaacaggtgacatagttgaatttgtttgtaaatctggatatcatccaacaaaatctcattcatttcgagcaatgtgtcagaatgggaaactggtatatcccagttgtgaagaaaaatagaatcaatggcattactattagtaaaatgcacacctttttctgaatttactattatatttgttttcaatttcatttttcaagtactgttttactcatttttattcataaataaagttttgtgttgatttgt

SEQ ID NO: 121980 - DNA, 2159 bp, Homo sapiens
  Payload ID: 3911
  Gene Symbol: CFI
  Gene Name: complement factor I
  Uniprot ID: P05156
  ENST ID: ENST00000394634
  CDS Start-End: 209-1960
tctttaatgggaaggccattttttggtttcagttacggtaaatctctctggatttcagccaaattctttcagagttcaaaagtacaaagctctttaggaggtttgttcttttgaaacattttttcagaggttaaaaattaaatttcaaaagaatacctggagtggaaaagagttctcagcagagacaaagaccccgaacacctccaacatgaagcttcttcatgttttcctgttatttctgtgcttccacttaaggttttgcaaggtcacttatacatctcaagaggatctggtggagaaaaagtgcttagcaaaaaaatatactcacctctcctgcgataaagtcttctgccagccatggcagagatgcattgagggcacctgtgtttgtaaactaccgtatcagtgcccaaagaatggcactgcagtgtgtgcaactaacaggagaagcttcccaacatactgtcaacaaaagagtttggaatgtcttcatccagggacaaagtttttaaataacggaacatgcacagccgaaggaaagtttagtgtttccttgaagcatggaaatacagattcagagggaatagttgaagtaaaacttgtggaccaagataagacaatgttcatatgcaaaagcagctggagcatgagggaagccaacgtggcctgccttgaccttgggtttcaacaaggtgctgatactcaaagaaggtttaagttgtctgatctctctataaattccactgaatgtctacatgtgcattgccgaggattagagaccagtttggctgaatgtacttttactaagagaagaactatgggttaccaggatttcgctgatgtggtttgttatacacagaaagcagattctccaatggatgacttctttcagtgtgtgaatgggaaatacatttctcagatgaaagcctgtgatggtatcaatgattgtggagaccaaagtgatgaactgtgttgtaaagcatgccaaggcaaaggcttccattgcaaatcgggtgtttgcattccaagccagtatcaatgcaatggtgaggtggactgcattacaggggaagatgaagttggctgtgcaggctttgcatctgtgactcaagaagaaacagaaattttgactgctgacatggatgcagaaagaagacggataaaatcattattacctaaactatcttgtggagttaaaaacagaatgcacattcgaaggaaacgaattgtgggaggaaagcgagcacaactgggagacctcccatggcaggtggcaattaaggatgccagtggaatcacctgtgggggaatttatattggtggctgttggattctgactgctgcacattgtctcagagccagtaaaactcatcgttaccaaatatggacaacagtagtagactggatacaccccgaccttaaacgtatagtaattgaatacgtggatagaattattttccatgaaaactacaatgcaggcacttaccaaaatgacatcgctttgattgaaatgaaaaaagacggaaacaaaaaagattgtgagctgcctcgttccatccctgcctgtgtcccctggtctccttacctattccaacctaatgatacatgcatcgtttctggctggggacgagaaaaagataacgaaagagtcttttcacttcagtggggtgaagttaaactaataagcaactgctctaagttttacggaaatcgtttctatgaaaaagaaatggaatgtgcaggtacatatgatggttccatcgatgcctgtaaaggggactctggaggccccttagtctgtatggatgccaacaatgtgacttatgtctggggtgttgtgagttggggggaaaactgtggaaaaccagagttcccaggtgtttacaccaaagtggccaattattttgactggattagctaccatgtaggaaggccttttatttctcagtacaatgtataaaattgtgatctctctcttcattctattctttttctctcaagagttccatttaatggaaataaaacggtataattaataattctctaggggggaaaaatgaagcaaatctcactggatatttttaaaggtctccacagagtttatgccatattggaattttgttgtataattctcaaataaatattttggtgaagcatac

SEQ ID NO: 121981 - DNA, 2053 bp, Homo sapiens
  Payload ID: 3911
  Gene Symbol: CFI
  Gene Name: complement factor I
  ENST ID: ENST00000394635
  CDS Start-End: 81-1856
ggttaaaaattaaatttcaaaagaatacctggagtggaaaagagttctcagcagagacaaagaccccgaacacctccaacatgaagcttcttcatgttttcctgttatttctgtgcttccacttaaggttttgcaaggtcacttatacatctcaagaggatctggtggagaaaaagtgcttagcaaaaaaatatactcacctctcctgcgataaagtcttctgccagccatggcagagatgcattgagggcacctgtgtttgtaaactaccgtatcagtgcccaaagaatggcactgcagtgtgtgcaactaacaggagaagcttcccaacatactgtcaacaaaagagtttggaatgtcttcatccagggacaaagtttttaaataacggaacatgcacagccgaaggaaagtttagtgtttccttgaagcatggaaatacagattcagagggaatagttgaagtaaaacttgtggaccaagataagacaatgttcatatgcaaaagcagctggagcatgagggaagccaacgtggcctgccttgaccttgggtttcaacaaggtgctgatactcaaagaaggtttaagttgtctgatctctctataaattccactgaatgtctacatgtgcattgccgaggattagagaccagtttggctgaatgtacttttactaagagaagaactatgggttaccaggatttcgctgatgtggtttgttatacacagaaagcagattctccaatggatgacttctttcagtgtgtgaatgggaaatacatttctcagatgaaagcctgtgatggtatcaatgattgtggagaccaaagtgatgaactgtgttgtaaagcatgccaaggcaaaggcttccattgcaaatcgggtgtttgcattccaagccagtatcaatgcaatggtgaggtggactgcattacaggggaagatgaagttggctgtgcagcagctagacatcctacaattcaaggctttgcatctgtgactcaagaagaaacagaaattttgactgctgacatggatgcagaaagaagacggataaaatcattattacctaaactatcttgtggagttaaaaacagaatgcacattcgaaggaaacgaattgtgggaggaaagcgagcacaactgggagacctcccatggcaggtggcaattaaggatgccagtggaatcacctgtgggggaatttatattggtggctgttggattctgactgctgcacattgtctcagagccagtaaaactcatcgttaccaaatatggacaacagtagtagactggatacaccccgaccttaaacgtatagtaattgaatacgtggatagaattattttccatgaaaactacaatgcaggcacttaccaaaatgacatcgctttgattgaaatgaaaaaagacggaaacaaaaaagattgtgagctgcctcgttccatccctgcctgtgtcccctggtctccttacctattccaacctaatgatacatgcatcgtttctggctggggacgagaaaaagataacgaaagagtcttttcacttcagtggggtgaagttaaactaataagcaactgctctaagttttacggaaatcgtttctatgaaaaagaaatggaatgtgcaggtacatatgatggttccatcgatgcctgtaaaggggactctggaggccccttagtctgtatggatgccaacaatgtgacttatgtctggggtgttgtgagttggggggaaaactgtggaaaaccagagttcccaggtgtttacaccaaagtggccaattattttgactggattagctaccatgtaggaaggccttttatttctcagtacaatgtataaaattgtgatctctctcttcattctattctttttctctcaagagttccatttaatggaaataaaacggtataattaataattctctaggggggaaaaatgaagcaaatctcactggatatttttaaaggtctccacagagtttatgccatattggaattttgttgtataattctcaaataaatattttggtgaagcat

SEQ ID NO: 121982 - DNA, 667 bp, Homo sapiens
  Payload ID: 3911
  Gene Symbol: CFI
  Gene Name: complement factor I
  ENST ID: ENST00000510800
  CDS Start-End: 8-493
ctccaacatgaagcttcttcatgttttcctgttatttctgtgcttccacttaaggttttgcaaggtcacttatacatctcaagaggatctggtggagaaaaagtgcttagcaaaaaaatatactcacctctcctgcgataaagtcttctgccagccatggcagagatgcattgagggcacctgtgtttgtaaactaccgtatcagtgcccaaagaatggcactgcagtgtgtgcaactaacaggagaagcttcccaacatactgtcaacaaaagagtttggaatgtcttcatccagggacaaagtttttaaataacggaacatgcacagccgaaggaaagtttagtgtttccttgaagcatggaaatacagattcagagggaatagttgaagtaaaacttgtggaccaagataagacaatgttcatatgcaaaagcagctggagcatgagggaagccaacgtggcctgccttgaccttgggtttcaacagtgagcgcttgtatcagtggattttctcatggctgatttaattgttctgtttgctttttgattacctaacctttctgtgtattaatttccatatgtgtaacctaagaaaattaactatgtgcatcatagcattgttatgaggatgatatgcattcatgtttacccaacacttggaacc

SEQ ID NO: 121983 - DNA, 1914 bp, Homo sapiens
  Payload ID: 3911
  Gene Symbol: CFI
  Gene Name: complement factor I
  ENST ID: ENST00000512148
  CDS Start-End: 15-1745
cgaacacctccaacatgaagcttcttcatgttttcctgttatttctgtgcttccacttaaggttttgcaaggtcacttatacatctcaagaggatctggtggagaaaaagtgcttagcaaaaaaatatactcacctctcctgcgataaagtcttctgccagccatggcagagatgcattgagggcacctgtgtttgtaaactaccgtatcagtgcccaaagaatggcactgcagtgtgtgcaactaacaggagaagcttcccaacatactgtcaacaaaagagtttggaatgtcttcatccagggacaaagtttttaaataacggaacatgcacagccgaaggaaagtttagtgtttccttgaagcatggaaatacagattcagagggaatagttgaagtaaaacttgtggaccaagataagacaatgttcatatgcaaaagcagctggagcatgagggaagccaacgtggcctgccttgaccttgggtttcaacaaggtgctgatactcaaagaaggtttaagttgtctgatctctctataaattccactgaatgtctacatgtgcattgccgaggattagagaccagtttggctgaatgtacttttactaagagaagaactatgggttaccaggatttcgctgatgtggtttgttatacacagaaagcagattctccaatggatgacttctttcagtgtgtgaatgggaaatacatttctcagatgaaagcctgtgatggtatcaatgattgtggagaccaaagtgatgaactgtgttgtaaagcatgccaaggcaaaggcttccattgcaaatcgggtgtttgcattccaagccagtatcaatgcaatggtgaggtggactgcattacaggggaagatgaagttggctgtgcagaagaaacagaaattttgactgctgacatggatgcagaaagaagacggataaaatcattattacctaaactatcttgtggagttaaaaacagaatgcacattcgaaggaaacgaattgtgggaggaaagcgagcacaactgggagacctcccatggcaggtggcaattaaggatgccagtggaatcacctgtgggggaatttatattggtggctgttggattctgactgctgcacattgtctcagagccagtaaaactcatcgttaccaaatatggacaacagtagtagactggatacaccccgaccttaaacgtatagtaattgaatacgtggatagaattattttccatgaaaactacaatgcaggcacttaccaaaatgacatcgctttgattgaaatgaaaaaagacggaaacaaaaaagattgtgagctgcctcgttccatccctgcctgtgtcccctggtctccttacctattccaacctaatgatacatgcatcgtttctggctggggacgagaaaaagataacgaaagagtcttttcacttcagtggggtgaagttaaactaataagcaactgctctaagttttacggaaatcgtttctatgaaaaagaaatggaatgtgcaggtacatatgatggttccatcgatgcctgtaaaggggactctggaggccccttagtctgtatggatgccaacaatgtgacttatgtctggggtgttgtgagttggggggaaaactgtggaaaaccagagttcccaggtgtttacaccaaagtggccaattattttgactggattagctaccatgtaggaaggccttttatttctcagtacaatgtataaaattgtgatctctctcttcattctattctttttctctcaagagttccatttaatggaaataaaacggtataattaataattctctaggggggaaaaatgaagcaaatctcactggatatttttaaaggtctccacagagtttatgccatattggaattttgttgtataa

SEQ ID NO: 121984 - DNA, 1345 bp, Homo sapiens
  Payload ID: 3911
  Gene Symbol: CFI
  Gene Name: complement factor I
  ENST ID: ENST00000618244
  CDS Start-End: 209-1345
tctttaatgggaaggccattttttggtttcagttacggtaaatctctctggatttcagccaaattctttcagagttcaaaagtacaaagctctttaggaggtttgttcttttgaaacattttttcagaggttaaaaattaaatttcaaaagaatacctggagtggaaaagagttctcagcagagacaaagaccccgaacacctccaacatgaagcttcttcatgttttcctgttatttctgtgcttccacttaaggttttgcaaggtcacttatacatctcaagaggatctggtggagaaaaagtgcttagcaaaaaaatatactcacctctcctgcgataaagtcttctgccagccatggcagagatgcattgagggcacctgtgtttgtaaactaccgtatcagtgcccaaagaatggcactgcagtgtgtgcaactaacaggagaagcttcccaacatactgtcaacaaaagagtttggaatgtcttcatccagggacaaagtttttaaataacggaacatgcacagccgaaggaaagtttagtgtttccttgaagcatggaaatacagattcagagggaatagttgaagtaaaacttgtggaccaagataagacaatgttcatatgcaaaagcagctggagcatgagggaagccaacgtggcctgccttgaccttgggtttcaacaaggtgctgatactcaaagaaggtttaagttgtctgatctctctataaattccactgaatgtctacatgtgcattgccgaggattagagaccagtttggctgaatgtacttttactaagagaagaactatgggttaccaggatttcgctgatgtggtttgttatacacagaaagcagattctccaatggatgacttctttcagtgtgtgaatgggaaatacatttctcagatgaaagcctgtgatggtatcaatgattgtggagaccaaagtgatgaactgtgttgtaaagcatgccaaggcaaaggcttccattgcaaatcgggtgtttgcattccaagccagtatcaatgcaatggtgaggtggactgcattacaggggaagatgaagttggctgtgcaggctttgcatctgtgactcaagaagaaacagaaattttgactgctgacatggatgcagaaagaagacggataaaatcattattacctaaactatcttgtggagttaaaaacagaatgcacattcgaaggaaacgaattgtgggaggaaagcgagcacaactggggggaaaaatgaagcaaatctcactggatatttttaaaggtctccacagagtttatgccatattggaattttgttgtataattctcaaataa

SEQ ID NO: 121985 - DNA, 1713 bp, Homo sapiens
  Payload ID: 3912
  Gene Symbol: CFP
  Gene Name: complement factor properdin
  Uniprot ID: P27918
  ENST ID: ENST00000247153
  CDS Start-End: 243-1652
gagcaccgcacactcacttcaccctggttcaacacccccacgaggttgaccccgtcattatgttagagattatgcattttccacatagggaaactgaggctcaggggtgttaagtgactcacccaaggtcacacggctaggaagttgctgcacgctcctatgctccatttcctctgggagcctatcaacccagataaagcgggacctcctctctggtagaggtgcagggggcagtactcaacatgatcacagagggagcgcaggcccctcgattgttgctgccgccgctgctcctgctgctcaccctgccagccacaggctcagaccccgtgctctgcttcacccagtatgaagaatcctccggcaagtgcaagggcctcctggggggtggtgtcagcgtggaagactgctgtctcaacactgcctttgcctaccagaaacgtagtggtgggctctgtcagccttgcaggtccccacgatggtccctgtggtccacatgggccccctgttcggtgacgtgctctgagggctcccagctgcggtaccggcgctgtgtgggctggaatgggcagtgctctggaaaggtggcacctgggaccctggagtggcagctccaggcctgtgaggaccagcagtgctgtcctgagatgggcggctggtctggctgggggccctgggagccttgctctgtcacctgctccaaagggacccggacccgcaggcgagcctgtaatcaccctgctcccaagtgtgggggccactgcccaggacaggcacaggaatcagaggcctgtgacacccagcaggtctgccccacacacggggcctgggccacctggggcccctggaccccctgctcagcctcctgccacggtggaccccacgaacctaaggagacacgaagccgcaagtgttctgcacctgagccctcccagaaacctcctgggaagccctgcccggggctagcctacgagcagcggaggtgcaccggcctgccaccctgcccagtggctgggggctgggggccttggggccctgtgagcccctgccctgtgacctgtggcctgggccagaccatggaacaacggacgtgcaatcaccctgtgccccagcatgggggccccttctgtgctggcgatgccacccggacccacatctgcaacacagctgtgccctgccctgtggatggggagtgggactcgtggggggagtggagcccctgtatccgacggaacatgaagtccatcagctgtcaagaaatcccgggccagcagtcacgcgggaggacctgcaggggccgcaagtttgacggacatcgatgtgccgggcaacagcaggatatccggcactgctacagcatccagcactgccccttgaaaggatcatggtcagagtggagtacctgggggctgtgcatgcccccctgtggacctaatcctacccgtgcccgccagcgcctctgcacacccttgctccccaagtacccgcccaccgtttccatggtcgaaggtcagggcgagaagaacgtgaccttctgggggagaccgctgccacggtgtgaggagctacaagggcagaagctggtggtggaggagaaacgaccatgtctacacgtgcctgcttgcaaagaccctgaggaagaggaactctaacacttctctcctccactctgagccccctgaccttccaaacctcaataaactagcctcttcg

SEQ ID NO: 121986 - DNA, 1435 bp, Homo sapiens
  Payload ID: 3912
  Gene Symbol: CFP
  Gene Name: complement factor properdin
  ENST ID: ENST00000377005
  CDS Start-End: 122-1369
aggatgccctcccagttcctcctgcctctaggttcctctttccctgctgattccaggagcctatcaacccagataaagcgggacctcctctctggtagaggtgcagggggcagtactcaacatgatcacagagggagcgcaggcccctcgattgttgctgccgccgctgctcctgctgctcaccctgccagccacaggctcagaccccgtgctctgcttcacccagtatgaagaatcctccggcaagtgcaagggcctcctggggggtggtgtcagcgtggaagactgctgtctcaacactgcctttgcctaccagaaacgtagtggtgggctctgtcagccttgcaggtccccacgatggtccctgtggtccacatgggccccctgttcggtgacgtgctctgagggctcccagctgcggtaccggcgctgtgtgggctggaatgggcagtgctctggaaaggtggcacctgggaccctggagtggcagctccaggcctgtgaggaccagcagtgctgtcctgagatgggcggctggtctggctgggggccctgggagccttgctctgtcacctgctccaaagggacccggacccgcaggcgagcctgtaatcaccctgctcccaagtgtgggggccactgcccaggacaggcacaggaatcagaggcctgtgacacccagcaggtctgccccacacacggggcctgggccacctggggcccctggaccccctgctcagcctcctgccacggtggaccccacgaacctaaggagacacgaagccgcaagtgttctgcacctgagccctcccagaaacctcctgggaagccctgcccggggctagcctacgagcagcggaggtgcaccggcctgccaccctgcccagtggctgggggctgggggccttggggccctgtgagcccctgccctgtgacctgtggcctgggccagaccatggaacaacggacgtgcaatcaccctgtgccccagcatgggggccccttctgtgctggcgatgccacccggacccacatctgcaacacagctgtgccctgccctgtggatggggagtgggactcgtggggggagtggagcccctgtatccgacggaacatgaagtccatcagctgtcaagaaatcccgggccagcagtcacgcgggaggacctgcaggggccgcaagtttgacggacatcgatgtgccgggcaacagcaggatatccggcactgctacagcatccagcactgccccttgaaaggatcatggtcagagtggagtacctgggggctgtgcatgcccccctgtggacctaatcctacccgtgcccgccagcgcctctgcacacccttgctccccaagtacccgtgagtgagagggcaaagtatgcctgggagggggtcattatattacaggcgggagagtcggctaccccag

SEQ ID NO: 121987 - DNA, 1592 bp, Homo sapiens
  Payload ID: 3912
  Gene Symbol: CFP
  Gene Name: complement factor properdin
  Uniprot ID: P27918
  ENST ID: ENST00000396992
  CDS Start-End: 122-1531
aggatgccctcccagttcctcctgcctctaggttcctctttccctgctgattccaggagcctatcaacccagataaagcgggacctcctctctggtagaggtgcagggggcagtactcaacatgatcacagagggagcgcaggcccctcgattgttgctgccgccgctgctcctgctgctcaccctgccagccacaggctcagaccccgtgctctgcttcacccagtatgaagaatcctccggcaagtgcaagggcctcctggggggtggtgtcagcgtggaagactgctgtctcaacactgcctttgcctaccagaaacgtagtggtgggctctgtcagccttgcaggtccccacgatggtccctgtggtccacatgggccccctgttcggtgacgtgctctgagggctcccagctgcggtaccggcgctgtgtgggctggaatgggcagtgctctggaaaggtggcacctgggaccctggagtggcagctccaggcctgtgaggaccagcagtgctgtcctgagatgggcggctggtctggctgggggccctgggagccttgctctgtcacctgctccaaagggacccggacccgcaggcgagcctgtaatcaccctgctcccaagtgtgggggccactgcccaggacaggcacaggaatcagaggcctgtgacacccagcaggtctgccccacacacggggcctgggccacctggggcccctggaccccctgctcagcctcctgccacggtggaccccacgaacctaaggagacacgaagccgcaagtgttctgcacctgagccctcccagaaacctcctgggaagccctgcccggggctagcctacgagcagcggaggtgcaccggcctgccaccctgcccagtggctgggggctgggggccttggggccctgtgagcccctgccctgtgacctgtggcctgggccagaccatggaacaacggacgtgcaatcaccctgtgccccagcatgggggccccttctgtgctggcgatgccacccggacccacatctgcaacacagctgtgccctgccctgtggatggggagtgggactcgtggggggagtggagcccctgtatccgacggaacatgaagtccatcagctgtcaagaaatcccgggccagcagtcacgcgggaggacctgcaggggccgcaagtttgacggacatcgatgtgccgggcaacagcaggatatccggcactgctacagcatccagcactgccccttgaaaggatcatggtcagagtggagtacctgggggctgtgcatgcccccctgtggacctaatcctacccgtgcccgccagcgcctctgcacacccttgctccccaagtacccgcccaccgtttccatggtcgaaggtcagggcgagaagaacgtgaccttctgggggagaccgctgccacggtgtgaggagctacaagggcagaagctggtggtggaggagaaacgaccatgtctacacgtgcctgcttgcaaagaccctgaggaagaggaactctaacacttctctcctccactctgagccccctgaccttccaaacctcaataaactagcctcttcg

SEQ ID NO: 121988 - DNA, 928 bp, Homo sapiens
  Payload ID: 3912
  Gene Symbol: CFP
  Gene Name: complement factor properdin
  ENST ID: ENST00000469388
  CDS Start-End: 428-928
agataaagcgggacctcctctctggtagaggtgcagggggcagtactcaacatgatcacagagggagcgcaggcccctcgattgttgctgccgccgctgctcctgctgctcaccctgccagccacagtatgaagaatcctccggcaagtgcaagggcctcctggggggtggtgtcagcgtggaagactgctgtctcaacactgcctttgcctaccagaaacgtagtggtgggctctgtcagccttgcaggtccccacgatggtccctgtggtccacatgggccccctgttcggtgacgtgctctgagggctcccagctgcggtaccggcgctgtgtgggctggaatgggcagtgctctggaaaggtggcacctgggaccctggagtggcagctccaggcctgtgaggaccagcagtgctgtcctgagatgggcggctggtctggctgggggccctgggagccttgctctgtcacctgctccaaagggacccggacccgcaggcgagcctgtaatcaccctgctcccaagtgtgggggccactgcccaggacaggcacaggaatcagaggcctgtgacacccagcaggtctgccccacacacggggcctgggccacctggggcccctggaccccctgctcagcctcctgccacggtggaccccacgaacctaaggagacacgaagccgcaagtgttctgcacctgagccctcccagaaacctcctgggaagccctgcccggggctagcctacgagcagcggaggtgcaccggcctgccaccctgcccagtggctgggggctgggggccttggggccctgtgagcccctgccctgtgacctgtggcctgggccagaccatggaacaacggacgtgcaatcaccctgtgccccagcatgggggccccttctgtgctggcgatgccacccgg

SEQ ID NO: 121989 - DNA, 2181 bp, Homo sapiens
  Payload ID: 3913
  Gene Symbol: CPLX1
  Gene Name: complexin 1
  Uniprot ID: O14810
  ENST ID: ENST00000304062
  CDS Start-End: 233-637
gtcacgctcggacgcgggcggggggcggggagcgcctgcgagtgacgcgccctcctcgcggtgcccttcagccgccgccgcagctcaccgggcgccacatggacccagccggcccgagcgcgccccgccgctgaccgcccgcgccccgggaaggaagaacactcgctcccggccatacttgcgtgtgagttctgacccctggaggagccactgtggaagcagagcaatcgccatggagtttgtgatgaagcaggctctaggaggggccaccaaggacatggggaagatgctggggggtgacgaggagaaggacccagacgccgccaagaaggaggaggagcggcaggaggcgctgcgccaggcggaggaggagcgcaaggccaagtacgccaagatggaggcggagcgcgaggccgtgcgccagggcatccgagacaagtacggcatcaagaagaaggaggagcgcgaggccgaggcccaggccgccatggaggccaactccgaggggagcttgacgcggcccaagaaggccatcccgccgggctgcggggacgaggtggaggaggaggacgagagcatcctggacaccgtcatcaagtacctgcccgggccgctgcaggacatgctcaagaagtagccgcgcgcgggacagcggccccgcggagcccccgcccctccccctacagatcctccgcggaggcccctgagggacgagcagagcgcagcccccacgccgatataagccatagccccaggcccgccctgcccgcgcccgccgcctccctcacccggcaaggggcgcgcgcccccaggacccccccagtccgccccgtgctcctctgcccgcgggtggctggagccccatcgcctgggacgcccctttctcttgctgtttaccgcccacccagcagcgcccgaggccagggccgccgaagggcagccccgcgaccacccctgtgcgcgcgttcgcggcggtgggcgcctgtcgggcccgcactcaggagcacagccatagcagacggggggctgcgggcggggcgagggcggcggggcctgggtccccctcctgcacgcggactccggggttcggatcgctccgccgtgagtatttgcgtccgcacgcggccgctctccgccccccggcctggccccctcgcgcccctgtccatccgtctctgtccgcgtcctttcctctcctctctggaaggttttgcttcttacgaacgccacggccgtgttcacttctaaactaaaggaaacaaagcaataggtttgggggacgcccagcccccacccccgtcaccccgctcttcccaagtcctcgccccccgcccggcctcctagcctctccgcccacgcggctgctgcttctccctggggaggacccctgccctcggccattgaacactgcaccctccacaggagccgcagaggcccgaggcaccggacgctggagaccctgcgcccctgcccagcacctcctccgtgggcagctcctcgggtggggcctgcggggttccctgcgcgcagctggcgcgtgtgtggcctaatccacctggtggccctgcggggcggcatccgagcccctgtttctcctccattcatgtttaatttgcatcacaatttgttgaatctcaggtaaatgaggtctttgcatttaatgagttttatcttgacaggcgccgcctcgcccccgggccctttcgtccacatcaaaaatgcatcaagtctccacgtgtttcgggccagggcgtggcttggcattgaccttcatgaccttacatagctttagagaagccataacgttagactgcaatactaacgaccgacgcccctccgggcagagaccaccgcgcccctctgcgccccagcgacgcggcccgcggggacgtcgctgtccgtcctgctcgccctgtgccctctcactgacttctcccgggtcgtgtcttttaaaaactcctgttttcacaccttacaaagccagctctgagcagacagggcgtcctctcgtagaacctgcgcaccccgttcccagcgcatggcgccccgggccgcgagcttagcttagaccgtggtgtcctctgtccgtctgtcctgcgcctgcgcctcctcctgcatgtcggggcccctgcgtgtgttctctccggatggaatcacagccaataaacaccagtgatttca

SEQ ID NO: 121990 - DNA, 497 bp, Homo sapiens
  Payload ID: 3913
  Gene Symbol: CPLX1
  Gene Name: complexin 1
  ENST ID: ENST00000504062
  CDS Start-End: 168-497
aaaatggctgccgcctgcgttccaaaatggctgccgccgcccacctttcccgtggaggctgagcacgtcgctccccacgcttgccggcctccaggctgacgaccgccagagccgtctctgggactctgcaggcacttcccgagcccccgcaaggggccaccaaggacatggggaagatgctggggggtgacgaggagaaggacccagacgccgccaagaaggaggaggagcggcaggaggcgctgcgccaggcggaggaggagcgcaaggccaagtacgccaagatggaggcggagcgcgaggccgtgcgccagggcatccgagacaagtacggcatcaagaagaaggaggagcgcgaggccgaggcccaggccgccatggaggccaactccgaggggagcttgacgcggcccaagaaggccatcccgccgggctgcggggacgaggtggaggaggaggacgagagcatcctggacaccgtcatcaagtacctgccc

SEQ ID NO: 121991 - DNA, 2011 bp, Homo sapiens
  Payload ID: 3913
  Gene Symbol: CPLX1
  Gene Name: complexin 1
  ENST ID: ENST00000505203
  CDS Start-End: 127-468
agccggcccgagcgcgccccgccgctgaccgcccgcgccccgggaaggaagaacactcgctcccggccatacttgcgtgtgagttctgacccctggaggagccactgtggaagcagagcaatcgccatggagtttgtgatgaagcaggctctaggaggggccaccaaggacatggggaagatgctggggggtgacgaggagaaggacccagacgccgccaagaaggaggaggagcggcaggaggcgctgcgccagggcatccgagacaagtacggcatcaagaagaaggaggagcgcgaggccgaggcccaggccgccatggaggccaactccgaggggagcttgacgcggcccaagaaggccatcccgccgggctgcggggacgaggtggaggaggaggacgagagcatcctggacaccgtcatcaagtacctgcccgggccgctgcaggacatgctcaagaagtagccgcgcgcgggacagcggccccgcggagcccccgcccctccccctacagatcctccgcggaggcccctgagggacgagcagagcgcagcccccacgccgatataagccatagccccaggcccgccctgcccgcgcccgccgcctccctcacccggcaaggggcgcgcgcccccaggacccccccagtccgccccgtgctcctctgcccgcgggtggctggagccccatcgcctgggacgcccctttctcttgctgtttaccgcccacccagcagcgcccgaggccagggccgccgaagggcagccccgcgaccacccctgtgcgcgcgttcgcggcggtgggcgcctgtcgggcccgcactcaggagcacagccatagcagacggggggctgcgggcggggcgagggcggcggggcctgggtccccctcctgcacgcggactccggggttcggatcgctccgccgtgagtatttgcgtccgcacgcggccgctctccgccccccggcctggccccctcgcgcccctgtccatccgtctctgtccgcgtcctttcctctcctctctggaaggttttgcttcttacgaacgccacggccgtgttcacttctaaactaaaggaaacaaagcaataggtttgggggacgcccagcccccacccccgtcaccccgctcttcccaagtcctcgccccccgcccggcctcctagcctctccgcccacgcggctgctgcttctccctggggaggacccctgccctcggccattgaacactgcaccctccacaggagccgcagaggcccgaggcaccggacgctggagaccctgcgcccctgcccagcacctcctccgtgggcagctcctcgggtggggcctgcggggttccctgcgcgcagctggcgcgtgtgtggcctaatccacctggtggccctgcggggcggcatccgagcccctgtttctcctccattcatgtttaatttgcatcacaatttgttgaatctcaggtaaatgaggtctttgcatttaatgagttttatcttgacaggcgccgcctcgcccccgggccctttcgtccacatcaaaaatgcatcaagtctccacgtgtttcgggccagggcgtggcttggcattgaccttcatgaccttacatagctttagagaagccataacgttagactgcaatactaacgaccgacgcccctccgggcagagaccaccgcgcccctctgcgccccagcgacgcggcccgcggggacgtcgctgtccgtcctgctcgccctgtgccctctcactgacttctcccgggtcgtgtcttttaaaaactcctgttttcacaccttacaaagccagctctgagcagacagggcgtcctctcgtagaacctgcgcaccccgttcccagcgcatggcgccccgggccgcgagcttagcttagaccgtggtgtcctctgtccgtctgtcctgcgcctgcgcctcctcctgcatgtcggggcccctgcgtgtgttctctccggatggaatcacagccaataaacaccagtgatttc

SEQ ID NO: 121992 - DNA, 5023 bp, Homo sapiens
  Payload ID: 3914
  Gene Symbol: CPLX2
  Gene Name: complexin 2
  Uniprot ID: Q6PUV4
  ENST ID: ENST00000359546
  CDS Start-End: 644-1048
ggggttggcaacagagcaggtaggtagacctgcatttggttgctggtcacagaaatggagagtgagagatatttctaagtcaggatgccctagtggcagacccccaagtcctcgaacttcagggcagaactgcctgggtgggaactctcccatgtctccttgatttcactgccacctctgctggcgtcctctctcatctccgccgccagcccccgcctcctttctcgggaagcttgggtctccctgggagcgggtctgcccttagggggaggcctctgggctctgtgccctgcagctcggcaggcattcgaggcggacagaaacggggcttggcgccccccgcgtgcacgtgtgctagcccaggcaggagggagcgcctcggcggaggagtcaaggaagagggggagggagaaacgcgccagaacctcggcccgggcgccctcgtcggccgcggaggagctgcagcctccaacaggaaggtgtggtccctgccatgctatctgctctgctcagcgactgaaggtgcccgcatcccagctctgccaggaagcaaaggttgtcacatcttcccaagccaggccagccaggagcgctgcatgcaaattctgccgtgggctaaggcacgctaaccagagccggcggcatggacttcgtcatgaagcaggcccttggaggggccacaaaggacatggggaagatgctggggggagaggaggagaaggaccccgacgcgcagaaaaaggaggaggagcggcaggaggcgctgcggcagcaggaggaggagcgtaaggccaagcacgcgcgcatggaggcggagcgggagaaggtccggcagcagatccgagataagtatgggctgaagaagaaggaggagaaggaagcagaggagaaagcagccctggagcagccctgcgaggggagcctgacccggcccaagaaggccatccctgcgggctgcggggacgaggaggaggaggaagaggagagcatcctggacacggtgctcaaatacctgcccgggccgctgcaggacatgttcaagaagtaaccaggcctcctgccccagcctactccacctgttactacttctttttggttctttcttttctttttattaggttaagtctcaattctgaaggggaaaacctcagttggcctctgcccctcttccctggccaggggcttctccccctcagctctccctcacacctcccttcatcccagggtatccacctgcaccccactcccaagtagcttgaaaaagggaggacagtctttccccagcaggggtcaggggggcccctcaggaagcctaaggtcgtgctagtgtggtgacccccatacattcctccctgctccccactgccaggaggaccactgtccccagccagccaaagtaatgacacattccagccctgcccagcatgctgacctttggcctctaaccctcagtgggcccccaggtcagggcaggggcactgagtggcctggctctgaggaagggagtcaggggaagcctgtcccgggaaggcccaggctgagaggccctggctctggccaggctgggatctgggtgggaggctggggctcttcttcttccatctccttggtgacacccagcccaggggcacccccttccccagcccccacctggagagacatggcccctgccaagctggtcccttcaaatggatcctttgtggactttagctcatttgtggaggaaccccaggtagggacgccccttgttcctcacccccaccccacttaggtcctgggcccccactgccaggctgggcccagcttgctcagtcaaggggctgccaggcccccagaaaacacttggagccatcgggtagcgatggtctatgccatggggaacacctccattggtgtggccaagctgcccccattcctatccacccctctccccaccccgtcctgtccatgcgcttccagggccccacggtccccaggaggacgcttcctggccaaagccccaagcctttggtgagaagccaattcccacttgacagaaggcgtccatccattcatctcattggccaaggacaaactctcctctgggacgtctgggactggcatttgtcccccactcaaattatcaaagctttctgctcagtcagttgtgtggggatggtgagggaagaggggtcacatgagggaggaaactgtatccatgcatgcatgataatgcgtggcagagactgcaacagggattgtgtgttcagagatcatatgcatatgtgtagggctggagcgtgtgtgtgtcttgagattgtgtgtgttgcagtcatcatatctatgtgttacagattgtgtatgttagccttgtgtatgtgtgcttgattgaggtggtgtatttgggttgaaattgtgtcatatgtgtgtgctatccatctcgtgtttagaggctgtatatgttagcttgtgtaagaatgtgttttcaaaacagtgtgtgtattgggagtgatgggtatgtgttaggtatgtgatgggttgtagaagcgtgtgtttgagagaattcagagacatttgaaggctgctgtgtgcatgtttgggggtctgaaaagacagttgtgtgcatggatgtgtgcgtggggagaaagaacgtgggtaagatgtcccttcccagccctgagaccactggtcacagttggccacctccaacgggagaccttgtccttggcctagagtcctcccacccttggggggctcctgcctgaggtcctcagaatcccactgcaatggacccaggcagcgccccaggaagccatgctgggcccccgccagggcctatcccaaaagcaggggccagggagggggcgacttgcctgcccctgaagcccttgttcccattggccccagtttgcattctgcaggttttccattttagtgggttctgcttttatttcagagacagacatgtgtcttctctgtccgtttccaataggtaaagccatatcagttagactgcaatactttaaacacgagacaaaacaatccatatgtttagggaaccagaaaagtcccctggtctgtcccttctttggggagcagggcctcgacagctccagctcccttgacctaccttcctccccgcaccccgcccccaccttgtgcccctgtgtccagccccccagggggcctgtgtctgtgtctgtgcctgtgtctgtgatggggagccgcctcgcacccctgttgtctgcttgtctctttgtgtctgttatcctgggcaggatggtcattctcaaaaaccctggggtcctgggccagagacaggcagggcccagtccaggggccccaggcctccccagtcccagtgtgcgagccccacttggacacaagtgttcagagaggtccccctctgccacttgacagggaccttcaaacctcgacagtgatgcaaggacacagagagtaccagataggtagcagagaccaaggcgcagggtgcttcagatgagcaagagaacccagtcgaaccagataccccaggtgggccggagggaccccagaccttcagagggctgccctggtgttctccacagtgcagtccctctgtattcccagagtgggatcggggctttcagccccaccctgatgcctgccctccaggatggctggtttagtctgggtccatgtcccagacccctctattctgctccaggacagcaggacttcaggtcttcctgggggtggatataggagaaaatttctgcctggcacacacctggctccaaccactgccaagtgatcactcttaggcccaggggaacacaatgactatcattactgatgcagacctggctgtggagagcagctaatgtgtggcccagagagcctgtctgtgtggagcacgtagtgcacagaatacgtgagagttgctctggcaggggcagaatcctcacaggatcgcctgggaggtgaggtgtgtgtgacccactggatgggagggcaatgagtgtgcacatacaaatggggcagtgtgcatgcaacacacttaggggaggagtggccccagaattcagcacgcacacaacacacaagggagagaacccccagatgagaaaataggaaggagcaatcatttgtagatgggtgaaaaaagaatgaggttcaagggagcgtgcaccaggtgaggtgagcgtgtgtgctctcagggaagggcccaggatcccatgcctgggaggagctgccagagagaagcaaaaaggcggctgtggatcgccctgggctgggcaccagtgacaggtcaggatctccaaacatggacgtcctcccctccaaatccagaagctcccagaaggtgtccttaactgcaaagctgtgcagggtactcctccagatggaatcaggaagtcgagacaccatcccaggtgtgtgtaagagagagagagagaacagggaggatacagaagtattgcagcccagatcccctatcagggggacagctggtgggcaaagcagccaccccacagccttgtggctagagtacagtggggtagaccctccagccccaatagccctagtacccagctggcagggttgcccacccctgctgtccacctgctccatcctctagggttccacaggcccctgaccgcacagggaggctggggccagcctggtctcccaggcctgaggacatgcctcccaccaaatgtcccctgctccagtcccactcctgtcaccccacgctctgcactggggagaaaacgggaggtgctcgtgctggccctgggtgggagcggggagtcctggtgagaccccggtgagatggaccatcctgcccccgtgggggatcccctttcccacatccgtgctgtgtcattgttgctctgcttcctttcaatgtgtcagtgcctggggggaggggaggagcaccccctcagcccccctgaacctgaccaaaagccatggctgttgctcccccctttgtatgatgcaaatgctgaaatgtacaaaatcaaccatgacaacaaagaaaaagaccttgtacagc

SEQ ID NO: 121993 - DNA, 826 bp, Homo sapiens
  Payload ID: 3914
  Gene Symbol: CPLX2
  Gene Name: complexin 2
  Uniprot ID: Q6PUV4
  ENST ID: ENST00000393745
  CDS Start-End: 297-701
catctggaaggggagcggtagaacgtcagggcccggctgaggggcgtgattggagggcgccttcggcagccgcccgcggcagaagccgcggctccagctcgcctggcggaattgcacgcggcggcgggagctggaatagcagaaggaaccacctcgtggagtcgggccggagccctgcagtggctcagacggttgcagggaccgccaggttgtcacatcttcccaagccaggccagccaggagcgctgcatgcaaattctgccgtgggctaaggcacgctaaccagagccggcggcatggacttcgtcatgaagcaggcccttggaggggccacaaaggacatggggaagatgctggggggagaggaggagaaggaccccgacgcgcagaaaaaggaggaggagcggcaggaggcgctgcggcagcaggaggaggagcgtaaggccaagcacgcgcgcatggaggcggagcgggagaaggtccggcagcagatccgagataagtatgggctgaagaagaaggaggagaaggaagcagaggagaaagcagccctggagcagccctgcgaggggagcctgacccggcccaagaaggccatccctgcgggctgcggggacgaggaggaggaggaagaggagagcatcctggacacggtgctcaaatacctgcccgggccgctgcaggacatgttcaagaagtaaccaggcctcctgccccagcctactccacctgttactacttctttttggttctttcttttctttttattaggttaagtctcaattctgaaggggaaaacctcagttggcctctgcccctcttccct

SEQ ID NO: 121994 - DNA, 557 bp, Homo sapiens
  Payload ID: 3914
  Gene Symbol: CPLX2
  Gene Name: complexin 2
  ENST ID: ENST00000509837
  CDS Start-End: 225-557
agctggaggcggggagagccttgatcaaagtcaggcaggggagcacagcggcttcctgacgctggacccaggtggggacagagcggccctgtgaagtcaaagagaatgttgctttgttcagctctcactgggaaaggttgtcacatcttcccaagccaggccagccaggagcgctgcatgcaaattctgccgtgggctaaggcacgctaaccagagccggcggcatggacttcgtcatgaagcaggcccttggaggggccacaaaggacatggggaagatgctggggggagaggaggagaaggaccccgacgcgcagaaaaaggaggaggagcggcaggaggcgctgcggcagcaggaggaggagcgtaaggccaagcacgcgcgcatggaggcggagcgggagaaggtccggcagcagatccgagataagtatgggctgaagaagaaggaggagaaggaagcagaggagaaagcagccctggagcagccctgcgaggggagcctgacccggcccaagaaggccatccctgcgggctgcggggacgaggaggaggag

SEQ ID NO: 121995 - DNA, 576 bp, Homo sapiens
  Payload ID: 3914
  Gene Symbol: CPLX2
  Gene Name: complexin 2
  Uniprot ID: Q6PUV4
  ENST ID: ENST00000515094
  CDS Start-End: 164-568
aatctccgccggagccggggaaaggtggcattgccatttctctcttagagaggaggaaactggggactcgagcaggttgtcacatcttcccaagccaggccagccaggagcgctgcatgcaaattctgccgtgggctaaggcacgctaaccagagccggcggcatggacttcgtcatgaagcaggcccttggaggggccacaaaggacatggggaagatgctggggggagaggaggagaaggaccccgacgcgcagaaaaaggaggaggagcggcaggaggcgctgcggcagcaggaggaggagcgtaaggccaagcacgcgcgcatggaggcggagcgggagaaggtccggcagcagatccgagataagtatgggctgaagaagaaggaggagaaggaagcagaggagaaagcagccctggagcagccctgcgaggggagcctgacccggcccaagaaggccatccctgcgggctgcggggacgaggaggaggaggaagaggagagcatcctggacacggtgctcaaatacctgcccgggccgctgcaggacatgttcaagaagtaaccaggcct

SEQ ID NO: 121996 - DNA, 469 bp, Homo sapiens
  Payload ID: 3914
  Gene Symbol: CPLX2
  Gene Name: complexin 2
  ENST ID: ENST00000515502
  CDS Start-End: 450-469
cgggcgccctcgtcggccgcggaggagctgcagcctccaacagaagggaaaacggacacctgtggaggggaagaaacgtgtccaagatcattcacacagagcgtcagctctggggtcagaacccagctcccaaggctttccgtgtccagaccacctccctcacctggttggccagcctccacctgatgagccgggcaggctgcaagtggcaagttccctgggaaggtgtggtccctgccatgctatctgctctgctcagcgactgaaggtgcccgcatcccagctctgccaggaagcaaagttacagatgagaaaactgaagctcagagagtgaaaggacttgcctaaagacacacagctggttgtcacatcttcccaagccaggccagccaggagcgctgcatgcaaattctgccgtgggctaaggcacgctaaccagagccggcggcatggacttcgtcatgaagca

SEQ ID NO: 121997 - DNA, 970 bp, Homo sapiens
  Payload ID: 3914
  Gene Symbol: CPLX2
  Gene Name: complexin 2
  ENST ID: ENST00000514150
  CDS Start-End: 613-970
agtggctcagacggttgcagggaccgccaggtcggtgctggccgagggccgggagggcggagctgggctgtgggcaacagggtcccggctctcgcctcgaggccttggggcagctcgggaagctggggagcacggctttcggggggacagctccccaaggctgcctgggcaccggatggggactgagaggcggtaaaggggacactcccgggtgcgctctccgtggtgctgaaaggacagctccttgcgaggggccgcgagcaggcagctagctgcgaactaagaggaagcgtgggccctagccggagactccgggcagagcccgaacggccggggtcccggagccaggaccgccccggctgcggcggagactcaagtctgaacccagagaacaactttgagctcgcgggagtgggggacgtcgatctaagctacttctggctgtgcttaacccgaagcccgccggagcacgcttcgccccggaggagggagtcgcccccaggggtacagtgcgcactcccggagttgtcacatcttcccaagccaggccagccaggagcgctgcatgcaaattctgccgtgggctaaggcacgctaaccagagccggcggcatggacttcgtcatgaagcaggcccttggaggggccacaaaggacatggggaagatgctggggggagaggaggagaaggaccccgacgcgcagaaaaaggaggaggagcggcaggaggcgctgcggcagcaggaggaggagcgtaaggccaagcacgcgcgcatggaggcggagcgggagaaggtccggcagcagatccgagataagtatgggctgaagaagaaggaggagaaggaagcagaggagaaagcagccctggagcagccctgcgaggggagcctgacccggcccaagaaggccatccctgcgggctgcggggacgaggaggaggaggaagaggagagcatcctggacacgg

SEQ ID NO: 121998 - DNA, 532 bp, Homo sapiens
  Payload ID: 3914
  Gene Symbol: CPLX2
  Gene Name: complexin 2
  ENST ID: ENST00000502265
  CDS Start-End: 300-532
agacttgaatcataaaaacagaaaaacggccataaggacaaccactgcaggttacccgagtcagcctgtcagatggcggggcccagtcccgaaaacctctaggggctcagatggtcgagcctgagtcggtgcttgggctgggacgggctcggagggagtcggagaggggaaggaagctgaaggcgcgccctgggtccccggcgcactgaaggttgtcacatcttcccaagccaggccagccaggagcgctgcatgcaaattctgccgtgggctaaggcacgctaaccagagccggcggcatggacttcgtcatgaagcaggcccttggaggggccacaaaggacatggggaagatgctggggggagaggaggagaaggaccccgacgcgcagaaaaaggaggaggagcggcaggaggcgctgcggcagcaggaggaggagcgtaaggccaagcacgcgcgcatggaggcggagcgggagaaggtccggcagcagatccgagataagtatgggctgaagaagaaggaggagaa

SEQ ID NO: 121999 - DNA, 567 bp, Homo sapiens
  Payload ID: 3914
  Gene Symbol: CPLX2
  Gene Name: complexin 2
  ENST ID: ENST00000515025
  CDS Start-End: 455-567
aatctccgccggagccggggaaaggtggcattgccatttctctcttagagaggaggaaactggggactcgagcaggttagggccttgctgaaggtcccatggcaaataaggaaatgacggtggcgttggaaaccagatctgcctgactccaagttccaggctctttccaatgctcctggcttcaatcaaatctgaacaatagggtcaagatgaaggctttaaaatagggaccaaaccgctttcaaaaagctatttggcagcacctacgtgtctgcccagtaaatcgctctcttccatctcctttctcctccagcagggcattgggtcttgacctcagagcgatgggtgcctggtgtctgaaccagggttgtcacatcttcccaagccaggccagccaggagcgctgcatgcaaattctgccgtgggctaaggcacgctaaccagagccggcggcatggacttcgtcatgaagcaggcccttggaggggccacaaaggacatggggaagatgctggggggagaggaggagaaggaccccgacgcgcagaaaaaggaggaggagcggca

SEQ ID NO: 122000 - DNA, 518 bp, Homo sapiens
  Payload ID: 3914
  Gene Symbol: CPLX2
  Gene Name: complexin 2
  ENST ID: ENST00000512824
  CDS Start-End: 217-429
agaagccgcggctccagctcgcctggcggaattgcacgcggcggcgggagctggaatagcagaaggaaccacctcgtggagtcgggccggagccctgcagtggctcagacggttgcagggaccgccaggttgtcacatcttcccaagccaggccagccaggagcgctgcatgcaaattctgccgtgggctaaggcacgctaaccagagccggcggcatggacttcgtcatgaagcaggcccttggaggggccacaaaggacatggggaagatgctggggggagaggaggagaaggaccccgacgcgcagaaaaaggaggaggagcggcaggaggcgctgcggcagcaggaggaggagcgtaaggccaagcacgcgcgcatggaggcggagcgggagaaggtccggcagcagatccgagataaggactgaggcttgggaggcactcctggccacctcagccagtgctgcatgatcatgagactcctgctgtctccttgcccaccccgcttcatgcgcgt

SEQ ID NO: 122001 - DNA, 2082 bp, Homo sapiens
  Payload ID: 3915
  Gene Symbol: CPLX3
  Gene Name: complexin 3
  Uniprot ID: Q8WVH0
  ENST ID: ENST00000395018
  CDS Start-End: 158-634
ggcgggcccgggcgggggcgggcggcgggcggtgccaagcgtggggcgcgggcccgcggcgggagctgtccgcgaaacctagtgctgaagtaggcgcggacgtgcccggtgcctggcgcgtggtagcaggcgcccggtgccccggccggcgaagaccatggcgttcatggtgaagaccatggtgggcggccagctgaagaacctcactgggagcctgggaggcggcgaggataagggagatggggacaagtcggcagccgaagctcagggcatgagccgggaggagtacgaggagtatcagaagcaactcgtggaagagaagatggagcgggatgcacagttcacacagaggaaggcagagcgggccacactgcggagccacttccgagacaaataccggctacccaagaacgagacagatgagagccagatccagatggcaggtggagacgtggagctgccccgggagctggccaagatgatcgaggaggacacagaggaggaggaggagaaggcctcagtccttgggcagctggccagccttcctggcttgaacctgggctcactcaaggacaaggcccaggccacactgggggatctcaagcaatcagctgagaagtgtcacgtcatgtgaccacttccccggggttacccactgggctgggcccccatgagggctaagagtgtgtcaacttccagggacccatactccatttggggctttgtttcccttgccccatcctagttccaagacctttcccatccatgccccaagcctatcttctggtttcttcctctccgctgggagtaaagtccccatcttcactctacccttcaggaccctccccaccagctcagcctgtggaggcctcccaagattgtaggaataggcccatccctctctggccatggccccaagttcctgcacacaggagcacccacagagagacacacacaggacacaaaacccctggcacgttcagagacagaagccacagatacatcccggcacagacagacacacacgaggccagctcccttgcgtgtccagcccctccagacaccaccactcagaaactctgagagagagcatgggcagacaccctcagcagacaggaggcctgagttccagtctccacctttattgttcttgaaagcccctgctctctctgagccttatttcatcatctgtaaaatgggaatgtcctgaatgacttctaaggctctttctggcttgaactgtcagagccaagcccacatccctccttgggcagggcagcagctgctgccacagcctccagcggctgccactgtgggctctgggagccggagcgatgctgtgtgagaggcagagtgccaaggatgaagctggcactgaacagtaagcggctccaggcctcctctgggcccagggcccagccaatttctgttctgttcctgtagaacgctctctggattccatagctggaatctcctctcttagctcagtgaaaaataaaaatcccaaatggtgtgcctaccttcccacttcttactggcttccaggagtcttggagttcatagccccccgagcctgccttaaaggggtgtcctccaccccccacctacagcttcacaggaggggagaaggcatccagtgctaggagtagaagtgtctccagctctgttctcttggggccctgggtgaaggtggggtctggggcttatgaaataggtctgggctttgaggaggatggagcagcctcattatgtggggaagatggggcctctggggcgtcactgagaccacaggtggggccggggctggaccgcagctgtcttgggtgcctgtgcctacacccctcctcaccctagagacggaagatgtgcaaaaagaaagaaggaagggcaactgcattccagccccacactgtgatgactttgagcctgtcctttccctccttgagcctgtcttgcttgtcccctgtaaaatgaacagtccccctctcccccaaatagtaataatacatgtttcaaagggtgaccatttataaagcatatgacaaaccatatcaataaatgtaactcattcttttaaaaaaa

SEQ ID NO: 122002 - DNA, 1966 bp, Homo sapiens
  Payload ID: 3916
  Gene Symbol: CPLX4
  Gene Name: complexin 4
  Uniprot ID: Q7Z7G2
  ENST ID: ENST00000299721
  CDS Start-End: 188-670
agcttacggccgacaaaccactcttctctatcagtatgcccttgaatagatgaggttgtgcaaagtcctttgctcttaaatgtattgctgtcattgagaatatttggaggttttctcttgggtttgtttggattttttttttcagcttttgtctgaattttggttttatttttctggggcagagaaaatggctttccttatgaaaagtatgataagtaaccaggtaaagaatttaggatttggtggtgggtctgaagaaaataaagaagaaggaggtgcatctgatcctgcagcagctcaagggatgactagagaggagtatgaggagtatcaaaagcaaatgattgaggagaagatggaaagagatgctgcatttacacagaaaaaggcagaaagggcatgcctcagagttcatctcagagaaaaatacaggctcccaaagagtgaaatggatgagaatcaaatccagatggctggagatgatgtggatttacctgaagatctccggaaaatggtagatgaagatcaagaagaggaagaagataaagattctattcttgggcagatacagaatctccagaacatggacttggataccataaaagaaaaagcccaggccaccttcactgaaatcaagcagacagcggagcagaagtgttccgtgatgtgaggggtgggaggggtggagggagggaaccagccatccttggaaaagaccactctcttgtgggacgtttcaagcagtacatgttttaatgtagtgaacacagttaggaaaaccacgatgatccattgacagacaataatttggttgttctaaatattcctggcagagcatttagctaacaccttgcagcgggaaccttactttccttttagttataaatgagataaactggaaaatttcagttgtaaatgatgatgcagaacacatatctgcttaaagaccttgagatgagccaggaagaaacaaaagcaaggggcatttcctctccaactttcttccttggaggccaagttctcaccctgtccaactattcgcaggacaccaggtcccttcagagagaaatgtggagagtcaaggtgtctactgggagccgggtttcccacagggagctgagtctacagactccagggcaatcaaaggtcaccacccccacccctcacctctaggatccttgaatttgtcaatgatactcatcaagtatgcttggatcctttggtccttggatgcttctcagccaagtggcggtagcacagatgtggtgaacaatgacgaattgaggcagggaatagacctcactagccctttgcaatggagatcatcgttctagtggccatgtgaagaatggaaccaagggaggcacaattagaggcagagggaaaccaggcagacggctgctctttttgagttgagcttaactctccttgtctgaacttggtgatagcaatgggaacaaagtgggtagactaacagagagcattaagaagttaaatcaatctctctctgtctcctcccaacctctctctctctttcatccccttctctccctatctctcttttttttttcttctcctgtcccttcccatcccacccctttagactaccttccagtaaatcacactgtcatttggtgccacaagctttcagggtagacactgatttttcccccctaatatctgctctctttcaaaaggaataattcaaaagacttaggacaattaccactgaaacacttcgagctatttagctaaagcccaccaaaccaaaacaaaatactgatttttttttttttttttggtgactctgttcatacagtgaataaagatctatcaaaggaaaaggaaactgagaccgaaaacttagggtctaagttgttctaaacccagggttctcaaatgtgttgtacaaaaagtttcatgtaataaaattaagcaaataaaacaaatgaatagaggtccaaaa

SEQ ID NO: 122003 - DNA, 1916 bp, Homo sapiens
  Payload ID: 3916
  Gene Symbol: CPLX4
  Gene Name: complexin 4
  ENST ID: ENST00000587244
  CDS Start-End: 83-376
ggaggttttctcttgggtttgtttggattttttttttcagcttttgtctgaattttggttttatttttctggggcagagaaaatggctttccttatgaaaagtatgataagtaaccaggtaaagaatttaggatttggtggtgggtctgaagaaaataaagaagaaggaggtgcatctgatcctgcagcagctcaagggatgactagagaggagtatgaggagtatcaaaagcaaatgattgaggagaagatggaaagagatgctgcatttacacagaaaaaggcagaaagggcatgcctcagagttcatctcagagaaaaatacaggctcccaaagtgcacagggatatgcatgtctcccccgtgttgtaggtgagactgttcatccagaatacttccagaaattggaccttctccatacagccacgatcaaggagtcgctttatactacaacttcctcacgtttggaaatgtgtgtctcccaaccatccgaagtttaatggggctttagctgtgtctaaggttggccgcaggtgggggatggaaggaggggttttctttgatccatctaatgaattaatgaattaatcagaggtggggttcagaagccaggctccttactgttgctgaagcagggctgattatgagctagcctaactgctggaaaaatgcagcttcatgctagaagaattagggacatggcccagtccattcatcttccctaatcgagttcttgggaaatacacacgtagattagcccctaacaatgacccccggctgattgcttggagtaccctccaccgtgcccacaatggtactgactagctctttatgtcctgcacaaaggaagccccaactcccccttgtcctcctctgccctgtctcccccacccccatcaccaccacccctgccctcgccagtggctgttgaagtcttttctgcttttttccccagactctgaaacaaacagtaaataaaagctaacctcacctggacttattaggaggagctgggcagttccagaggaattaactttggaaaacaaggccataaaccccttagcagcgtgtgggcaggagcttaaggaaacgctgccaatctttgtttagcggtgattatcgagatcaatttaatattggggaagtttgcataaaaagcattctcggtcagagggggaacaacaaataccaattaattatccccacagctgccctctgatcaccaccacctcagcacgtcagccacctggtctatgtcactggcagtcagaccttttcgggtgccaccaggccatttgtgggccctggaaaggtggaggaggggcggaggaggaggcaaaacctggtctgtcaggggactttccagagggtttgttaatttgccctggatgccggtacccaaagcccactctctataggctctgactttatttcttctgggagctaaactgcttctacctccgcctcttagatgcagaatccagtctcagggaaggattaaagacagactgcaggctaagatgggctttgattcttttcaaaaagatcacacactacaataataattacaaatgagctgcaggcagaaaacactggacaaggagtcagtggcctgagttctagtcctgacccttccacttaatagctgtatcactttgagcctcagtttcctcttctgtaaaatggggaccaatatgtctgtcctgctcacctcacaaggttgtgaagatcagatgacatgaagaatgtgagaagattctgaaacctacaaagtgacatgtcgagagaattgcttgagcccaggagttccaggctgcagtgagccaccatcatgccactgcactccagcctgggcaacagagagggaccctgtctctaaaataaacagacaaataaataataagtaaataaagtaa

SEQ ID NO: 122004 - DNA, 3079 bp, Homo sapiens
  Payload ID: 3917
  Gene Symbol: COG1
  Gene Name: component of oligomeric golgi complex 1
  Uniprot ID: Q8WTW3
  ENST ID: ENST00000299886
  CDS Start-End: 81-3023
gcttccgcccccaacgaagatggcggagggggcgggactaaaagggcgtaggtagatcgccgggggctgacgagtgcaccatggccaccgcggcaacctcacccgcgctgaagcggctggatctgcgcgaccctgcggctcttttcgagacgcatggagcggaggagatccgcgggctggagcgccaggttcgggccgagatcgagcacaagaaggaggagctgcggcagatggtgggcgaacggtaccgcgacctgatcgaggcggccgacaccatcggccagatgcgccgctgcgccgtggggctagtggacgccgtgaaggccaccgaccagtactgcgcccgcctccgccaggccggctcggccgcgccccggccaccgcgggcccagcagccacagcagccatcccaggagaagttctacagcatggctgcccagatcaagctactcttagaaattccggagaagatctggagctcgatggaagcctctcagtgtctccacgccacacagctctacctgctctgctgccacctccacagcctgctccagctggattcttctagttcccgatacagtcccgtcctctcccggtttcctatactcatccggcaggtggcagccgccagccacttccggtcaactattctgcatgaaagcaagatgttgctcaaatgccaaggtgtgtctgaccaagctgtggccgaggccctgtgctctataatgctcttagaagagagttctcctcgccaagccctcacagacttcctgctggccagaaaggcaactattcagaaacttctcaaccagccacaccatggtgctggtatcaaggctcagatttgctcattagtggagttgctggccaccactctgaagcaagctcatgcccttttctacactttgccagaaggactgctgccagatccagccctgccatgtggcttgctcttctctactctggagaccatcacaggccagcatcctgccggaaagggcactggtgtcctgcaggaagagatgaaactctgcagctggtttaaacacctgccagcatccatcgtcgagttccagccaacactccgaacccttgcacatcccatcagtcaggaatacctgaaagacacgctgcagaaatggatccacatgtgtaatgaagacattaaaaatgggatcaccaacctgctcatgtacgtgaagagcatgaagggtctcgcgggaatccgggacgccatgtgggagttacttaccaatgagtccaccaatcacagctgggatgtgctatgtcggcggcttctggagaagccgctcttgttctgggaagatatgatgcagcaactgttccttgaccgattacagactctgacaaaagaaggctttgactccatctccagtagctccaaggagctcttggtttcagctttgcaggaacttgaaagcagcaccagcaactccccttcaaataagcacatccactttgagtacaacatgtcgctcttcctctggtctgagagtcctaatgacctgccttccgatgcggcctgggtcagcgtggcaaaccggggtcagtttgccagtagcggcctctccatgaaagcacaagccatcagcccttgtgtacagaacttctgttctgccctggattctaagctgaaggttaaactagatgacctcctggcttacctcccctctgatgactcatcactgcccaaggacgtttctcccacacaggccaagagttctgcctttgacagatacgcagatgcggggaccgtgcaggagatgctgcggactcagtccgtggcatgcatcaagcacatcgtggactgcatccgggcagagctacagagcattgaagagggtgtgcaagggcaacaggatgccctcaacagtgccaagctgcactcagttcttttcatggccagactctgccagtccctgggagagctgtgcccccatctgaagcagtgcatcctgggaaaatcagagagctcagagaaaccagcaagggagtttagggctctgagaaaacagggaaaggtgaaaactcaggaaatcattcctacacaggccaagtggcaagaggttaaagaagtactcctccagcagagcgtgatgggctaccaggtctggagcagtgcagttgtgaaagttttgattcatggattcacccagtcattacttctagatgatgctggctcagttctggccacagccaccagctgggatgagctagaaattcaggaggaggcagagtctggcagcagtgtcacatccaagatccgactccctgcacagccgtcctggtatgtacagtccttcctgtttagtttatgccaggaaattaatcgggttggaggccatgccttgccaaaggtgacattacaggagatgctgaaaagctgtatggttcaagtagtagctgcctatgagaaactctccgaagaaaaacagattaagaaagaaggtgcatttccagtcacccagaaccgggcgctgcagctgctttatgatctgcgttacctcaacattgttctgacagccaagggtgacgaggtgaagagtggccggagcaagccagactccagaattgagaaagtgactgaccacctggaagccctcattgatccatttgacctggacgttttcacgccacacctcaacagcaaccttcatcgcctggtgcagcgaacttctgttctgtttggattggtgactggtacagagaatcagctcgccccccggagcagtacgttcaactcccaagaaccccataacatcctgccactggcatccagtcagatcaggtttggacttctcccactgagcatgacaagcactcgaaaggctaaatcaaccagaaacatcgaaacaaaagctcaggttgtccccccggcacgctccacagctggtgacccgacagttcctggctccttgttcagacagcttgtcagtgaagaagacaacacgtctgcaccttcattattcaaacttggctggctctctagtatgactaagtaacatggcaacacatctgtctctccctaaataaatactaccacattatttcttctaaa

SEQ ID NO: 122005 - DNA, 4051 bp, Homo sapiens
  Payload ID: 3917
  Gene Symbol: COG1
  Gene Name: component of oligomeric golgi complex 1
  ENST ID: ENST00000438720
  CDS Start-End: 1-2887
ggccaccgcggcaacctcacccgcgctgaagcggctggatctgcgcgaccctgcggctcttttcgagacgcatggagcggaggagatccgcgggctggagcgccaggttcgggccgagatcgagcacaagaaggaggagctgcggcagatggtgggcgaacggtaccgcgacctgatcgaggcggccgacaccatcggccagatgcgccgctgcgccgtggggctagtggacgccgtgaaggccaccgaccagtactgcgcccgcctccgccaggccggctcggccgcgccccggccaccgcgggcccagcagccacagcagccatcccaggagaagttctacagcatggctgcccagatcaagctactcttagaaattccggagaagatctggagctcgatggaagcctctcagtgtctccacgccacacagctctacctgctctgctgccacctccacagcctgctccagctggattcttctagttcccgatacagtcccgtcctctcccggtttcctatactcatccggcaggtggcagccgccagccacttccggtcaactattctgcatgaaagcaagatgttgctcaaatgccaaggtgtgtctgaccaagctgtggccgaggccctgtgctctataatgctcttagaagagagttctcctcgccaagccctcacagacttcctgctggccagaaaggcaactattcagaaacttctcaaccagccacaccatggtgctggtatcaaggctcagatttgctcattagtggagttgctggccaccactctgaagcaagctcatgcccttttctacactttgccagaaggactgctgccagatccagccctgccatgtggcttgctcttctctactctggagaccatcacaggccagcatcctgccggaaagggcactggtgtcctgcaggaagagatgaaactctgcagctggtttaaacacctgccagcatccatcgtcgagttccagccaacactccgaacccttgcacatcccatcagtcaggaatacctgaaagacacgctgcagaaatggatccacatgtgtaatgaagacattaaaaatgggatcaccaacctgctcatgtacgtgaagagcatgaagggtctcgcgggaatccgggacgccatgtgggagttacttaccaatgagtccaccaatcacagctgggatgtgctatgtcggcggcttctggagaagccgctcttgttctgggaagatatgatgcagcaactgttccttgaccgattacagactctgacaaaagaaggctttgactccatctccagtagctccaaggagctcttggtttcagctttgcaggaacttgaaagcagcaccagcaactccccttcaaataagcacatccactttgagtacaacatgtcgctcttcctctggtctgagagtcctaatgacctgccttccgatgcggcctgggtcagcgtggcaaaccggggtcagtttgccagtagcggcctctccatgaaagcacaagccatcagcccttgtgtacagaacttctgttctgccctggattctaagctgaaggttaaactagatgacctcctggcttacctcccctctgatgactcatcactgcccaaggacgtttctcccacacaggccaagagttctgcctttgacagatacgcagatgcggggaccgtgcaggagatgctgcggactcagtccgtggcatgcatcaagcacatcgtggactgcatccgggcagagctacagagcattgaagagggtgtgcaagggcaacaggatgccctcaacagtgccaagctgcactcagttcttttcatggccagactctgccagtccctgggagagctgtgcccccatctgaagcagtgcatcctgggaaaatcagagagctcagagaaaccagcaagggagtttagggctctgagaaaacagggaaaggtgaaaactcaggaaatcattcctacacaggccaagtggcaagaggttaaagaagtactcctccagcagagcgtgatgggctaccaggtctggagcagtgcagttgtgaaagttttgattcatggattcacccagtcattacttctagatgatgctggctcagttctggccacagccaccagctgggatgagctagaaattcaggaggaggcagagtctggcagcagtgtcacatccaagatccgactccctgcacagccgtcctggtatgtacagtccttcctgtttagtttatgccaggaaattaatcgggttggaggccatgccttgccaaaggtgacattacaggagatgctgaaaagctgtatggttcaagtagtagctgcctatgagaaactctccgaagaaaaacagattaagaaagaaggtgcatttccagtcacccagaaccgggcgctgcagctgctttatgatctgcgttacctcaacattgttctgacagccaagggtgacgaggtgaagagtggccggagcaagccagactccagaattgagaaagtgactgaccacctggaagccctcattgatccatttgacctggacgttttcacgccacacctcaacagcaaccttcatcgcctggtgcagcgaacttctgttctgtttggattggtgactggtacagagaatcagctcgccccccggagcagtacgttcaactcccaagaaccccataacatcctgccactggcatccagtcagatcaggtttggacttctcccactgagcatgacaagcactcgaaaggctaaatcaaccagaaacatcgaaacaaaagctcaggttggtgccaagagcaagaggctcatccgtggatgggtccccacctcccaccgagccacccatgatcagctcccttttaaataactgattaagaactgaatgacaaaatgcactaatgctgcttttaatggcggcgcaatagagaagtacaaggttttactagcttgagctactagaaggtgtaaaagatgcccgctgacactaccaagtagcctcttaatagaaatgtagaaaatatacaggacagggtggagatgagctcttgaatttagtagggtgaaagagttaactgccaacccggcactatcattgtacttgtttggagaaaatctgttttgttctggtgatgatggttttatcttcccttttagttgggtgggaagtaacagaaaatttgtttccccaaaagtttgacattttcttgttaatacacgtttcatttcagtacgatgccaactgttaagcctgcaggaatcctcctgggtatttctgaattgtgctgtgtgcatgtgtgtttgaaagctcaaacagcttgtcttcttacagcatcgagttgtttgctttattgttagacacaatattagcagtgtatcctttccgtattccctaccatcgaacccattaagatctaaaatccttgtcaagtatctggctttaaaagttgggagatggtagtttaaaaaaaaaaaaagctcttgcaaaaaccatccagtccctaagcatgggctatgttgcagcctcttccagaacagtttccactgcagtgatctttcagttctgcccacattaggttagcaggctgtggagagaagtgcctgtgtctacccttttcccaagacagtcctcatttccaaattctagttttgtcacaaaggctcatgctgttccgtgtcctcttcaaatctggaccgacagcaaagtcctctgactagagccatcgtgcttctcagctccgcttgtgtgtgccgtgtggactccgagtggcgtcgcgcggagggcgagtgggcaggagggctcaggccaactctaaggcacttttctctacatccaatggcaggttgtccccccggcacgctccacagctggtgacccgacagttcctggctccttgttcagacagcttgtcagtgaagaagacaacacgtctgcaccttcattattcaaacttggctggctctctagtatgactaagtaacatggcaacacatctgtctctccctaaataaatactaccacattatttcttct

SEQ ID NO: 122006 - DNA, 739 bp, Homo sapiens
  Payload ID: 3917
  Gene Symbol: COG1
  Gene Name: component of oligomeric golgi complex 1
  ENST ID: ENST00000582587
  CDS Start-End: 1-373
cgcgctgaagcggctggatctgcgcgaccctgcggctcttttcgagacgcatggagcggaggagatccgcgggctggagcgccaggttcgggccgagatcgagcacaagaaggaggagctgcggcagatggtgggcgaacggtaccgcgacctgatcgaggcggccgacaccatcggccagatgcgccgctgcgccgtggggctagtggacgccgtgaaggccaccgaccagtactgcgcccgcctccgccaggccggctcggccgcgccccggccaccgcgggcccagcagttctgtgccttcccctgcagccacagcagccatcccaggagaagttctacagcatggctgcccagatcaagctactcttagaaattccggagaagatctggagctcgatggaagcctctcagtgtctccacgccacacagctctacctgctctgctgccacctccacagcctgctccagctggattcttctagttcccgatacagtcccgtcctctcccggtttcctatactcatccggcaggtggcagccgccagccacttccggtcaactattctgcatgaaagcaagatgttgctcaaatgccaaggtgtgtctgaccaagctgtggccgaggccctgtgctctataatgctcttagaagagagttctcctcgccaagccctcacagacttcctgctggccagaaaggcaactattcagaaacttctcaaccagccacaccatg

SEQ ID NO: 122007 - DNA, 438 bp, Homo sapiens
  Payload ID: 3917
  Gene Symbol: COG1
  Gene Name: component of oligomeric golgi complex 1
  ENST ID: ENST00000582973
  CDS Start-End: 1-81
cagctcgccccccggagcagtacgttcaactcccaagaaccccataacatcctgccactggcatccagtcagatcaggtaaaggctgccaagaggcttctgcggggcacttcgggaggccaaggtggacggatcacgtcaggagatcgagaccatcctggctaacatggtttggacttctcccactgagcatgacaagcactcgaaaggctaaatcaaccagaaacatcgaaacaaaagctcaggttgtccccccggcacgctccacagctggtgacccgacagttcctggctccttgttcagacagcttgtcagtgaagaagacaacacgtctgcaccttcattattcaaacttggctggctctctagtatgactaagtaacatggcaacacatctgtctctccctaaataaatactaccacattatttcttctaaa

SEQ ID NO: 122008 - DNA, 520 bp, Homo sapiens
  Payload ID: 3917
  Gene Symbol: COG1
  Gene Name: component of oligomeric golgi complex 1
  ENST ID: ENST00000582672
  CDS Start-End: 1-308
agaaagtgactgaccacctggaagccctcattgatccatttgacctggacgttttcacgccacacctcaacagcaaccttcatcgcctggtgcagcgaacttctgttctgtttggattggtgactggtacagagaatcagctcgccccccggagcagtacgttcaactcccaagaaccccataacatcctgccactggcatccagtcagatcaggtttggacttctcccactgagcatgacaagcactcgaaaggctaaatcaaccagaaacatcgaaacaaaagctcagtacgatgccaactgttaagcctgcaggaatcctcctgggtatttctgaattgtgctgtgtgcatgtgtgtttgaaagctcaaacagcttgtcttcttacagcatcgagttgtttgctttattgttagacacaatattagcagtgtatcctttccgtattccctaccatcgaacccattaagatctaaaatccttgtcaagtatctggctttaaaagttgggagatggtag

SEQ ID NO: 122009 - DNA, 506 bp, Homo sapiens
  Payload ID: 3917
  Gene Symbol: COG1
  Gene Name: component of oligomeric golgi complex 1
  ENST ID: ENST00000582512
  CDS Start-End: 1-379
cctcaacattgttctgacagccaagggtgacgaggtgaagagtggccggagcaagccagactccagaattgagaaagtgactgaccacctggaagccctcattgatccatttgacctggacgttttcacgccacacctcaacagcaaccttcatcgcctggtgcagcgaacttctgttctgtttggattggtgactggtacagagaatcagctcgccccccggagcagtacgttcaactcccaagaaccccataacatcctgccactggcatccagtcagatcaggtttggacttctcccactgagcatgacaagcactcgaaaggctaaatcaaccagaaacatcgaaacaaaagctcagtacgatgccaactgttaagcctgcaggaatcctcctgggttgtccccccggcacgctccacagctggtgacccgacagttcctggctccttgttcagacagcttgtcagtgaagaagacaacacgtctgcaccttcattattcaa

SEQ ID NO: 122010 - DNA, 3369 bp, Homo sapiens
  Payload ID: 3917
  Gene Symbol: COG1
  Gene Name: component of oligomeric golgi complex 1
  ENST ID: ENST00000618996
  CDS Start-End: 337-3159
gcggctgcgcctgcgccaacgccgtcagtccgcggggcccgatcccgacacctaactccacagagaagctctgctcctaagggaaagggaagacttcagccacagtttcgcagccaacctggcgacctcacctctctggcgacctcacttcccagccggctccgtttaagaaaaccccgcgcaggaccgcgcccgcccccgccccctcgcgcccgccccctcgggtaacaaacatggcccccggcggggcggaagcgcttccgcccccaacgaagatggcggagggggcgggactaaaagggcgtaggtagatcgccgggggctgacgagtgcaccatggccaccgcggcaacctcacccgcgctgaagcggctggatctgcgcgaccctgcggctcttttcgagacgcatggagcggaggagatccgcgggctggagcgccaggttcgggccgagatcgagcacaagaaggaggagctgcggcagatggtgggcgaacggtaccgcgacctgatcgaggcggccgacaccatcggccagatgcgccgctgcgccgtggggctagtggacgccgtgaaggccaccgaccagtactgcgcccgcctccgccaggccggctcggccgcgccccggccaccgcgggcccagcagccacagcagccatcccaggagaagttctacagcatggctgcccagatcaagctactcttagaaattccggagaagatctggagctcgatggaagcctctcagtgtctccacgccacacagctctacctgctctgctgccacctccacagcctgctccagctggattcttctagttcccgatacagtcccgtcctctcccggtttcctatactcatccggcaggtggcagccgccagccacttccggtcaactattctgcatgaaagcaagatgttgctcaaatgccaaggtgtgtctgaccaagctgtggccgaggccctgtgctctataatgctcttagaagagagttctcctcgccaagccctcacagacttcctgctggccagaaaggcaactattcagaaacttctcaaccagccacaccatggtgctggtatcaaggctcagatttgctcattagtggagttgctggccaccactctgaagcaagctcatgcccttttctacactttgccagaaggactgctgccagatccagccctgccatgtggcttgctcttctctactctggagaccatcacaggccagcatcctgccggaaagggcactggtgtcctgcaggaagagatgaaactctgcagctggtttaaacacctgccagcatccatcgtcgagttccagccaacactccgaacccttgcacatcccatcagtcaggaatacctgaaagacacgctgcagaaatggatccacatgtgtaatgaagacattaaaaatgggatcaccaacctgctcatgtacgtgaagagcatgaagggtctcgcgggaatccgggacgccatgtgggagttacttaccaatgagtccaccaatcacagctgggatgtgctatgtcggcggcttctggagaagccgctcttgttctgggaagatatgatgcagcaactgttccttgaccgattacagactctgacaaaagaaggctttgactccatctccagtagctccaaggagctcttggtttcagctttgcaggaacttgaaagcagcaccagcaactccccttcaaataagcacatccactttgagtacaacatgtcgctcttcctctggtctgagagtcctaatgacctgccttccgatgcggcctgggtcagcgtggcaaaccggggtcagtttgccagtagcggcctctccatgaaagcacaagccatcagcccttgtgtacagaacttctgttctgccctggattctaagctgaaggttaaactagatgacctcctggcttacctcccctctgatgactcatcactgcccaaggacgtttctcccacacaggccaagagttctgcctttgacagatacgcagatgcggggaccgtgcaggagatgctgcggactcagtccgtggcatgcatcaagcacatcgtggactgcatccgggcagagctacagagcattgaagagggtgtgcaagggcaacaggatgccctcaacagtgccaagctgcactcagttcttttcatggccagactctgccagtccctgggagagctgtgcccccatctgaagcagtgcatcctgggaaaatcagagagctcagagaaaccagcaagggagtttagggctctgagaaaacagggaaaggtgaaaactcaggaaatcattcctacacaggccaagtggcaagaggttaaagaagtactcctccagcagagcgtgatgggctaccaggtctggagcagtgcagttgtgaaagttttgattcatggattcacccagtcattacttctagatgatgctggctcagttctggccacagccaccagctgggatgagctagaaattcaggaggaggcagagtctggcagcagtgtcacatccaagatccgactccctgcacagccgtcctggtatgtacagtccttcctgtttagtttatgccaggaaattaatcgggttggaggccatgccttgccaaaggtgacattacaggagatgctgaaaagctgtatggttcaagtagtagctgcctatgagaaactctccgaagaaaaacagattaagaaagaaggtgcatttccagtcacccagaaccgggcgctgcagctgctttatgatctgcgttacctcaacattgttctgacagccaagggtgacgaggtgaagagtggccggagcaagccagactccagaattgagaaagtgactgaccacctggaagccctcattgatccatttgacctggacgttttcacgccacacctcaacagcaaccttcatcgcctggtgcagcgaacttctgttctgtttggattggtgactggtacagagaatcagctcgccccccggagcagtacgttcaactcccaagaaccccataacatcctgccactggcatccagtcagatcaggtttggacttctcccactgagcatgacaagcactcgaaaggctaaatcaaccagaaacatcgaaacaaaagctcagtacgatgccaactgttaagcctgcaggaatcctcctgggttgtccccccggcacgctccacagctggtgacccgacagttcctggctccttgttcagacagcttgtcagtgaagaagacaacacgtctgcaccttcattattcaaacttggctggctctctagtatgactaagtaacatggcaacacatctgtctctccctaaataaatactaccacattatttcttc

SEQ ID NO: 122011 - DNA, 2843 bp, Homo sapiens
  Payload ID: 3918
  Gene Symbol: COG2
  Gene Name: component of oligomeric golgi complex 2
  Uniprot ID: Q14746
  ENST ID: ENST00000366668
  CDS Start-End: 41-2254
ctcgcttggatcttggcactgagaggcggtggccggcgggatggagaaaagtaggatgaacctgcccaaggggccggacacgctctgcttcgacaaggacgagttcatgaaggaagatttcgatgtcgatcattttgtgtctgactgtaggaagcgggtccagctggaagaactgagagatgacctggagctctactataaacttcttaaaacagccatggtcgaactcatcaacaaggattatgcagattttgtcaatctttcaacaaacttggttggcatggacaaagccctcaaccagctttctgtgcctttgggacaattacgagaagaggttctgagccttagatcgtctgtcagtgaaggaattcgggcagttgatgaacgaatgtctaaacaagaggacattaggaaaaaaaagatgtgtgtattgaggcttatacaagttattcggtcagttgagaaaattgaaaaaatcttaaactctcaaagttctaaagaaacctctgcactagaagcaagcagcccccttttgactggacaaattttggagagaattgccacagaatttaatcagttacagtttcatgctgttcaaagcaaaggcatgcctcttttggacaaagtaagaccgcgtatagctggcattacagccatgttacagcagtcactggaaggtctcctattagaaggccttcagacgtctgacgtcgatataatacggcactgcttgcggacttacgccacgattgacaagacacgggacgcggaggccttagttggccaagtactagtgaaaccatacatagacgaggtgattatagagcagtttgttgaatctcatcccaatggccttcaggtcatgtataataaactcctggagtttgttcctcaccattgccgccttcttcgagaagtcacaggaggtgccatctccagtgaaaaaggcaatactgttcctggatatgactttttggtgaattctgtttggccacaaatagtacaaggattagaagaaaagttaccctcgctttttaatcctgggaatcccgatgcatttcatgagaaatataccataagtatggattttgtcagaagattggaacggcagtgtggatcacaggctagtgtaaagagattaagagcccatcctgcctatcacagcttcaataagaagtggaacttgcctgtttattttcaaataagatttagagaaatagcgggatccttagaagcagcacttacagatgtcctggaagatgccccagctgaaagtccgtattgccttttggcttctcatagaacttggagcagccttaggaggtgttggtcagatgagatgttcttgccattactggtgcatcgcctgtggagactcactctgcagattttggcacgatactctgtgtttgtcaatgagctttcactcaggcccatttctaatgaaagtcccaaggagatcaagaaacctttggtaactggtagcaaagaaccttccatcacccaaggaaacactgaagaccaaggaagtggtccttcggaaacaaagcctgtggtttccatttcccgcactcagctcgtgtatgtggttgcagacctggacaagcttcaggagcagcttccagaactcttggaaataatcaagccaaaacttgaaatgattggctttaagaatttttcttctatctcagccctggaggactcccagagctctttttcagcctgtgtgccctccttgagtagcaagatcatccaggatttaagtgactcttgcttcggtttcctaaaaagcgccctggaggttcccaggctttaccgaagaaccaataaggaggtcccaaccacagcttcctcctatgtggacagtgctctgaagcccttattccagcttcagagcggacacaaggataagctcaaacaagcaataattcagcagtggctagaaggcactctcagtgaaagcactcataagtactatgaaaccgtgtcagatgtattaaactctgtgaagaagatggaagagagcctgaaaaggctgaaacaagccagaaaaaccactcccgccaaccccgtcggtcccagtggtggcatgagcgacgacgacaaaatcaggctgcagttggccctagatgttgagtacttgggagagcagatacaaaagttgggactacaagcaagtgacataaaaagcttctcagctctcgcagagcttgttgctgctgccaaggaccaggcaacagcagagcagccttaagcatcttggaagatcccgaggttagattcttaagcaagagaagagttggacttccaggctgaaggggagaaagtgactctgttctcttagcaaccgtctgtagcaaagaagtgcttccagcatcactccagcaacacgcccatgcgtcttctctcagcgtatttgggtcttctttgcccaaaagaacacaaaagcctttttccattgtatggaagatagtttttaagacatttgaaactttctactatagtttacagaacaaattattttatttttattgtaaatcttagtgtggaagagctgatttctaaaatatgattaaagtaaatatatacctatgaatatcaagagtcgtctccctgagcctgtagttggaagtgacgactgtaatggaatgatgtcttgtatagaaatgcccttctctgaaataaagagaactcctgggctttctaaagaggctgcgggaagccatcctccactcccactgtgtgtgagagcagtgcttctgatcctgctgtcaccccgacctctggcaggagccggcgccagtaggaaagacctccttcctaaataaaagaagtgtctccca

SEQ ID NO: 122012 - DNA, 2921 bp, Homo sapiens
  Payload ID: 3918
  Gene Symbol: COG2
  Gene Name: component of oligomeric golgi complex 2
  Uniprot ID: Q14746
  ENST ID: ENST00000366669
  CDS Start-End: 116-2332
agcggacccccctgtgccgtggaaactggcggtggccgcggccgccgagtcggtctgcgcagcctcctgcgttttctcgcttggatcttggcactgagaggcggtggccggcgggatggagaaaagtaggatgaacctgcccaaggggccggacacgctctgcttcgacaaggacgagttcatgaaggaagatttcgatgtcgatcattttgtgtctgactgtaggaagcgggtccagctggaagaactgagagatgacctggagctctactataaacttcttaaaacagccatggtcgaactcatcaacaaggattatgcagattttgtcaatctttcaacaaacttggttggcatggacaaagccctcaaccagctttctgtgcctttgggacaattacgagaagaggttctgagccttagatcgtctgtcagtgaaggaattcgggcagttgatgaacgaatgtctaaacaagaggacattaggaaaaaaaagatgtgtgtattgaggcttatacaagttattcggtcagttgagaaaattgaaaaaatcttaaactctcaaagttctaaagaaacctctgcactagaagcaagcagcccccttttgactggacaaattttggagagaattgccacagaatttaatcagttacagtttcatgctgttcaaagcaaaggcatgcctcttttggacaaagtaagaccgcgtatagctggcattacagccatgttacagcagtcactggaaggtctcctattagaaggccttcagacgtctgacgtcgatataatacggcactgcttgcggacttacgccacgattgacaagacacgggacgcggaggccttagttggccaagtactagtgaaaccatacatagacgaggtgattatagagcagtttgttgaatctcatcccaatggccttcaggtcatgtataataaactcctggagtttgttcctcaccattgccgccttcttcgagaagtcacaggaggtgccatctccagtgaaaaaggcaatactgttcctggatatgactttttggtgaattctgtttggccacaaatagtacaaggattagaagaaaagttaccctcgctttttaatcctgggaatcccgatgcatttcatgagaaatataccataagtatggattttgtcagaagattggaacggcagtgtggatcacaggctagtgtaaagagattaagagcccatcctgcctatcacagcttcaataagaagtggaacttgcctgtttattttcaaataagatttagagaaatagcgggatccttagaagcagcacttacagatgtcctggaagatgccccagctgaaagtccgtattgccttttggcttctcatagaacttggagcagccttaggaggtgttggtcagatgagatgttcttgccattactggtgcatcgcctgtggagactcactctgcagattttggcacgatactctgtgtttgtcaatgagctttcactcaggcccatttctaatgaaagtcccaaggagatcaagaaacctttggtaactggtagcaaagaaccttccatcacccaaggaaacactgaagaccaaggaagtggtccttcggaaacaaagcctgtggtttccatttcccgcactcagctcgtgtatgtggttgcagacctggacaagcttcaggagcagcttccagaactcttggaaataatcaagccaaaacttgaaatgattggctttaagaatttttcttctatctcagcagccctggaggactcccagagctctttttcagcctgtgtgccctccttgagtagcaagatcatccaggatttaagtgactcttgcttcggtttcctaaaaagcgccctggaggttcccaggctttaccgaagaaccaataaggaggtcccaaccacagcttcctcctatgtggacagtgctctgaagcccttattccagcttcagagcggacacaaggataagctcaaacaagcaataattcagcagtggctagaaggcactctcagtgaaagcactcataagtactatgaaaccgtgtcagatgtattaaactctgtgaagaagatggaagagagcctgaaaaggctgaaacaagccagaaaaaccactcccgccaaccccgtcggtcccagtggtggcatgagcgacgacgacaaaatcaggctgcagttggccctagatgttgagtacttgggagagcagatacaaaagttgggactacaagcaagtgacataaaaagcttctcagctctcgcagagcttgttgctgctgccaaggaccaggcaacagcagagcagccttaagcatcttggaagatcccgaggttagattcttaagcaagagaagagttggacttccaggctgaaggggagaaagtgactctgttctcttagcaaccgtctgtagcaaagaagtgcttccagcatcactccagcaacacgcccatgcgtcttctctcagcgtatttgggtcttctttgcccaaaagaacacaaaagcctttttccattgtatggaagatagtttttaagacatttgaaactttctactatagtttacagaacaaattattttatttttattgtaaatcttagtgtggaagagctgatttctaaaatatgattaaagtaaatatatacctatgaatatcaagagtcgtctccctgagcctgtagttggaagtgacgactgtaatggaatgatgtcttgtatagaaatgcccttctctgaaataaagagaactcctgggctttctaaagaggctgcgggaagccatcctccactcccactgtgtgtgagagcagtgcttctgatcctgctgtcaccccgacctctggcaggagccggcgccagtaggaaagacctccttcctaaataaaagaagtgtctccca

SEQ ID NO: 122013 - DNA, 2963 bp, Homo sapiens
  Payload ID: 3918
  Gene Symbol: COG2
  Gene Name: component of oligomeric golgi complex 2
  ENST ID: ENST00000534989
  CDS Start-End: 336-2375
gcacttcgcaatgagtcttttggcgtcaggtttggcgggtgcagcctggagaaagcacttctgtaaaatcgtgcgtgttacatggaaaggcctgaaagttctgggcaagtggttttgagctgcatgtcaaagccactgttacccgttcctgttaccatgcagtgcagtcagattgccagtccccttgtcggaaagaagcttgtggaccggggccttggagctcattaagtgaagatttcgatgtcgatcattttgtgtctgactgtaggaagcgggtccagctggaagaactgagagatgacctggagctctactataaacttcttaaaacagccatggtcgaactcatcaacaaggattatgcagattttgtcaatctttcaacaaacttggttggcatggacaaagccctcaaccagctttctgtgcctttgggacaattacgagaagaggttctgagccttagatcgtctgtcagtgaaggaattcgggcagttgatgaacgaatgtctaaacaagaggacattaggaaaaaaaagatgtgtgtattgaggcttatacaagttattcggtcagttgagaaaattgaaaaaatcttaaactctcaaagttctaaagaaacctctgcactagaagcaagcagcccccttttgactggacaaattttggagagaattgccacagaatttaatcagttacagtttcatgctgttcaaagcaaaggcatgcctcttttggacaaagtaagaccgcgtatagctggcattacagccatgttacagcagtcactggaaggtctcctattagaaggccttcagacgtctgacgtcgatataatacggcactgcttgcggacttacgccacgattgacaagacacgggacgcggaggccttagttggccaagtactagtgaaaccatacatagacgaggtgattatagagcagtttgttgaatctcatcccaatggccttcaggtcatgtataataaactcctggagtttgttcctcaccattgccgccttcttcgagaagtcacaggaggtgccatctccagtgaaaaaggcaatactgttcctggatatgactttttggtgaattctgtttggccacaaatagtacaaggattagaagaaaagttaccctcgctttttaatcctgggaatcccgatgcatttcatgagaaatataccataagtatggattttgtcagaagattggaacggcagtgtggatcacaggctagtgtaaagagattaagagcccatcctgcctatcacagcttcaataagaagtggaacttgcctgtttattttcaaataagatttagagaaatagcgggatccttagaagcagcacttacagatgtcctggaagatgccccagctgaaagtccgtattgccttttggcttctcatagaacttggagcagccttaggaggtgttggtcagatgagatgttcttgccattactggtgcatcgcctgtggagactcactctgcagattttggcacgatactctgtgtttgtcaatgagctttcactcaggcccatttctaatgaaagtcccaaggagatcaagaaacctttggtaactggtagcaaagaaccttccatcacccaaggaaacactgaagaccaaggaagtggtccttcggaaacaaagcctgtggtttccatttcccgcactcagctcgtgtatgtggttgcagacctggacaagcttcaggagcagcttccagaactcttggaaataatcaagccaaaacttgaaatgattggctttaagaatttttcttctatctcagcagccctggaggactcccagagctctttttcagcctgtgtgccctccttgagtagcaagatcatccaggatttaagtgactcttgcttcggtttcctaaaaagcgccctggaggttcccaggctttaccgaagaaccaataaggaggtcccaaccacagcttcctcctatgtggacagtgctctgaagcccttattccagcttcagagcggacacaaggataagctcaaacaagcaataattcagcagtggctagaaggcactctcagtgaaagcactcataagtactatgaaaccgtgtcagatgtattaaactctgtgaagaagatggaagagagcctgaaaaggctgaaacaagccagaaaaaccactcccgccaaccccgtcggtcccagtggtggcatgagcgacgacgacaaaatcaggctgcagttggccctagatgttgagtacttgggagagcagatacaaaagttgggactacaagcaagtgacataaaaagcttctcagctctcgcagagcttgttgctgctgccaaggaccaggcaacagcagagcagccttaagcatcttggaagatcccgaggttagattcttaagcaagagaagagttggacttccaggctgaaggggagaaagtgactctgttctcttagcaaccgtctgtagcaaagaagtgcttccagcatcactccagcaacacgcccatgcgtcttctctcagcgtatttgggtcttctttgcccaaaagaacacaaaagcctttttccattgtatggaagatagtttttaagacatttgaaactttctactatagtttacagaacaaattattttatttttattgtaaatcttagtgtggaagagctgatttctaaaatatgattaaagtaaatatatacctatgaatatcaagagtcgtctccctgagcctgtagttggaagtgacgactgtaatggaatgatgtcttgtatagaaatgcccttctctgaaataaagagaactcctgggctttctaaagaggctgcgggaagccatcctccactcccactgtgtgtgagagcagtgcttctgatcctgctgtcaccccgacctctggcaggagccggcgccagtaggaaagacctccttcctaaataaaagaagtgtctccc

SEQ ID NO: 122014 - DNA, 2784 bp, Homo sapiens
  Payload ID: 3918
  Gene Symbol: COG2
  Gene Name: component of oligomeric golgi complex 2
  ENST ID: ENST00000468893
  CDS Start-End: 103-477
gtgccgtggaaactggcggtggccgcggccgccgagtcggtctgcgcagcctcctgcgttttctcgcttggatcttggcactgagaggcggtggccggcgggatggagaaaagtaggatgaacctgcccaaggggccggacacgctctgcttcgacaaggacgagttcatgaaggaagatttcgatgtcgatcattttgtgtctgactgtaggaagcgggtccagctggaagaactgagagatgacctggagctctactataaacttcttaaaacagccatggtcgaactcatcaacaaggattatgcagattttgtcaatctttcaacaaacttggttggcatggacaaagccctcaaccagctttctgtgcctttgggacaattacgagaagaggttctgataatgtctgctgtgagttgggactccccatgtctaagccattggagacagggactccatccggatgaacagtagagaagggagttttggcatcattttcaacagaaaagtgtgctaccctgtcctgtccctgctggtccaccccacagtctgtgtcaggcaccccgacttccatgctgtcttaggattgatgaactgtcataaacttcgttgattgcaccattattacctgtagccttagatcgtctgtcagtgaaggaattcgggcagttgatgaacgaatgtctaaacaagaggacattaggaaaaaaaagatgtgtgtattgaggcttatacaagttattcggtcagttgagaaaattgaaaaaatcttaaactctcaaagttctaaagaaacctctgcactagaagcaagcagcccccttttgactggacaaattttggagagaattgccacagaatttaatcagttacagtttcatgctgttcaaagcaaaggcatgcctcttttggacaaagtaagaccgcgtatagctggcattacagccatgttacagcagtcactggaaggtctcctattagaaggccttcagacgtctgacgtcgatataatacggcactgcttgcggacttacgccacgattgacaagacacgggacgcggaggccttagttggccaagtactagtgaaaccatacatagacgaggtgattatagagcagtttgttgaatctcatcccaatggccttcaggtcatgtataataaactcctggagtttgttcctcaccattgccgccttcttcgagaagtcacaggaggtgccatctccagtgaaaaaggcaatactgttcctggatatgactttttggtgaattctgtttggccacaaatagtacaaggattagaagaaaagttaccctcgctttttaatcctgggaatcccgatgcatttcatgagaaatataccataagtatggattttgtcagaagattggaacggcagtgtggatcacaggctagtgtaaagagattaagagcccatcctgcctatcacagcttcaataagaagtggaacttgcctgtttattttcaaataagatttagagaaatagcgggatccttagaagcagcacttacagatgtcctggaagatgccccagctgaaagtccgtattgccttttggcttctcatagaacttggagcagccttaggaggtgttggtcagatgagatgttcttgccattactggtgcatcgcctgtggagactcactctgcagattttggcacgatactctgtgtttgtcaatgagctttcactcaggcccatttctaatgaaagtcccaaggagatcaagaaacctttggtaactggtagcaaagaaccttccatcacccaaggaaacactgaagaccaaggaagtggtccttcggaaacaaagcctgtggtttccatttcccgcactcagctcgtgtatgtggttgcagacctggacaagcttcaggagcagcttccagaactcttggaaataatcaagccaaaacttgaaatgattggctttaagaatttttcttctatctcagcagccctggaggactcccagagctctttttcagcctgtgtgccctccttgagtagcaagatcatccaggatttaagtgactcttgcttcggtttcctaaaaagcgccctggaggttcccaggctttaccgaagaaccaataaggaggtcccaaccacagcttcctcctatgtggacagtgctctgaagcccttattccagcttcagagcggacacaaggataagctcaaacaagcaataattcagcagtggctagaaggcactctcagtgaaagcactcataagtactatgaaaccgtgtcagatgtattaaactctgtgaagaagatggaagagagcctgaaaaggctgaaacaagccagaaaaaccactcccgccaaccccgtcggtcccagtggtggcatgagcgacgacgacaaaatcaggctgcagttggccctagatgttgagtacttgggagagcagatacaaaagttgggactacaagcaagtgacataaaaagcttctcagctctcgcagagcttgttgctgctgccaaggaccaggcaacagcagagcagccttaagcatcttggaagatcccgaggttagattcttaagcaagagaagagttggacttccaggctgaaggggagaaagtgactctgttctcttagcaaccgtctgtagcaaagaagtgcttccagcatcactccagcaacacgcccatgcgtcttctctcagcgtatttgggtcttctttgcccaaaagaacacaaaagcctttttccattgtatggaagatagtttttaagacatt

SEQ ID NO: 122015 - DNA, 4498 bp, Homo sapiens
  Payload ID: 3919
  Gene Symbol: COG3
  Gene Name: component of oligomeric golgi complex 3
  Uniprot ID: Q96JB2
  ENST ID: ENST00000349995
  CDS Start-End: 113-2599
gccccgccgccggtgcagtgttggaagctccggttctcccggaagtggcccaggtctctctgtcggggtcccctccatctcgctgctgctgaaggccgcgagggcggcggcgatggcggaggcggcgctgttgctgctgcctgaggcggcggcggagcgggacgctagggaaaagctggctctctgggatcggagaccggacacgacggcgccgctgaccgacaggcagacggactcggtattggagctgaaggcggcggcagagaacttgccggtgccagctgagcttccaattgaagacttgtgcagtttaacatcccagtcactgcccattgaactgacttcagtagtgcctgaatctacagaagacattctcttgaagggcttcacttccttaggaatggaagaagaaagaattgaaaccgcacagcagtttttctcatggtttgcaaagctgcaaactcagatggatcaagatgaaggaactaaatatagacagatgagggattacttgtctgggtttcaggagcagtgtgatgctatattgaatgatgtaaacagtgctcttcagcatctggagtctttgcagaaacagtatctttttgtgtccaataagacaggaaccctacatgaagcctgtgaacagctcctaaaagaacagtcggaacttgttgatctggctgaaaacattcaacaaaagctttcctattttaacgaattggaaactattaacacaaaattgaattcccctacattgtcggtgaatagtgacggatttatacctatgctggccaagttagatgattgtataacatatatctcatctcatcctaattttaaagattatcccatatatttgctgaagtttaaacagtgtctttctaaagctttgcacctcatgaagacatatactgtgaacacactacagaccctcacaagtcagttactgaaaagggatccttcatctgtacctaatgcagacaatgccttcacattattttatgtgaaatttcgagctgctgcccccaaagtcagaactcttattgaacaaatagaactgcggtctgaaaaaatacctgaataccaacaactgctaaatgatatccaccagtgttaccttgatcagcgggagctccttttgggccctagtattgcttgcactgttgcagagttaaccagccaaaataatagagatcactgtgccttggttcgtagtggctgtgccttcatggttcatgtctgccaggatgaacaccaactttacaatgaatttttcacaaaaccaacatcaaaattagatgagcttttggagaaactgtgtgtgtcattgtatgatgtcttcaggccattgatcattcatgttattcacttagagactctgtcggaactttgtgggattcttaaaaatgaggtgcttgaagatcatgtgcagaacaatgctgagcaactgggggcatttgcagctggagtcaagcagatgttagaagatgtacaggagcggctcgtctaccgaacccacatctatattcagacggacatcacgggctataaaccagctcctggagatctggcatatcccgataagttagtcatgatggagcagattgcacagagtttgaaagatgaacagaagaaggtaccttcagaagcttcattttcagatgttcacttagaagaaggagagtctaacagtctgacaaaatctggttcaacagaatccctcaatcctagaccacagaccacaatttctccagcagatcttcatggaatgtggtatcctacggttcgaagaactcttgtctgtctctccaaattatacagatgcatagatagggcagtgttccaaggattatcacaggaagcattgtctgcctgcattcagtccttacttggagcgtcagagtctatcagcaaaaacaagactcagattgatggacaacttttcttaattaagcaccttttgatacttcgtgaacaaattgctccatttcacactgaattcaccattaaggaaatttccctggacctcaagaaaactagagatgcagcatttaaaatcctgaaccctatgactgtcccaagattttttaggctgaatagcaacaatgccttgatagagttcttgttggagggtactcctgagataagagaacattatcttgactctaaaaaagacgtagaccgtcatctgaaatcggcctgtgagcagtttattcagcagcagaccaagctgtttgtagaacagctggaggagttcatgacaaaggtttcagcgttaaaaacaatggccagtcagggaggccccaagtatactctctcacagcagccttgggcacaaccagcaaaggtcaatgaccttgcggcaactgcatataagacaataaaaacaaagctgcctgtgacattgagaagtatgtccttgtacctatccaataaagataccgagttcatcttgtttaaacctgtgaggaataatattcagcaagtcttccagaagttccacgctctgttaaaggaagagttcagccctgaagacatccagatcattgcctgtccatctatggaacagctgagccttctgctgttggtttctaaataagcaggccagccgggctgtgcacctaaatgtctgtctgggaggagcaggctgagaagtcttgcagtctgcaggacaccgaggaatcgtatgtgggaacgtccccgagaaccacacgagcgtgctgctcagtgctgactgcagaatgaaatagaagcaaagtgttacaggatcagtgttttcttttctaaaacatcaaaatgccaaagattaatctgtgattggtgataactgcctcgtttaaatggtcacaagaaatgtgaagagagagctagggcagacatgcagtgaaatggttctttgttaaaaatgtgcaataaaaatagattacaataagtagtgcaaagaactttacagaaatcaagcgaattagaaggcctgtaagagtaaggtttgctaaaacgtgaaacactgtaacacttttaaccactgagcattccacagtgaaatgttatttctatgctcttatttaatgtaatgtttctcctgtcatttttgaagttgagtttggagtagattggttgcttctgagaacacattctgccttcctgggaagtcggggtgtcatcctttcctctgtttgatgtgaggtagtttaaagatacaaggactttgtgtgaagctccagcatctgtgccccttgaattgcttaggtgcagacagttctaaagcaaggagctgcagcattctcatcatagatacgtgcagtatctttaatgagtatcttcatggtatgatagtgtgtgtttgtgagtgcgaagtaccaattaaggtgtcttaaatttggcgcatagaggagagaaggaaacctgaggagtagtgttcctcctgaatgaaggttcaggtcaccagccttctgtacactgcctttggttttagcagttctttgaaaagcaaacactttcatgtcctgtctattcattcagctggctgtgctgtgctgtggaccagctgtgtggatctctagcccagctacagcagaatacattttaccagcaaacctaaggatgacaaacactatccacatctgaaaactaccacaccatatcagggatcataaattatgcatatctatgaattttccaacaaattcctacttcctgattggattggttttgccgctgatgttaaggcagccagcttcttagttcaaaaagaattctgagtttttcaaacactagtctagaggtggacattgtcaggggttctggaatgggaccaggggaccttttggtgcagtgggtgcctgtaactcattagacgtactgaggcagcacttctgcagggtgcataccctgattgttgtcatttgtaacaggtcacttccttttcactcagtttaaattggtgatggacgttgcttgattgagcttattactctctattttgagaaggtagaaggtaagagggcccatattcattctttgccatgaaatgaatgaattaggaagattgtatttacttaactgttttttaaatacatgtttaatgaaataaactgtaaaatatccagttttgtgtattatatgtacatttgatttttaatagcctttccaaagaaatgagggcatgattattgtacagtaagtacgtgactgatttaatttgatttacagagcggagtgtgttcttataaaaatatttaatgacattggttcttgtcttttgatcttttatttctgaaacactcaaacaccttacaaagtgctgagtaggtaatagtgacccaacttgtttgctaaatgattatttgtttaaatctgtacagttttaagtgttcacttatacaaagagtgtatatactttcaaataatttaaaatgctttatattatttggctagaaattgctgtttttaataaatgtgaattttttaaaaataaagatttttgcttcctaccttg

SEQ ID NO: 122016 - DNA, 679 bp, Homo sapiens
  Payload ID: 3919
  Gene Symbol: COG3
  Gene Name: component of oligomeric golgi complex 3
  ENST ID: ENST00000486940
  CDS Start-End: 1-206
agattgatggacaacttttcttaattaagcaccttttgatacttcgtgaacaaattgctccatttcacactgaattcaccattaaggaaatttccctggacctcaagaaaactagaggtttcagcgttaaaaacaatggccagtcagggaggccccaagtatactctctcacagcagccttgggcacaaccagcaaaggtcaatgaccttgcggcaactgcatataagacaataaaaacaaagctgcctgtgacattgagaagtatgtccttgtacctatccaataaagataccgagttcatcttgtttaaacctgtgaggaataatattcagcaagtcttccagaagttccacgctctgttaaaggaagagttcagccctgaagacatccagatcattgcctgtccatctatggaacaggttactggggtacaggtggtatttggctacacgagtaagttcttcagtggtgatttgcaagattttggtgcacccatcacccgagcagtatacactgcaccctatttgtagttttttaataacttcaagattgaaaacatggaagttactgagtacccaaaaaaccccttagccattagcagatcctgcatttccccgtcttctttttgtctctgtggatttgcctattctggatatttcattaaatggaatcatacaa

SEQ ID NO: 122017 - DNA, 1809 bp, Homo sapiens
  Payload ID: 3919
  Gene Symbol: COG3
  Gene Name: component of oligomeric golgi complex 3
  Uniprot ID: Q96JB2
  ENST ID: ENST00000617493
  CDS Start-End: 33-1367
cgctgctgctgaaggccgcgagggcggcggcgatggcggaggcggcgctgttgctgctgcctgaggcggcggcggagcgggacgctagggaaaagctggctctctgggatcggagaccggacacgacggcgccgctgaccgacaggcagacggactcggtattggagctgaaggcggcggcagagaacttgccggtgccagctgagcttccaattgaagacttgtgcagtttaacatcccagtcactgcccattgaactgacttcagtagtgcctgaatctacagaagacattctcttgaagggcttcacttccttaggaatggaagaagaaagaattgaaaccgcacagcagtttttctcatggtttgcaaagctgcaaactcagatggatcaagatgaaggaactaaatatagacagatgagggattacttgtctgggtttcaggagcagtgtgatgctatattgaatgatgtaaacagtgctcttcagcatctggagtctttgcagaaacagtatctttttgtgtccaataagacaggaaccctacatgaagcctgtgaacagctcctaaaagaacagtcggaacttgttgatctggctgaaaacattcaacaaaagctttcctattttaacgaattggaaactattaacacaaaattgaattcccctacattgtcggtgaatagtgacggatttatacctatgctggccaagttagatgattgtataacatatatctcatctcatcctaattttaaagattatcccatatatttgctgaagtttaaacagtgtctttctaaagctttgcacctcatgaagacatatactgtgaacacactacagaccctcacaagtcagttactgaaaagggatccttcatctgtacctaatgcagacaatgccttcacattattttatgtgaaatttcgagctgctgcccccaaagtcagaactcttattgaacaaatagaactgcggtctgaaaaaatacctgaataccaacaactgctaaatgatatccaccagtgttaccttgatcagcgggagctccttttgggccctagtattgcttgcactgttgcagagttaaccagccaaaataatagagatcactgtgccttggttcgtagtggctgtgccttcatggttcatgtctgccaggatgaacaccaactttacaatgaatttttcacaaaaccaacatcaaaattagatgagcttttggagaaactgtgtgtgtcattgtatgatgtcttcaggccattgatcattcatgttattcacttagagactctgtcggaactttgtgggattcttaaaaatgaggtgcttgaagatcatgtgcagaacaatggtaaatgagtagaaatgatcattttaagttatatcactggctcaatgaatttgaaaaaaaaataagtgcttcttccctcaccccactaaatagataaatttaatatttttgaagcttggcttgatgccttaccccttcttgaatgaagttgcaccttattctgtcactaaagacacaatcagatagggaaagaatcttaaaatctgggtaaaattagtaataaaataattatagtcagttttctttctggcatctggaatccagatagaacacatcgttacttttgggttaggcatttctagcacactgttaccagaatacaaaatacataaataaataattgaatatattgtatacttttgattaaaaaacaggaattgttttgtgtatattcataataatagttgatctgttttgaaattacaaataaagaaaagcggttctctggaa

SEQ ID NO: 122018 - DNA, 255 bp, Homo sapiens
  Payload ID: 3919
  Gene Symbol: COG3
  Gene Name: component of oligomeric golgi complex 3
  ENST ID: ENST00000476702
  CDS Start-End: 1-255
cctgaggcggcggcggagcgggacgctagggaaaagctggctctctgggatcggagaccggacacgacggcgccgctgaccgacaggcagacggactcggtattggagctgaaggcggcggcagagaacttgccggtgccagctgaggatatggtaccggaagtggatctgaaatcaatgaaggcgcaggtggaaatttctttggctcagctatcaaactcttttataccctggataataaaagttgtttgctct

SEQ ID NO: 122019 - DNA, 2833 bp, Homo sapiens
  Payload ID: 3920
  Gene Symbol: COG4
  Gene Name: component of oligomeric golgi complex 4
  ENST ID: ENST00000323786
  CDS Start-End: 23-2392
ctcgcgggaccggaagtgccgaatggggaccaagatggcggaccttgattcgcctccgaagctgtcaggggtgcagcagccgtctgagggggtgggaggtggccgctgctccgaaatctccgctgagctcattcgctccctgacagagctgcaggagctggaggctgtatacgaacggctctgcggcgaggagaaagtggtggagagagagctggatgctcttttggaacagcaaaacaccattgaaagtaagatggtcactctccaccgaatgggtcctaatctgcagctgattgagggagatgcaaagcagctggctggaatgatcacctttacctgcaacctggctgagaatgtgtccagcaaagttcgtcagcttgacctggccaagaaccgcctctatcaggccattcagagagctgatgacatcttggacctgaagttctgcatggatggagttcagactgctttgaggagtgaagattatgagcaggctgcagcacatactcatcgctacttgtgcctggacaagtcggtcattgagctcagccgacagggcaaagaggggagcatgattgatgccaacctgaaattgctgcaggaagctgagcaacgtctcaaagccattgtggcagagaagtttgccattgccaccaaggaaggtgatctgccccaggtggagcgcttcttcaagatcttcccactgctgggtttgcatgaggagggattaagaaagttctcggagtacctttgcaagcaggtggccagtaaagctgaggagaatctgctcatggtgctggggacagacatgagtgatcggagagctgcagtcatctttgcagatacacttactcttctgtttgaagggattgcccgcattgtggagacccaccagccaatagtggagacctattatgggccagggagactctataccctgatcaaatatctgcaggtggaatgtgacagacaggtggagaaggtggtagacaagttcatcaagcaaagggactaccaccagcagttccggcatgttcagaacaacctgatgagaaattctacaacagaaaaaatcgaaccaagagaactggaccccatcctgactgaggtcaccctgatgaatgcccgcagtgagctatacttacgcttcctcaagaagaggattagctctgattttgaggtgggagactccatggcctcagaggaagtaaagcaagagcaccagaagtgtctggacaaactcctcaataactgccttttgagctgtaccatgcaggagctaattggcttatatgttaccatggaggagtacttcatgagggagactgtcaataaggctgtggctctggacacctatgagaagggccagctgacatccagcatggtggatgatgtcttctacattgttaagaagtgcattgggcgggctctgtccagctccagcattgactgtctctgtgccatgatcaacctcgccaccacagagctggagtctgacttcagggatgttctgtgtaataagctgcggatgggctttcctgccaccaccttccaggacatccagcgcggggtgacaagtgccgtgaacatcatgcacagcagcctccagcaaggcaaatttgacacaaaaggcatcgagagtactgacgaggcgaagatgtccttcctggtgactctgaacaacgtggaagtctgcagtgaaaacatctccactctgaagaagacactggagagtgactgcaccaagctcttcagccagggcattggaggggagcaggcccaggccaagtttgacagctgcctttctgacttggccgccgtgtccaacaaattccgagacctcttgcaggaagggctgacggagctcaacagcacagccatcaagccacaggtgcagccttggatcaacagctttttctccgtctcccacaacatcgaggaggaagaattcaatgactatgaggccaacgacccttgggtacaacagttcatccttaacctggagcagcaaatggcagagttcaaggccagcctgtccccggtcatctacgacagcctaaccggcctcatgactagccttgttgccgtcgagttggagaaagtggtgctgaaatccacctttaaccggctgggtggtctgcagtttgacaaggagctgaggtcgctcattgcctaccttaccacggtgaccacctggaccatccgagacaagtttgcccggctctcccagatggccaccatcctcaatctggagcgggtgaccgagatcctcgattactggggacccaattccggcccattgacgtggcgcctcacccctgctgaagtgcgccaggtgctggccctgcggatagacttccgcagtgaagatatcaagaggctgcgcctgtagctgcctggatgagcacacctggctcatcacacttgcaggcctgttccctaaggggccccagccaaggagctgagcgaggctgtctggcttgggggagatctgacagcccagacctttctacggctggcagcagagaaacaaagtctggacccactccatgctctgccctcagacctggccaggtgatgctctgggggcagcatctccccaccgagagaagcgggctcctaatgaggtgggaaagccacggcaggcagcgagcagcccaggccagctttctgcatggatggtcagtctcttgccctcaaacactacagcaaacaagctacccctgccagtcctagacaacttgggtacatctggggacctagcagttaggcttgactttgaggagaggctgtgatgtttatgatccctgaataaagctactccttggagaga

SEQ ID NO: 122020 - DNA, 2756 bp, Homo sapiens
  Payload ID: 3920
  Gene Symbol: COG4
  Gene Name: component of oligomeric golgi complex 4
  ENST ID: ENST00000393612
  CDS Start-End: 12-2318
ggaagtgccgaatggggaccaagatggcggaccttgattcgcctccgaagctgtcaggggtgcagcagccgtctgagggggtgggaggtggccgctgctccgaaatctccgctgagctcattcgctccctgacagagctgcaggagctggaggctgtatacgaacggctctgcggcgaggagaaagtggtggagagagagctggatgctcttttggaacagcaaaacaccattgaaagtaagatggtcactctccaccgaatgggtcctaatctgcagctgattgagggagatgcaaagcagctggctggaatgatcacctttacctgcaacctggctgagaatgtgtccagcaaagttcgtcagcttgacctggccaagaaccgcctctatcaggccattcagagagctgatgacatcttggacctgaagttctgcatggatggagttcagactgctttgaggagtgaagattatgagcaggctgcagcacatactcatcgctacttgtgcctggacaagtcggtcattgagctcagccgacagggcaaagaggggagcatgattgatgccaacctgaaattgctgcaggaagctgagcaacgtctcaaagccattgtggcagagaagtttgccattgccaccaaggaaggtgatctgccccaggtggagcgcttcttcaagatcttcccactgctgggtttgcatgaggagggattaagaaagttctcggagtacctttgcaagcaggtggccagtaaagctgaggagaatctgctcatggtgctggggacagacatgagtgatcggagagctgcagtcatctttgcagatacacttactcttctgtttgaagggattgcccgcattgtggagacccaccagccaatagtggagacctattatgggccagggagactctataccctgatcaaatatctgcaggtggaatgtgacagacaggtggagaaggtggtagacaagttcatcaagcaaagggactaccaccagcagttccggcatgttcagaacaacctgatgagaaattctacaacagaaaaaatcgaaccaagagaactggaccccatcctgactgaggtcaccctgatgaatgcccgcagtgagctatacttacgcttcctcaagaagaggattagctctgattttgaggtgggagactccatggcctcagaggaagtaaagcaagagcaccagaagtgtctggacaaactcctcaataactgccttttgagctgtaccatgcaggagctaattggcttatatgttaccatggaggagtacttcatgagggagactgtcaataaggctgtggctctggacacctatgagaagggccagctgacatccagcatggtggatgatgtcttctacattgttaagaagtgcattgggcgggctctgtccagctccagcattgactgtctctgtgccatgatcaacctcgccaccacagagctggagtctgacttcagggatgttctgtgtaataagctgcggatgggctttcctgccaccaccttccaggacatccagcgcggggtgacaagtgccgtgaacatcatgcacagcagcctccagcaaggcaaatttgacacaaaaggcatcgagagtactgacgaggcgaagatgtccttcctgagtgactgcaccaagctcttcagccagggcattggaggggagcaggcccaggccaagtttgacagctgcctttctgacttggccgccgtgtccaacaaattccgagacctcttgcaggaagggctgacggagctcaacagcacagccatcaagccacaggtgcagccttggatcaacagctttttctccgtctcccacaacatcgaggaggaagaattcaatgactatgaggccaacgacccttgggtacaacagttcatccttaacctggagcagcaaatggcagagttcaaggccagcctgtccccggtcatctacgacagcctaaccggcctcatgactagccttgttgccgtcgagttggagaaagtggtgctgaaatccacctttaaccggctgggtggtctgcagtttgacaaggagctgaggtcgctcattgcctaccttaccacggtgaccacctggaccatccgagacaagtttgcccggctctcccagatggccaccatcctcaatctggagcgggtgaccgagatcctcgattactggggacccaattccggcccattgacgtggcgcctcacccctgctgaagtgcgccaggtgctggccctgcggatagacttccgcagtgaagatatcaagaggctgcgcctgtagctgcctggatgagcacacctggctcatcacacttgcaggcctgttccctaaggggccccagccaaggagctgagcgaggctgtctggcttgggggagatctgacagcccagacctttctacggctggcagcagagaaacaaagtctggacccactccatgctctgccctcagacctggccaggtgatgctctgggggcagcatctccccaccgagagaagcgggctcctaatgaggtgggaaagccacggcaggcagcgagcagcccaggccagctttctgcatggatggtcagtctcttgccctcaaacactacagcaaacaagctacccctgccagtcctagacaacttgggtacatctggggacctagcagttaggcttgactttgaggagaggctgtgatgtttatgatccctgaataaagctactccttggag

SEQ ID NO: 122021 - DNA, 2953 bp, Homo sapiens
  Payload ID: 3920
  Gene Symbol: COG4
  Gene Name: component of oligomeric golgi complex 4
  Uniprot ID: Q9H9E3
  ENST ID: ENST00000482252
  CDS Start-End: 1-1014
atggcggaccttgattcgcctccgaagctgtcaggggtgcagcagccgtctgagggggtgggaggtggccgctgctccgaaatctccgctgagctcattcgctccctgacagagctgcaggagctggaggctgtatacgaacggctctgcggcgaggagaaagtggtggagagagagctggatgctcttttggaacagcaaaacaccattgaaagtaagatggtcactctccaccgaatgggtcctaatctgcagctgattgagggagatgcaaagcagctggctggaatgatcacctttacctgcaacctggctgagaatgtgtccagcaaagttcgtcagcttgacctggccaagaaccgcctctatcaggccattcagagagctgatgacatcttggacctgaagttctgcatggatggagttcagactgctttgaggagtgaagattatgagcaggctgcagcacatactcatcgctacttgtgcctggacaagtcggtcattgagctcagccgacagggcaaagaggggagcatgattgatgccaacctgaaattgctgcaggaagctgagcaacgtctcaaagccattgtggcagagaagtttgccattgccaccaaggaaggtgatctgccccaggtggagcgcttcttcaagatcttcccactgctgggtttgcatgaggagggattaagaaagttctcggagtacctttgcaagcaggtggccagtaaagctgaggagaatctgctcatggtgctggggacagacatgagtgatcggagagctgcagtcatctttgcagatacacttactcttctgtttgaagggattgcccgcattgtggagacccaccagccaatagtggagacctattatgggccagggagactctataccctgatcaaatatctgcaggtggaatgtgacagacaggtggagaaggtggtagacaagttcatcaagcaaagggactaccaccagcagaactttgttttttccttcttttgagcagagaaagtaaaagtacgacatagaaataggagtggcctcatacaattgtatttctagaactccagactaggagactataaacagtagtctattggaacaccattagcatgacttttaagcacagtaatagagttccggcatgttcagaacaacctgatgagaaattctacaacagaaaaaatcgaaccaagagaactggaccccatcctgactgaggtcaccctgatgaatgcccgcagtgagctatacttacgcttcctcaagaagaggattagctctgattttgaggtgggagactccatggcctcagaggaagtaaagcaagagcaccagaagtgtctggacaaactcctcaataactgccttttgagctgtaccatgcaggagctaattggcttatatgttaccatggaggagtacttcatgagggagactgtcaataaggctgtggctctggacacctatgagaagggccagctgacatccagcatggtggatgatgtcttctacattgttaagaagtgcattgggcgggctctgtccagctccagcattgactgtctctgtgccatgatcaacctcgccaccacagagctggagtctgacttcagggatgttctgtgtaataagctgcggatgggctttcctgccaccaccttccaggacatccagcgcggggtgacaagtgccgtgaacatcatgcacagcagcctccagcaaggcaaatttgacacaaaaggcatcgagagtactgacgaggcgaagatgtccttcctggtgactctgaacaacgtggaagtctgcagtgaaaacatctccactctgaagaagacactggagagtgactgcaccaagctcttcagccagggcattggaggggagcaggcccaggccaagtttgacagctgcctttctgacttggccgccgtgtccaacaaattccgagacctcttgcaggaagggctgacggagctcaacagcacagccatcaagccacaggtgcagccttggatcaacagctttttctccgtctcccacaacatcgaggaggaagaattcaatgactatgaggccaacgacccttgggtacaacagttcatccttaacctggagcagcaaatggcagagttcaaggccagcctgtccccggtcatctacgacagcctaaccggcctcatgactagccttgttgccgtcgagttggagaaagtggtgctgaaatccacctttaaccggctgggtggtctgcagtttgacaaggagctgaggtcgctcattgcctaccttaccacggtgaccacctggaccatccgagacaagtttgcccggctctcccagatggccaccatcctcaatctggagcgggtgaccgagatcctcgattactggggacccaattccggcccattgacgtggcgcctcacccctgctgaagtgcgccaggtgctggccctgcggatagacttccgcagtgaagatatcaagaggctgcgcctgtagctgcctggatgagcacacctggctcatcacacttgcaggcctgttccctaaggggccccagccaaggagctgagcgaggctgtctggcttgggggagatctgacagcccagacctttctacggctggcagcagagaaacaaagtctggacccactccatgctctgccctcagacctggccaggtgatgctctgggggcagcatctccccaccgagagaagcgggctcctaatgaggtgggaaagccacggcaggcagcgagcagcccaggccagctttctgcatggatggtcagtctcttgccctcaaacactacagcaaacaagctacccctgccagtcctagacaacttgggtacatctggggacctagcagttaggcttgactttgaggagaggctgtgatgtttatgatccctgaataaagctactccttgg

SEQ ID NO: 122022 - DNA, 554 bp, Homo sapiens
  Payload ID: 3920
  Gene Symbol: COG4
  Gene Name: component of oligomeric golgi complex 4
  ENST ID: ENST00000530160
  CDS Start-End: 12-314
ggaagtgccgaatggggaccaagatggcggaccttgattcgcctccgaagctgtcaggggtgcagcagccgtctgagggggtgggaggtggccgctgctccgaaatctccgctgagctcattcgctccctgacagagctgcaggagctggaggctgtatacgaacggctctgcggcgaggagaaagtggtggagagagagctggatgctcttttggaacagcaaaacaccattgaaagtaagatggtcactctccaccgaatgggaaccgcctctatcaggccattcagagagctgatgacatcttggacctgaagttctgcatggatggagttcagactgctttgaggagtgaagattatgagcaggctgcagcacatactcatcgctacttgtgcctggacaagtcggtcattgagctcagccgacagggcaaagaggggagcatgattgatgccaacctgaaattgctgcaggaagctgagcaacgtctcaaagccattgtggcagagaagtttgccattgccaccaaggaaggtgatctgccccaggtgg

SEQ ID NO: 122023 - DNA, 590 bp, Homo sapiens
  Payload ID: 3920
  Gene Symbol: COG4
  Gene Name: component of oligomeric golgi complex 4
  ENST ID: ENST00000564653
  CDS Start-End: 8-589
gtgccgaatggggaccaagatggcggaccttgattcgcctccgaagctgtcaggggtgcagcagccgtctgagggggtgggaggtggccgctgctccgaaatctccgctgagctcattcgctccctgacagagctgcaggagctggaggctgtatacgaacggctctgcggcgaggagaaagtggtggagagagagctggatgctcttttggaacagcaaaacaccattgaaagtaagatggtcactctccaccgaatgggtcctaatctgcagctgattgagggagatgcaaagcagctggctggaatgatcacctttacctgcaacctggctgagaatgtgtccagcaaagttcgtcagcttgacctggccaagaaccgcctctatcaggccattcagagagctgatgacatcttggacctgaagttctgcatggatggagttcagactgctttgaggagtgaagattatgagcaggctgcagcacatactcatcgctacttgtgcctggacaagtcggtgatctgccccaggtggagcgcttcttcaagatcttcccactgctgggtttgcatgaggagggattaag

SEQ ID NO: 122024 - DNA, 575 bp, Homo sapiens
  Payload ID: 3920
  Gene Symbol: COG4
  Gene Name: component of oligomeric golgi complex 4
  ENST ID: ENST00000565715
  CDS Start-End: 1-432
gccatcaagccacaggtgcagccttggatcaacagctttttctccgtctcccacaacatcgaggaggccagcctgtccccggtcatctacgacagcctaaccggcctcatgactagccttgttgccgtcgagttggagaaagtggtgctgaaatccacctttaaccggctgggtggtctgcagtttgacaaggagctgaggtcgctcattgcctaccttaccacggtgaccacctggaccatccgagacaagtttgcccggctctcccagatggccaccatcctcaatctggagcgggtgaccgagatcctcgattactggggacccaattccggcccattgacgtggcgcctcacccctgctgaagtgcgccaggtgctggccctgcggatagacttccgcagtgaagatatcaagaggctgcgcctgtagctgcctggatgagcacacctggctcatcacacttgcaggcctgttccctaaggggccccagccaaggagctgagcgaggctgtctggcttgggggagatctgacagcccagacctttctacggctggcagcagagaaacaaag

SEQ ID NO: 122025 - DNA, 3000 bp, Homo sapiens
  Payload ID: 3920
  Gene Symbol: COG4
  Gene Name: component of oligomeric golgi complex 4
  ENST ID: ENST00000564415
  CDS Start-End: 16-408
gaccggaagtgccgaatggggaccaagatggcggaccttgattcgcctccgaagctgtcaggggtgcagcagccgtctgagggggtgggaggtggccgctgctccgaaatctccgctgagctcattcgctccctgacagagctgcaggagctggaggctgtatacgaacggctctgcggcgaggagaaagtggtggagagagagctggatgctcttttggaacagcaaaacaccattgaaagtaagatggtcactctccaccgaatgggtcctaatctgcagctgattgagggagatgcaaagcagctggctggaatgatcacctttacctgcaacctggctgagaatgtgtccagcaaagttcgtcagcttgacctggccaagaaacactcaacaaatttggaatagaggggaacttctcagcctgataaagagcatctgtgaaaaaccacagctggccaggtgtggtggctcatgcctgcaatcctaacactttgggagaccaaagcagtaggatctcttgaggccagaagttggagaccaaaccttggaacacaaaccgcctctatcaggccattcagagagctgatgacatcttggacctgaagttctgcatggatggagttcagactgctttgaggagtgaagattatgagcaggctgcagcacatactcatcgctacttgtgcctggacaagtcggtcattgagctcagccgacagggcaaagaggggagcatgattgatgccaacctgaaattgctgcaggaagctgagcaacgtctcaaagccattgtggcagagaagtttgccattgccaccaaggaaggtgatctgccccaggtggagcgcttcttcaagatcttcccactgctgggtttgcatgaggagggattaagaaagttctcggagtacctttgcaagcaggtggccagtaaagctgaggagaatctgctcatggtgctggggacagacatgagtgatcggagagctgcagtcatctttgcagatacacttactcttctgtttgaagggattgcccgcattgtggagacccaccagccaatagtggagacctattatgggccagggagactctataccctgatcaaatatctgcaggtggaatgtgacagacaggtggagaaggtggtagacaagttcatcaagcaaagggactaccaccagcagttccggcatgttcagaacaacctgatgagaaattctacaacagaaaaaatcgaaccaagagaactggaccccatcctgactgaggtcaccctgatgaatgcccgcagtgagctatacttacgcttcctcaagaagaggattagctctgattttgaggtgggagactccatggcctcagaggaagtaaagcaagagcaccagaagtgtctggacaaactcctcaataactgccttttgagctgtaccatgcaggagctaattggcttatatgttaccatggaggagtacttcatgagggagactgtcaataaggctgtggctctggacacctatgagaagggccagctgacatccagcatggtggatgatgtcttctacattgttaagaagtgcattgggcgggctctgtccagctccagcattgactgtctctgtgccatgatcaacctcgccaccacagagctggagtctgacttcagggatgttctgtgtaataagctgcggatgggctttcctgccaccaccttccaggacatccagcgcggggtgacaagtgccgtgaacatcatgcacagcagcctccagcaaggcaaatttgacacaaaaggcatcgagagtactgacgaggcgaagatgtccttcctggtgactctgaacaacgtggaagtctgcagtgaaaacatctccactctgaagaagacactggagagtgactgcaccaagctcttcagccagggcattggaggggagcaggcccaggccaagtttgacagctgcctttctgacttggccgccgtgtccaacaaattccgagacctcttgcaggaagggctgacggagctcaacagcacagccatcaagccacaggtgcagccttggatcaacagctttttctccgtctcccacaacatcgaggaggaagaattcaatgactatgaggccaacgacccttgggtacaacagttcatccttaacctggagcagcaaatggcagagttcaaggccagcctgtccccggtcatctacgacagcctaaccggcctcatgactagccttgttgccgtcgagttggagaaagtggtgctgaaatccacctttaaccggctgggtggtctgcagtttgacaaggagctgaggtcgctcattgcctaccttaccacggtgaccacctggaccatccgagacaagtttgcccggctctcccagatggccaccatcctcaatctggagcgggtgaccgagatcctcgattactggggacccaattccggcccattgacgtggcgcctcacccctgctgaagtgcgccaggtgctggccctgcggatagacttccgcagtgaagatatcaagaggctgcgcctgtagctgcctggatgagcacacctggctcatcacacttgcaggcctgttccctaaggggccccagccaaggagctgagcgaggctgtctggcttgggggagatctgacagcccagacctttctacggctggcagcagagaaacaaagtctggacccactccatgctctgccctcagacctggccaggtgatgctctgggggcagcatctccccaccgagagaagcgggctcctaatgaggtgggaaagccacggcaggcagcgagcagcccaggccagctttctgcatggatggtcagtctcttgccctcaaacactacagcaaacaagctacccctgccagtcctagacaacttgggtacatctggggacctagcagttaggcttgactttgaggagaggctgtgatgtttatgatccctgaataaagctactccttggagagat

SEQ ID NO: 122026 - DNA, 647 bp, Homo sapiens
  Payload ID: 3920
  Gene Symbol: COG4
  Gene Name: component of oligomeric golgi complex 4
  ENST ID: ENST00000534772
  CDS Start-End: 175-647
tgtcggacgcgccgagcttgtcttccctgatacctgggcgatctgcagcctctcctccctagacccccgttgatttccctgatccatgatcaccagtttctccacgggagtaaaaaagtggtggagagagagctggatgctcttttggaacagcaaaacaccattgaaagtaagatggtcactctccaccgaatgggtcctaatctgcagctgattgagggagatgcaaagcagctggctggaatgatcacctttacctgcaacctggctgagaatgtgtccagcaaagttcgtcagcttgacctggccaagaaccgcctctatcaggccattcagagagctgatgacatcttggacctgaagttctgcatggatggagttcagactgctttgaggagtgaagattatgagcaggctgcagcacatactcatcgctacttgtgcctggacaagtcggtcattgagctcagccgacagggcaaagaggggagcatgattgatgccaacctgaaattgctgcaggaagctgagcaacgtctcaaagccattgtggcagagaagtttgccattgccaccaaggaaggtgatctgccccaggtggagcgcttcttcaagatcttcccactgctgggtttgcatgaggaggg

SEQ ID NO: 122027 - DNA, 550 bp, Homo sapiens
  Payload ID: 3920
  Gene Symbol: COG4
  Gene Name: component of oligomeric golgi complex 4
  ENST ID: ENST00000524584
  CDS Start-End: 1-218
attcgcctccgaagctgtcaggggtgcagcagccgtctgagggggtgggaggtggccgctgctccgaaatctccgctgagctcattcgctccctgacagagctgcaggagctggaggctgtatacgaacggctctgcggcgaggagaaagtggtggagagagagctggatgctcttttggaacagcaaaacaccattgaaatcctaatctgcagctgattgagggagatgcaaagcagctggctggaatgatcacctttacctgcaacctggctgagaatgtgtccagcaaagttcgtcagcttgacctggccaagaaccgcctctatcaggccattcagagagctgatgacatcttggacctgaagttctgcatggatggagttcagactgctttgaggagtgaagattatgagcaggctgcagcacatactcatcgctacttgtgcctggacaagtcggtcattgagctcagccgacagggcaaagaggggagcatgattgatgccaacctgaaattgctgcaggaagctgagcaacgtctcaaagcc

SEQ ID NO: 122028 - DNA, 4060 bp, Homo sapiens
  Payload ID: 3921
  Gene Symbol: COG5
  Gene Name: component of oligomeric golgi complex 5
  Uniprot ID: Q9UP83
  ENST ID: ENST00000297135
  CDS Start-End: 526-3108
attggtccttttatggttcagacttccttcttcatcgactctccctaattctcttcactgttcatccccagcaacttttcttcccaagcatttcctgcgggcttttattaccccaggagtgccaatcaaggcgtggaacagataaagctgtgtagcaactaacgcgtgactcttgtgagtgtggagggcaaacgaagctccctgaaacctccgctctgctctcctgccttacgccgcgcggcccctgttctgaggtttaatacttgcttcacagataagcgctgcggccacgttccggtgcccaccttctccttggctagggcacgacgccagcccagggggcgcggccctgagctgctgcgagagacagctgaaagcgccggcccgacggccttggctccctcggtgcgctgggcgcagagcactcggaccctgggcgcccactgctcgagtacctgcgcggctcctagccaggcttagcccaggcgcgggctgagagtcagttcgccaggtgggcctggagccatgggctgggtgggcgggcggcgccgggattctgcgtcaccacctgggcggagccgttctgctgctgacgacatcaacccggcacctgccaacatggaaggtggcggcggcagcgtcgctgtagctggcctcggagctcgaggctctggagcggctgcagctacagtccgggaacttctgcaggacgggtgttatagtgactttttaaacgaagactttgatgtaaagacttatacttctcaatctattcatcaagctgtaattgctgaacaactagcaaaacttgcccaaggaatcagtcagttggacagagaactacacttacaggttgttgcaagacatgaagatttactggcacaagcaactgggattgagtcgttggaaggtgttcttcagatgatgcagacgagaattggggctttacagggagctgttgataggataaaagcaaaaattgttgaaccatacaataagatagttgcccggactgcacaactagcaagacttcaggttgcctgtgatttgcttcggaggattattcgtatcttgaatctcagtaagagactccaaggacaactgcaagggggaagtagagagataacaaaagctgctcagagtctcaatgaacttgattatctttctcaaggaatagatctttctggaatagaagtgatagaaaatgatctactttttattgcaagagcccgacttgaagtggaaaatcaagctaagcgcctactagagcagggtttggagactcagaatccaactcaagtcggaacagctcttcaggttttctataatcttggaactttgaaggatactattaccagtgttgtggatggatattgtgctactttagaagaaaatatcaacagtgcattagacataaaagttttgactcagccttcccagtcagctgtgagagggggacctggacgatctaccatgccaaccccaggaaatactgcagctttgcgtgcctcattctggaccaatatggagaaacttatggatcatatttatgctgtttgtggacaggtacaacatctacaaaaagtattggccaagaagagagatcctgtttctcacatttgtttcattgaagaaatagttaaggatggacaaccggaaattttctacacattttggaattcagttactcaggcactttcttctcaatttcatatggcaacaaactcttcgatgtttttgaagcaggcatttgaaggagaataccctaaattattacgtctttataatgacttatggaagcgtcttcaacaatacagtcagcatatccaagggaattttaatgcaagtggaactacagacctctatgttgacctacaacacatggaagatgatgcacaagatatattcataccaaaaaagccagattatgatccagaaaaggctttgaaagactcactacaaccctatgaggctgcttatctatcaaaatccttatctcgactcttcgatcctatcaacttggtttttcccccgggtggtcgtaatcctccttcctctgatgaacttgatggtattattaaaactatagcaagtgaactaaatgttgctgctgttgatacaaacctcacattagctgtgtcaaaaaatgtggcaaagaccatccagttatacagtgtaaaatcagagcagcttctctccacacaaggagatgcaagtcaggtgattgggcctcttactgaaggacagagaagaaatgtggcagtagtgaattcattgtataagttgcaccaatcagtaacaaaggttgtttccagtcagagctcattcccactggcagctgagcaaactataatttcagctctaaaggctattcatgctcttatggaaaatgctgtgcaacccttactcacttctgtgggagatgctatagaggccataatcatcaccatgcatcaagaagacttttctgggtcattatccagctcaggaaaacctgatgttccttgttctctgtacatgaaggagctacaaggtttcattgccagagttatgagtgactattttaaacactttgaatgcttggattttgtctttgacaacactgaggctattgcccaaagagctgttgaactttttatccgccatgccagtctcataagacctcttggtgaaggtgggaaaatgcgacttgctgctgattttgcacagatggagttggctgtgggtccattctgtagacgagtatctgatttaggaaagtcctatcggatgctgagatcattcagacctctgctcttccaggcaagtgaacatgtagccagtagtcctgcattgggggatgtgattccgttcagcatcattattcagtttttgttcacgagagcacccgctgaactgaaatctcctttccagagggcagagtggtcccacacacgcttctctcagtggctggatgaccatccatctgaaaaggacaggctcctcctcatcaggggagccctggaagcttatgttcaatcagtgagaagtagagaaggcaaagaatttgcaccagtttatcccataatggttcagctgcttcaaaaggctatgtctgctcttcagtaatgacatgaaatctttgttcatctccactttgtgctaacccattcatagttggcagttaaacacatactccaaaagactgctactatctactattttaagaatgtaattgattgttcggtatttcctatcgacgtttatttacctctttagcacttatactttagcataaaaaatgttgagttatcaccacctttcaattccatggacctgatttttccagaaagatgttttcctctttcagatttttgtacaaggctaaaatgtctttcccatccataaccaagtcctcctatgggtacataaacccaaagtccccacttcttttaaagggatatgatcaagttataacatgtaccctgcttcccccaaccctgccttcttcactaaataagcatgtagctcagtggtttccaaatttggctgcacattcataccaatcaccaggggatttttttaaaatcctgatgcccaacttgcactccacattaattaacatgtctaggagtgggagcctgacagacaccactattaaaaaaaaaaaaaatccccaaaatgattccaatagacaacaaagttgaggaaccactggcacatcccaagctaagatacaaggttaaatggcctttttaagtatgtcatactggatctttaaataaagcaaggcttttgttacactttgtcatgttattaaaagcagacctttgggctgtttaaccgtgtaacaaaaatgccacgtgaaaaataaaaatttttattgtatagcaattctctataaatagtagataatctaagtccttattttctgatggctcttgttccactattaacattgtttttaatttttaaaatcctatcagcagcctcctaattagcagtgttaggaatttgccttatgttttccatctcatctcctgaacctgttattctgagaactcataaataaaattcagcc

SEQ ID NO: 122029 - DNA, 4532 bp, Homo sapiens
  Payload ID: 3921
  Gene Symbol: COG5
  Gene Name: component of oligomeric golgi complex 5
  Uniprot ID: Q9UP83
  ENST ID: ENST00000347053
  CDS Start-End: 52-2571
gcttagcccaggcgcgggctgagagtcagttcgccaggtgggcctggagccatgggctgggtgggcgggcggcgccgggattctgcgtcaccacctgggcggagccgttctgctgctgacgacatcaacccggcacctgccaacatggaaggtggcggcggcagcgtcgctgtagctggcctcggagctcgaggctctggagcggctgcagctacagtccgggaacttctgcaggacgggtgttatagtgactttttaaacgaagactttgatgtaaagacttatacttctcaatctattcatcaagctgtaattgctgaacaactagcaaaacttgcccaaggaatcagtcagttggacagagaactacacttacaggttgttgcaagacatgaagatttactggcacaagcaactgggattgagtcgttggaaggtgttcttcagatgatgcagacgagaattggggctttacagggagctgttgataggataaaagcaaaaattgttgaaccatacaataagatagttgcccggactgcacaactagcaagacttcaggttgcctgtgatttgcttcggaggattattcgtatcttgaatctcagtaagagactccaaggacaactgcaagggggaagtagagagataacaaaagctgctcagagtctcaatgaacttgattatctttctcaaggaatagatctttctggaatagaagtgatagaaaatgatctactttttattgcaagagcccgacttgaagtggaaaatcaagctaagcgcctactagagcagggtttggagactcagaatccaactcaagtcggaacagctcttcaggttttctataatcttggaactttgaaggatactattaccagtgttgtggatggatattgtgctactttagaagaaaatatcaacagtgcattagacataaaagttttgactcagccttcccagtcagctgtgagagggggacctggacgatctaccatgccaaccccaggaaatactgcagctttgcgtgcctcattctggaccaatatggagaaacttatggatcatatttatgctgtttgtggacaggtacaacatctacaaaaagtattggccaagaagagagatcctgtttctcacatttgtttcattgaagaaatagttaaggatggacaaccggaaattttctacacattttggaattcagttactcaggcactttcttctcaatttcatatggcaacaaactcttcgatgtttttgaagcaggcatttgaaggagaataccctaaattattacgtctttataatgacttatggaagcgtcttcaacaatacagtcagcatatccaagggaattttaatgcaagtggaactacagacctctatgttgacctacaacacatggaagatgatgcacaagatatattcataccaaaaaagccagattatgatccagaaaaggctttgaaagactcactacaaccctatgaggctgcttatctatcaaaatccttatctcgactcttcgatcctatcaacttggtttttcccccgggtggtcgtaatcctccttcctctgatgaacttgatggtattattaaaactatagcaagtgaactaaatgttgctgctgttgatacaaacctcacattagctgtgtcaaaaaatgtggcaaagaccatccagttatacagtgtaaaatcagagcagcttctctccacacaaggagatgcaagtcaggtgattgggcctcttactgaaggacagagaagaaatgtggcagtagtgaattcattgtataagttgcaccaatcagtaacaaaggctattcatgctcttatggaaaatgctgtgcaacccttactcacttctgtgggagatgctatagaggccataatcatcaccatgcatcaagaagacttttctgggtcattatccagctcaggaaaacctgatgttccttgttctctgtacatgaaggagctacaaggtttcattgccagagttatgagtgactattttaaacactttgaatgcttggattttgtctttgacaacactgaggctattgcccaaagagctgttgaactttttatccgccatgccagtctcataagacctcttggtgaaggtgggaaaatgcgacttgctgctgattttgcacagatggagttggctgtgggtccattctgtagacgagtatctgatttaggaaagtcctatcggatgctgagatcattcagacctctgctcttccaggcaagtgaacatgtagccagtagtcctgcattgggggatgtgattccgttcagcatcattattcagtttttgttcacgagagcacccgctgaactgaaatctcctttccagagggcagagtggtcccacacacgcttctctcagtggctggatgaccatccatctgaaaaggacaggctcctcctcatcaggggagccctggaagcttatgttcaatcagtgagaagtagagaaggcaaagaatttgcaccagtttatcccataatggttcagctgcttcaaaaggctatgtctgctcttcagtaatgacatgaaatctttgttcatctccactttgtgctaacccattcatagttggcagttaaacacatactccaaaagactgctactatctactattttaagaatgtaattgattgttcggtatttcctatcgacgtttatttacctctttagcacttatactttagcataaaaaatgttgagttatcaccacctttcaattccatggacctgatttttccagaaagatgttttcctctttcagatttttgtacaaggctaaaatgtctttcccatccataaccaagtcctcctatgggtacataaacccaaagtccccacttcttttaaagggatatgatcaagttataacatgtaccctgcttcccccaaccctgccttcttcactaaataagcatgtagctcagtggtttccaaatttggctgcacattcataccaatcaccaggggatttttttaaaatcctgatgcccaacttgcactccacattaattaacatgtctaggagtgggagcctgacagacaccactattaaaaaaaaaaaaaatccccaaaatgattccaatagacaacaaagttgaggaaccactggcacatcccaagctaagatacaaggttaaatggcctttttaagtatgtcatactggatctttaaataaagcaaggcttttgttacactttgtcatgttattaaaagcagacctttgggctgtttaaccgtgtaacaaaaatgccacgtgaaaaataaaaatttttattgtatagcaattctctataaatagtagataatctaagtccttattttctgatggctcttgttccactattaacattgtttttaatttttaaaatcctatcagcagcctcctaattagcagtgttaggaatttgccttatgttttccatctcatctcctgaacctgttattctgagaactcataaataaaattcagccaagattaatcaatcaatcaatcaatcagtagacgtcagagataagcaacttttttttccatttatttgaaataatatacaagaatatagtgtgcaaaatttaggggcaacatcatgaagaagtgtgatgaactgaaatcaattttacagctgtgattcctaaccagaaacaccacttggtaagtaacatgaaaagccatgattgtagctcagagcaaaagcagctgtattgccaatgtatttgctctaattttagacagttggaggaaaattaaagtgcaagtgttgcactgcagtaagtgcaaagtctgcccccaccataaagattatgatgacaaaatatatttaagatacatggctgaggagatacagaacacgaagttaaaaaatacaatggtgttgactgtttgttaatagcaccattacagtgactatatcccaatgctattaactaactttaccttggcctgggctaggtctccattggaaataataacggatggctgctgccacctggtgcatcaactcagcatgccatggtaactgcagcaggtggctcttaggctgggacaccaacaccagccacctgccccatgttctggtagcctcttggcactgaccagactaggagcgcctatgtttggcacagatgctgagccatgtggtggttactagaggaaaggccgactcccagcttctgcttcatttcatcatgtgtacaatacagattaataagcagtaaggagccaatgtataaacagcagttacatattttttaaattcccctttcgtacaatttaaaataaaacatgtatacacttctcctctctttctactgtactttagcaccacaggatatcaattttcaagcctattattacctgatagacatatatgaagtttggaagaaaaataaggcaatttggtttaaaatgttgatagttttagcttaatgctctaatggagaaagcaaatcctcactcatattattaaatcatttcaagactcaa

SEQ ID NO: 122030 - DNA, 5418 bp, Homo sapiens
  Payload ID: 3921
  Gene Symbol: COG5
  Gene Name: component of oligomeric golgi complex 5
  Uniprot ID: Q9UP83
  ENST ID: ENST00000393603
  CDS Start-End: 273-2744
ggtttaatacttgcttcacagataagcgctgcggccacgttccggtgcccaccttctccttggctagggcacgacgccagcccagggggcgcggccctgagctgctgcgagagacagctgaaagcgccggcccgacggccttggctccctcggtgcgctgggcgcagagcactcggaccctgggcgcccactgctcgagtacctgcgcggctcctagccaggcttagcccaggcgcgggctgagagtcagttcgccaggtgggcctggagccatgggctgggtgggcgggcggcgccgggattctgcgtcaccacctgggcggagccgttctgctgctgacgacatcaacccggcacctgccaacatggaaggtggcggcggcagcgtcgctgtagctggcctcggagctcgaggctctggagcggctgcagctacagtccgggaacttctgcaggacgggtgttatagtgactttttaaacgaagactttgatgtaaagacttatacttctcaatctattcatcaagctgtaattgctgaacaactagcaaaacttgcccaaggaatcagtcagttggacagagaactacacttacaggttgttgcaagacatgaagatttactggcacaagcaactgggattgagtcgttggaaggtgttcttcagatgatgcagacgagaattggggctttacagggagctgttgataggataaaagcaaaaattgttgaaccatacaataagatagttgcccggactgcacaactagcaagacttcaggttgcctgtgatttgcttcggaggattattcgtatcttgaatctcagtaagagactccaaggacaactgcaagggggaagtagagagataacaaaagctgctcagagtctcaatgaacttgattatctttctcaaggaatagatctttctggaatagaagtgatagaaaatgatctactttttattgcaagagcccgacttgaagtggaaaatcaagctaagcgcctactagagcagggtttggagactcagaatccaactcaagtcggaacagctcttcaggttttctataatcttggaactttgaaggatactattaccagtgttgtggatggatattgtgctactttagaagaaaatatcaacagtgcattagacataaaagttttgactcagccttcccagtcagctgtgagagggggacctggacgatctaccatgccaaccccaggaaatactgcagctttgcgtgcctcattctggaccaatatggagaaacttatggatcatatttatgctgtttgtggacaggtacaacatctacaaaaagtattggccaagaagagagatcctgtttctcacatttgtttcattgaagaaatagttaaggatggacaaccggaaattttctacacattttggaattcagttactcaggcactttcttctcaatttcatatggcaacaaactcttcgatgtttttgaagcaggcatttgaaggagaataccctaaattattacgtctttataatgacttatggaagcgtcttcaacaatacagtcagcatatccaagggaattttaatgcaagtggaactacagacctctatgttgacctacaacacatggaagatgatgcacaagatatattcataccaaaaaagccagattatgatccagaaaaggctttgaaagactcactacaaccctatgaggctgcttatctatcaaaatccttatctcgactcttcgatcctatcaacttggtttttcccccgggtggtcgtaatcctccttcctctgatgaacttgatggtattattaaaactatagcaagtgaactaaatgttgctgctgttgatacaaacctcacattagctgtgtcaaaaaatgtggcaaagaccatccagttatacagtgtaaaatcagagcagcttctctccacacaaggagatgcaagtcaggtgattgggcctcttactgaaggacagagaagaaatgtggcagtagtgaattcattgtataagttgcaccaatcagtaacaaaggttgtttccagtcagagctcattcccactggcagctgagcaaactataatttcagctctaaaggctattcatgctcttatggaaaatgctgtgcaacccttactcacttctgtgggagatgctatagaggccataatcatcaccatgcatcaagaagacttttctgggtcattatccagctcaggaaaacctgatgttccttgttctctgtacatgaaggagctacaaggtttcattgccagagttatgagtgactattttaaacactttgaatgcttggattttgtctttgacaacactgaggctattgcccaaagagctgttgaactttttatccgccatgccagtctcataagacctcttggtgaaggtgggaaaatgcgacttgctgctgattttgcacagatggagttggctgtgggtccattctgtagacgagtatctgatttaggaaagtcctatcggatgctgagatcattcagacctctgctcttccaggcaagtgaacatgtagccagtagtcctgcattgggggatgtgattccgttcagcatcattattcagtttttgttcacgagagcacccgctgaactgaaatctcctttccagagggcagagtggtcccacacacgcttctctcagtggctggatgaccatccatctgaaaaggacaggctcctcctcatcaggtaaagccaggtgctctgggggcacccatctggtctggaagcccaaggagggtggggatgcaagagaggatgaaggagcagtgcctgggggcatggacatgtgactgcaccttccagtggcgggccacctcactgcctaggcacgggtgctggagcaaccagcagttggaaatgttggccacaacatcttttgctttctttcattccaaaccttcatatccctgatgtgcaatcctgtgtcccatgcaaccctaaggaccatgcatttgtacctttgaaaatcatcatttgctatgaaaagttttgccctagctccgcatcttttacttcatttttatgtgctgcagttactgaattggtggaacacagatgtgagtgaatttttaaaaatacccaagtgcgaaacagttctgaggaggaaacaagaacaacccagcagccacttggataccatggccctccagtagtgccccatgaatgcattcacatacatacgcatgtgctcttgcccacacgtgcacacacccccatgtaccccaaccatgcccagggtggggtgctttaactgtcatacatggcttattaagcaacactcttccctgcaactgctctcaccatcaccagagacctctcagccaccaaacattcccatttttaccttaccactctgtagctttagctacagttgaccgccatttccttctgtaaactcataaactgggactcagcacatttttattgatgctgagctcacattttatcagcatggtaggccctgggccaggaaccgaggatacgaagtaagccgagatatggccctgtcctctcagagcttgcattacaccacagccatctgtttctgttctaacttctctggccatttttttttgtgtgtcatttgctgaattatcttcttctagccattccttaaatgctatcatttcccatattttcttcttctcatcctgcctctgccttggttcccaggtgagcttgtccagacccatgcctctagtgccccttctatacttaagagccctcaggtctgtgactgcctctggatggggccttggcccagtaaacttgctatcatatgtcaccacccacagaaatctcaaccccagaatggtcaaaataattctaatcttttctctcaaaccttctcattctcttatactccctgtcttggttgggaggtcacaatcacctaactagccaagccggaaaacctttacatcatcattcaactcctctgtcatccttattcctcaaacccactctgttgcgtctctaaaatagctcttgaagtcattctcaactctcccaggggatcccaattctgttggtctgggcccactgcacccagtgatcctttgttagcctgtgtcaggtgatgagttgagttccctaaagccagagtggggctgacatgatgaggtggttctaaaccacatgtgcacacaagaatcatttacatagcttggaaaattcctagtgcccaggtctctcacccttgcctacctcagaatctccagggtaggcctgctatcaggatttctctatagctccccaagaaggtccagggtgcagccaagggcgtgaacccctgccatagtgggtcatatttcagttaggatgaaagactgctgaggaagctatgacaggtcagtaagaaccatcagcctgtcagctttgtttccagaagtgaccctgagccctcaagcttggtacccacatcccacatgagccactggccctctgggcgtatgtgtggataaagattagctcggaccctgctctttttccttgcttatctgttactcagctatgaacatctgacacagaaatgggagaggttaccagccccggtgaatgttcctggtaaaatctgccctcgggaaaggctttggatttgggtgaggagtttgggcctgggctaacacagggatttgcaatgtctgtgtggattatttttcccgagtcccaaagattcactcagctgcaacacactcagtcgtcttaaaaagaggattcagttaattgaacacgttcatttttctcatcttaacaagttggtcatttttgtcgtcttaacaagttggaatgagttcatccaaaacagttgtcctgctgtgtgtacatcacaaatctgttttcttttgcttctctttaaaaatgtctcctgagtgatttcatcagcagtgctgttgctaagcctatatttagcaactgaaaatcatgctcagaaatactgtcatgcttttttaaaaaggcatatccatccctccacacatggctgattccagaaccttcatgcccttagcaaaaaattgagctgtccttcagggtttcaaaaaaagtactgtactcctgctgcaccccaggctcttggcaaggaggggacttttgtcctagagaatgttctttcttatgtattattgcaaaacaattttgttcttgcatactgaagcatcactggatgaatttctttcccctgtagacaaaccgagggtgagtattgctctttaaatgtcagtaaatttgttttagcttctggggcaaaccttgttgtatactcattctgttcctcccagcataatatgttaggttgtcataaaatagggcaaattgaggatagtgtaactactgctgctgaataaatgggaaatagtgaacca

SEQ ID NO: 122031 - DNA, 576 bp, Homo sapiens
  Payload ID: 3921
  Gene Symbol: COG5
  Gene Name: component of oligomeric golgi complex 5
  ENST ID: ENST00000605888
  CDS Start-End: 39-576
gttctgctgctgacgacatcaacccggcacctgccaacatggaaggtggcggcggcagcgtcgctgtagctggcctcggagctcgaggctctggagcggctgcagctacagtccgggaacttctgcaggacgggtgttatagtgactttttaaacgaagactttgatgtaaagacttatacttctcaatctattcatcaagctgtaattgctgaacaactagcaaaacttgcccaaggaatcagtcagttggacagagaactacacttacaggttgttgcaagacatgaagatttactggcacaagcaactgggattgagtcgttggaaggtgttcttcagatgatgcagacgagaattggggctttacagggagctgttgataggataaaagcaaaaattgttgaaccatacaataagatagttgcccggactgcacaactagcaagacttcaggttgcctgtgatttgcttcggaggattattcgtatcttgaatctcagtaagagactccaaggacaactgcaagggggaagtagagagataacaaaagctgctcagagtctcaatgaacttg

SEQ ID NO: 122032 - DNA, 3449 bp, Homo sapiens
  Payload ID: 3922
  Gene Symbol: COG6
  Gene Name: component of oligomeric golgi complex 6
  Uniprot ID: Q9Y2V7
  ENST ID: ENST00000356576
  CDS Start-End: 4-231
gctatggcagagggcagcggggaagtggtcgcagtgtctgcgaccggggctgccaacggcctcaacaatggggcaggcgggacctcggcgacgacctgcaacccgctgtcgcgcaagctgcataagatcctggagacgcggctggacaacgacaaggaattaggaatcctgctgttaagtttctcatggttgttatttgaggactcagtgagagactccaggagatgttagaagctctcaaggcactttcaaccttttttgttgaaaatagtctgcggactcgaagaaatttacgtggagatattgaacgtaaaagtttagccatcaatgaagaatttgtaagcattttcaaggaagtgaaggaggaacttgaaagcataagcgaagatgttcaagcaatgagcaactgttgtcaagatatgacaagtcgcctacaggcagcaaaggaacagactcaagatttaatagtaaaaaccactaagcttcaatctgaaagccaaaaattagagataagagctcaagttgcagatgccttcttatccaagttccaactgacttctgatgaaatgagtcttctccgaggtacaagagaaggacccattactgaggattttttcaaggcactgggaagagtaaaacagattcataatgatgtcaaagttctcttgcgtacaaatcaacaaacggcaggtttagaaattatggaacagatggccttacttcaagaaacggcttatgaaagactttaccgatgggctcaaagtgaatgcagaacattgacacaagaatcatgtgacgtatctccagtattgacacaggcaatggaagccctgcaggacagacctgtcttatataaatataccttagatgaatttggaacagccagaagaagtacagttgttcgtggatttattgatgcgctcacaagagggggccccggaggtacacctagaccaattgaaatgcattctcatgaccctttgaggtatgtaggagatatgttggcttggctccatcaagctactgcttctgaaaaggaacaccttgaagctctcttaaagcatgtaactacacaaggtgttgaagaaaatattcaagaagttgttgggcatatcactgaaggtgtgtgcaggcctctaaaggttcgaattgagcaagtaatagttgctgaacctggggcagttttattatataaaatttctaatctcctcaaattttatcaccatacaatcagtggtattgttggaaatagtgcaactgcattattgactaccattgaagaaatgcatttgctaagcaaaaaaatattcttcaatagcttgagtcttcatgcaagtaaattaatggacaaggttgaactcccaccacctgatcttggaccaagttctgcactaaatcagacactcatgttgctgcgtgaagttttagcatctcacgattcttcagttgtaccattagatgctcgtcaagctgattttgtgcaggttttatcatgtgtcttggatcctctcctacagatgtgtactgtatcagccagcaatttaggcacagctgacatggccactttcatggtcaattcactatatatgatgaagacaacattagctctatttgaattcactgacagacgtctggaaatgctacagtttcagatcgaagcacatttggacacacttataaatgagcaagcctcttatgttttaactagggtaggcttgagttacatctataacactgtacagcaacataaacctgaacagggctctttagctaatatgcccaacctagattctgtgacactgaaggctgcaatggttcagtttgatcgttatctgtcagccccagacaacctattgataccacagctgaactttcttctaagtgccacagtgaaagagcagatcgtaaaacaatctacagaattagtctgcagagcctatggtgaagtgtatgcagccgtgatgaatccaatcaatgaatacaaagatccagagaacattcttcaccgatcgccgcagcaagtgcagacgcttctttcctgattatcttatttcattgtgttagcaaaatatgacctccctaaaacactgaaggttattttttattctttgaatttttactctataatttgatagttacagttttctttgtatcataagattgtaagtcccgataatttttttttttttggtctcagtaacagggaagtaagtaacatgttgacctgagctagtattgctgtgtatctactctaaatgagatgatctatttttttgctagccatctctccagctctgcagttttcactgtattcaggaagcataaagtagtatgaaaggtttgaagaatttttttttacaagactagttctaaattaacagcttataaaaaatttgtctaaatttaataattagtataaggatatgacctaataaatgtctccttacctaaagattcatttgctttcttttaatatgagtaggcatacttagtagcttttctgaacctagcctatgtctctgtccccaaaatagctgcccttaaagagttgttagcagagagaaaaataacagtgaatgtgctcctggtgtatatggcagtgaatctcctttctgttctactttagcatactatatatatttgactgtgtacattcttatgcaattttaagtatacactcagcaataattagaaaaaaaggagagagaaaagtgatttaaacagggtggattccactctgtgggagccttcgatggaactcaaggtggagctcagcctttccaatgagctctaagcatgtagatagcctgagctgtgtctaagcctggtgtttaaagatgggtatttgtcatacaatatgggtcctaaatccaaccaactacacattttatctggtgttcaaaccaaagaaacaatgatctactcaaacattggagaaaaaaactgccagaggaggagttgccaattggcagtgtgtcttatctccatgttgtaactggactctgactttagaccattacctattaggaagattaaaaatgactgtatttttaaaggaataaatcccagtgtgcctgatttgacattcttgtcagcaaaaaaaaacttaatttctagtaaatctataaaaatgggtaagtccctaaattacaaatgagaaaattgaagcacaaggaaaaaaataactagtttgaaatattttgaaaagtaataacataaaactagtatttgtagaagattatgtgttgtatataacaaattagtatttatagaatatgacctatttatctgaagtttataattgtttatacctaatacagttctttttggagtaagaatgattatataatcgttatccatttgggtataaatctgtatttttagttttttccctttgattagtatgtgttacatataaagacagaaaataaagtataaatcaagagctt

SEQ ID NO: 122033 - DNA, 3563 bp, Homo sapiens
  Payload ID: 3922
  Gene Symbol: COG6
  Gene Name: component of oligomeric golgi complex 6
  Uniprot ID: Q9Y2V7
  ENST ID: ENST00000455146
  CDS Start-End: 51-2024
gtggtccctgcctggctgaggtggcagcagggggcgggacgcgcagcgctatggcagagggcagcggggaagtggtcgcagtgtctgcgaccggggctgccaacggcctcaacaatggggcaggcgggacctcggcgacgacctgcaacccgctgtcgcgcaagctgcataagatcctggagacgcggctggacaacgacaaggagatgttagaagctctcaaggcactttcaaccttttttgttgaaaatagtctgcggactcgaagaaatttacgtggagatattgaacgtaaaagtttagccatcaatgaagaatttgtaagcattttcaaggaagtgaaggaggaacttgaaagcataagcgaagatgttcaagcaatgagcaactgttgtcaagatatgacaagtcgcctacaggcagcaaaggaacagactcaagatttaatagtaaaaaccactaagcttcaatctgaaagccaaaaattagagataagagctcaagttgcagatgccttcttatccaagttccaactgacttctgatgaaatgagtcttctccgaggtacaagagaaggacccattactgaggattttttcaaggcactgggaagagtaaaacagattcataatgatgtcaaagttctcttgcgtacaaatcaacaaacggcaggtttagaaattatggaacagatggccttacttcaagaaacggcttatgaaagactttaccgatgggctcaaagtgaatgcagaacattgacacaagaatcatgtgacgtatctccagtattgacacaggcaatggaagccctgcaggacagacctgtcttatataaatataccttagatgaatttggaacagccagaagaagtacagttgttcgtggatttattgatgcgctcacaagagggggccccggaggtacacctagaccaattgaaatgcattctcatgaccctttgaggtatgtaggagatatgttggcttggctccatcaagctactgcttctgaaaaggaacaccttgaagctctcttaaagcatgtaactacacaaggtgttgaagaaaatattcaagaagttgttgggcatatcactgaaggtgtgtgcaggcctctaaaggttcgaattgagcaagtaatagttgctgaacctggggcagttttattatataaaatttctaatctcctcaaattttatcaccatacaatcagtggtattgttggaaatagtgcaactgcattattgactaccattgaagaaatgcatttgctaagcaaaaaaatattcttcaatagcttgagtcttcatgcaagtaaattaatggacaaggttgaactcccaccacctgatcttggaccaagttctgcactaaatcagacactcatgttgctgcgtgaagttttagcatctcacgattcttcagttgtaccattagatgctcgtcaagctgattttgtgcaggttttatcatgtgtcttggatcctctcctacagatgtgtactgtatcagccagcaatttaggcacagctgacatggccactttcatggtcaattcactatatatgatgaagacaacattagctctatttgaattcactgacagacgtctggaaatgctacagtttcagatcgaagcacatttggacacacttataaatgagcaagcctcttatgttttaactagggtaggcttgagttacatctataacactgtacagcaacataaacctgaacagggctctttagctaatatgcccaacctagattctgtgacactgaaggctgcaatggttcagtttgatcgttatctgtcagccccagacaacctattgataccacagctgaactttcttctaagtgccacagtgaaagagcagatcgtaaaacaatctacagaattagtctgcagagcctatggtgaagtgtatgcagccgtgatgaatccaatcaatgaatacaaagatccagagaacattcttcaccgatcgccgcagcaagtgcagacgcttctttcctgattatcttatttcattgtgttagcaaaatatgacctccctaaaacactgaaggttattttttattctttgaatttttactctataatttgatagttacagttttctttgtatcataagattgtaagtcccgataatttttttttttttggtctcagtaacagggaagtaagtaacatgttgacctgagctagtattgctgtgtatctactctaaatgagatgatctatttttttgctagccatctctccagctctgcagttttcactgtattcaggaagcataaagtagtatgaaaggtttgaagaatttttttttacaagactagttctaaattaacagcttataaaaaatttgtctaaatttaataattagtataaggatatgacctaataaatgtctccttacctaaagattcatttgctttcttttaatatgagtaggcatacttagtagcttttctgaacctagcctatgtctctgtccccaaaatagctgcccttaaagagttgttagcagagagaaaaataacagtgaatgtgctcctggtgtatatggcagtgaatctcctttctgttctactttagcatactatatatatttgactgtgtacattcttatgcaattttaagtatacactcagcaataattagaaaaaaaggagagagaaaagtgatttaaacagggtggattccactctgtgggagccttcgatggaactcaaggtggagctcagcctttccaatgagctctaagcatgtagatagcctgagctgtgtctaagcctggtgtttaaagatgggtatttgtcatacaatatgggtcctaaatccaaccaactacacattttatctggtgttcaaaccaaagaaacaatgatctactcaaacattggagaaaaaaactgccagaggaggagttgccaattggcagtgtgtcttatctccatgttgtaactggactctgactttagaccattacctattaggaagattaaaaatgactgtatttttaaaggaataaatcccagtgtgcctgatttgacattcttgtcagcaaaaaaaaacttaatttctagtaaatctataaaaatgggtaagtccctaaattacaaatgagaaaattgaagcacaaggaaaaaaataactagtttgaaatattttgaaaagtaataacataaaactagtatttgtagaagattatgtgttgtatataacaaattagtatttatagaatatgacctatttatctgaagtttataattgtttatacctaatacagttctttttggagtaagaatgattatataatcgttatccatttgggtataaatctgtatttttagttttttccctttgattagtatgtgttacatataaagacagaaaataaagtataaatcaagagcttaaattgtatataatttatttctacagagaaagaagattgataccttgctatgagtgaattcctttgttttatagggaaaatttattgtgctttttacctggttttttcaaataaaatattaaaatatttcta

SEQ ID NO: 122034 - DNA, 5257 bp, Homo sapiens
  Payload ID: 3922
  Gene Symbol: COG6
  Gene Name: component of oligomeric golgi complex 6
  Uniprot ID: Q9Y2V7
  ENST ID: ENST00000416691
  CDS Start-End: 101-1948
gatgcgcatgcgcggccgatttgcacatgcgcaatactcgcgctgcctccgtggtccctgcctggctgaggtggcagcagggggcgggacgcgcagcgctatggcagagggcagcggggaagtggtcgcagtgtctgcgaccggggctgccaacggcctcaacaatggggcaggcgggacctcggcgacgacctgcaacccgctgtcgcgcaagctgcataagatcctggagacgcggctggacaacgacaaggagatgttagaagctctcaaggcactttcaaccttttttgttgaaaatagtctgcggactcgaagaaatttacgtggagatattgaacgtaaaagtttagccatcaatgaagaatttgtaagcattttcaaggaagtgaaggaggaacttgaaagcataagcgaagatgttcaagcaatgagcaactgttgtcaagatatgacaagtcgcctacaggcagcaaaggaacagactcaagatttaatagtaaaaaccactaagcttcaatctgaaagccaaaaattagagataagagctcaagttgcagatgccttcttatccaagttccaactgacttctgatgaaatgagtcttctccgaggtacaagagaaggacccattactgaggattttttcaaggcactgggaagagtaaaacagattcataatgatgtcaaagttctcttgcgtacaaatcaacaaacggcaggtttagaaattatggaacagatggccttacttcaagaaacggcttatgaaagactttaccgatgggctcaaagtgaatgcagaacattgacacaagaatcatgtgacgtatctccagtattgacacaggcaatggaagccctgcaggacagacctgtcttatataaatataccttagatgaatttggaacagccagaagaagtacagttgttcgtggatttattgatgcgctcacaagagggggccccggaggtacacctagaccaattgaaatgcattctcatgaccctttgaggtatgtaggagatatgttggcttggctccatcaagctactgcttctgaaaaggaacaccttgaagctctcttaaagcatgtaactacacaaggtgttgaagaaaatattcaagaagttgttgggcatatcactgaaggtgtgtgcaggcctctaaaggttcgaattgagcaagtaatagttgctgaacctggggcagttttattatataaaatttctaatctcctcaaattttatcaccatacaatcagtggtattgttggaaatagtgcaactgcattattgactaccattgaagaaatgcatttgctaagcaaaaaaatattcttcaatagcttgagtcttcatgcaagtaaattaatggacaaggttgaactcccaccacctgatcttggaccaagttctgcactaaatcagacactcatgttgctgcgtgaagttttagcatctcacgattcttcagttgtaccattagatgctcgtcaagctgattttgtgcaggttttatcatgtgtcttggatcctctcctacagatgtgtactgtatcagccagcaatttaggcacagctgacatggccactttcatggtcaattcactatatatgatgaagacaacattagctctatttgaattcactgacagacgtctggaaatgctacagtttcagatcgaagcacatttggacacacttataaatgagcaagcctcttatgttttaactagggtaggcttgagttacatctataacactgtacagcaacataaacctgaacagggctctttagctaatatgcccaacctagattctgtgacactgaaggctgcaatggttcagtttgatcgttatctgtcagccccagacaacctattgataccacagctgaactttcttctaagtgccacagtgaagcgtccacccaacggcccatgatcatcttgtaaccagtgcaggaccttgtgcttctggagccattccagttgtgggaggtgatgtctcggaaaactctgccttggggactggctatagaaatgtggccagatggctttgtcatcttcccctgtctactctgtgactcttcatctggtggaaatgctgtgagggatgaaccaaatggaaactcagatttactcttcagaataatgcggatcataatacgcacacacacagcatgtagagttgctgtgtggcttaaataagtaaatgtatgcaaagcactaaaatggtgtctgtctaagtgtaaacaccaattgtgttggctattatcactattgttgttcttatctcaaatatgtgttactttctaaataactttagtgttcatagattgttaaaagacaagatgacctgaagaaaagtaagccctaaaaatccattattaacttttttctccaccactcttttcttctaaacttcactattctttgtgttttcacaaaagttgcttacttcacctggcagagatagcattacgcaggggatgattaaaatatactcacttgtacttgttggttttaaattttattatttatgaataggtaatagcatgtacactgtaaaaatctcaaaaggcaaaaaaggatatacagtaaacattaagttcctcttaccctggaccttagccatcaagttctcttccccataggcaatccctgttgcctaatttccaattcccctgcatactttaaagatcatctgtgcatctgcactcagaccactcacacgtctaaaacaaatgatagcacactacacacaaagttctgttcctttttatgctcaatgatatgttttgcatcatatttcactgccgtataaataatgctgcctcgatttttaaaataactgaacagtaatacacagtatgaatttactccaatttataatccaatccttagttaatggatattttgattttgttgttaagaatcatgcagcaatgatgtacctgttagacatgagttattaatttctcttcgaagaatcaatatgtcactacgttcaattctttgccttctacttttaaacttcacttcctcataaagcaaccttttgcgatcatctgctccaccctgactcattccaatcacctgctccaccctgactcattctgatcacctgctctgcccagactcattcccatcacctgctccaccctgacttattccaattacctgctccaccctgtctcattctccaccctgactcattccataaccatttttcccaccaaaccagtcaccccctcaccctctttaaattagctaatcggaattagtttagcttgtgtggtctaacctagccaatagatgaatgacacagcagcaggagccacgttcgtcagggataagaacaccttccccttccttgtccaggggtgtactcaccattgctccatctgtgagggcgcacccttctatagaagtaaattgccttgctgagaagaaaaaaagaaaattttatatttgagtgctatttattttgtggcaccaaaactatttataacatacctgatctttattttaaatttttgtttatttaaatattaaatatattatccacctggtattaatttgtttaaataaatgtgaggtagggttccattgctattttttaaccaggtaggttatattgactaaccttcactttgaaagtgatttgaaatacacttttcatttattaaattctcccttgtgtttaggcagtaaggcataatatttgagagtgtgggctctgcagtccagctatctgggtttgaagtttatctcctttatttgcgagtggtacaaacttgaacaaattatgtaatttgtttttctcaattccctcatgcactaagtgaggataaaaatagcaataacaccatgagattgctgataacaaaatgcaaggtaaaaattgtgtaaggcttaaaattgtgtagcctggtatacaagaggctctaaataacataagctattattgcttttctacttattattatttctggcttttgtagtctttttcccattgttgatctttctactattcacaaagcatgagtctagtatctgtagatttataaactaattaatgtaacttttcaatatgttttaatatctcatagatactgttcttcctcattacttttctattttataaatttctatttcatctgcttcataaattttgcattctcataaactaagaatcatctcctgtagttaaaaaatattgtttgtatttttgttgggagtagagtgaattaaaatatattgacttaaggagaactgacatctttataatattgaatcttcctgtttgagattggactttatgtccatattttaaagtctttgtttatgaccctaagtataattttaacgtttttatattaggcttatttctagatactttttgttaatatatcatctaactggttgttcttcatatatataatgactatgaattttttctcagtcttttttctgaattctcacatcatttgtgttatatttttaagttgattctcttgagtttttcaggtaaacaattatatcacctataaaaataatgttgccaccttaaattaagaaaatgtttttctattgtctaattgcatggactgttgcctcaggaacagtataagattgcttacaaaagccttgctttcttgttccagattttaaaaacaaggctttcaatgacaatctcgctagcaagaagctggtatacttacatacatacatacaaacagacagacacccactttctatatgtatatctagatagatttagatagacatatatgtgtgattcctgttaagatgaatctatttttggtatttaagattttaaaaatctagaatgggtattattatattgtattgaagctcttaagcatctatggaaatgaaagtatgattcttctctttcgactaattaatatgtgatccatagtattttagtaacagatttcctaatatcgaatgatctaggcattgattctagcagattatgtctatgggtattttatttaagattttgcatcagtattaataaatgaccatggtctatgggtttgcttttttgtgtgctatgtttgcagagtgtttgtagtttacaagagatttttgcaaacttctatttatgacaatatggtagattatatatctgaaaaaaaaaccttctcattacagaacatatacaaaactgctgaataaaacgaggcaaccaacattttaaatatatggttaataaggtttt

SEQ ID NO: 122035 - DNA, 546 bp, Homo sapiens
  Payload ID: 3922
  Gene Symbol: COG6
  Gene Name: component of oligomeric golgi complex 6
  ENST ID: ENST00000543790
  CDS Start-End: 66-251
actcgcgctgcctccgtggtccctgcctggctgaggtggcagcagggggcgggacgcgcagcgctatggcagagggcagcggggaagtggtcgcagtgtctgcgaccggggctgccaacggcctcaacaatggggcaggcgggacctcggcgacgacctgcaacccgctgtcgcgcaagctgcataagatcctggagacgcggctggacaacgacaaggtgccttcaaggctctctggatgggattggtgaacggtggtgcctcgagaagtgtcctccaaacacccctggaggcgtttggctgtgtgagctgggagagtggaggagagcacaagactggatatgaaacagatgcaaaagagcagattccaagataaggaattaggaatcctgctgttaagtttctcatggttgttatttgaggactcagtgagagactccaggagatgttagaagctctcaaggcactttcaaccttttttgttgaaaatagtctgcggactcgaagaaatttacgtggagatattgaacgtaaaagtttagccat

SEQ ID NO: 122036 - DNA, 553 bp, Homo sapiens
  Payload ID: 3922
  Gene Symbol: COG6
  Gene Name: component of oligomeric golgi complex 6
  ENST ID: ENST00000543804
  CDS Start-End: 66-254
actcgcgctgcctccgtggtccctgcctggctgaggtggcagcagggggcgggacgcgcagcgctatggcagagggcagcggggaagtggtcgcagtgtctgcgaccggggctgccaacggcctcaacaatggggcaggcgggacctcggcgacgacctgcaacccgctgtcgcgcaagctgcataagatcctggagacgcggctggacaacgacaagtctgcggactcgaagaaatttacgtggagatattgaacgtaaaagtttagccatcaatgaagaatttgtaagcattttcaaggaagtgaaggaggaacttgaaagcataagcgaagatgttcaagcaatgagcaactgttgtcaagatatgacaagtcgcctacaggcagcaaaggaacagactcaagatttaatagtaaaaaccactaagcttcaatctgaaagccaaaaattagagataagagctcaagttgcagatgccttcttatccaagttccaactgacttctgatgaaatgagtcttctccgaggtacaagagaaggacccattactg

SEQ ID NO: 122037 - DNA, 528 bp, Homo sapiens
  Payload ID: 3922
  Gene Symbol: COG6
  Gene Name: component of oligomeric golgi complex 6
  ENST ID: ENST00000542266
  CDS Start-End: 77-262
acatgcgcaatactcgcgctgcctccgtggtccctgcctggctgaggtggcagcagggggcgggacgcgcagcgctatggcagagggcagcggggaagtggtcgcagtgtctgcgaccggggctgccaacggcctcaacaatggggcaggcgggacctcggcgacgacctgcaacccgctgtcgcgcaagctgcataagatcctggagacgcggctggacaacgacaaggtgccttcaaggctctctggatgggattggtgaacggtggtgcctcgagaagtgtcctccaaacacccctggaggcgtttggctgtgtgagctgggagagtggaggagagcacaagactggatatgaaacagatgcaaaagagcagattccaagataaggagatgttagaagctctcaaggcactttcaaccttttttgttgaaaatagtctgcggactcgaagaaatttacgtggagatattgaacgtaaaagtttagccatcaatgaagaatttgtaagcattttcaaggaagtgaa

SEQ ID NO: 122038 - DNA, 564 bp, Homo sapiens
  Payload ID: 3922
  Gene Symbol: COG6
  Gene Name: component of oligomeric golgi complex 6
  ENST ID: ENST00000536488
  CDS Start-End: 1-403
cttttttgttgaaaatagtctgcggactcgaagaaatttacgtggagatattgaacgtaaaagtttagccatcaatgaagaatttgtaagcattttcaaggaagtgaaggaggaacttgaaagcataagcgaagatgttcaagcaatgagcaactgttgtcaagatatgacaagtcgcctacaggcagcaaaggaacagactcaagatttaatagtaaaaaccactaagcttcaatctgaaagccaaaaattagagataagagctcaagttgcagatgccttcttatccaagttccaactgacttctgatgaaatgagtcttctccgaggtacaagagaaggacccattactgagtttagaaattatggaacagatggccttacttcaagaaacggcttatgaaagactttaccgatgggctcaaagtgaatgcagaacattgacacaagaatcatgtgacgtatctccagtattgacacaggcaatggaagccctgcaggacagacctgtcttatataaatataccttagatgaatttggaacagccagaagaagtacagttg

SEQ ID NO: 122039 - DNA, 186 bp, Homo sapiens
  Payload ID: 3922
  Gene Symbol: COG6
  Gene Name: component of oligomeric golgi complex 6
  ENST ID: ENST00000630730
  CDS Start-End: 1-186
atggcagagggcagcggggaagtggtcgcagtgtctgcgaccggggctgccaacggcctcaacaatggggcaggcgggacctcggcgacgacctgcaacccgctgtcgcgcaagctgcataagatcctggagacgcggctggacaacgacaaggtgccttcaaggctctctggatgggattggtga

SEQ ID NO: 122040 - DNA, 2926 bp, Homo sapiens
  Payload ID: 3923
  Gene Symbol: COG7
  Gene Name: component of oligomeric golgi complex 7
  Uniprot ID: P83436
  ENST ID: ENST00000307149
  CDS Start-End: 187-2499
tcccagccgcaaactgagtgcgctgagcggggaagcgcaaaggggcaagttacccgtcctggcgtttctggggttcgcctcggaggctagcctcggtgctctcgcaggctcgctcgcttctgcatccccgttgccgcccggagccaactcttaagttctggacgccaggcctgaggcagttccgccatggacttctccaagttcctggcagacgacttcgacgtgaaggagtggatcaatgcggccttcagggccggctccaaggaggcggcgtccgggaaggcggatggccacgcagccaccctggtgatgaagctgcagctgttcatccaagaggtgaaccacgccgtggaggaaacaagtcaccaagctctccagaacatgcccaaagtgctccgtgatgttgaagccctaaaacaggaggcatctttcctgaaagaacagatgattcttgtcaaggaggacattaaaaaatttgaacaggacacatctcaatccatgcaggtgttggtagaaattgaccaagtgaagtccagaatgcaacttgctgccgaatctcttcaggaagcagataagtggagcacgttgagcgccgatattgaggagacatttaagactcaggacatagctgtgatttctgccaagctaacaggtatgcagaacagcttaatgatgcttgttgatacaccagactactcagaaaagtgtgtgcacttggaggcactgaagaacaggctggaggccctagccagtccacagattgtagcggcattcacctctcaggctgtagatcagtccaaagtgtttgtgaaggtgtttactgaaattgaccggatgccccagctcctggcctactactacaagtgtcacaaggtgcagcttttagcagcctggcaagagctgtgtcaaagtgacctatccctggaccggcagcttaccggactctatgatgccttgcttggtgcttggcacacacaaatccagtgggctacacaggttttccagaagccccacgaggtggtaatggtgctgctgattcagaccctgggggccctcatgccctcgctgccctcctgcctcagcaacggcgtggagagggcagggcccgagcaggagctcaccaggctgctggagttctacgacgccaccgcccacttcgccaagggcttggagatggcactgctcccccacctacatgaacacaatctggtaaaagtcacggagctggtggatgctgtgtatgatccatacaaaccctaccagctgaagtatggcgacatggaagagagcaacctcctcatccagatgagtgctgtgcctctggagcatggggaagtgattgactgtgtgcaggagctgagccactccgtgaacaagctgtttggtctggcgtctgcagccgttgacagatgcgtcagattcaccaatggcctggggacctgcggcctgttgtcagccctgaaatccctctttgccaagtatgtgtctgatttcaccagcactctccagtccatacgaaagaagtgcaaactggaccacattcctcccaactccctcttccaggaagattggacggcttttcagaactccattaggataatagccacctgtggagagcttttgcggcattgtggggacttcgagcagcagctagccaacaggattttgtccacagctgggaagtatctatctgattcctgcagcccccggagcctggctggttttcaggagagcatcttgacagacaagaagaactctgccaagaacccatggcaagaatataattacctccagaaagataaccctgctgaatatgccagtttaatggaaatactttatacccttaaggaaaaagggtcaagcaaccacaacctgctggctgcacctcgagcagcgctgactcggcttaaccagcaggcccaccagctggctttcgattccgtgttcctgcgcatcaaacaacagctgttgcttatttcgaagatggacagctggaatacggctggcatcggagaaaccctcacagatgaactgcccgcctttagtctcacccctctcgagtacatcagcaacatcgggcagtacatcatgtccctccccctgaatcttgagccatttgtgactcaggaggactctgccttagagttggcattgcacgctggaaagctgccatttcctcctgagcagggggatgaattgcccgagctggacaacatggctgacaactggctgggctcgatcgccagagccacaatgcagacctactgtgatgcgatcctacagatccctgagctgagcccacactctgccaagcagctggccactgacatcgactatctgatcaacgtgatggatgccctgggcctgcagccgtcccgcaccctccagcacatcgtgacgctactgaagaccaggcctgaggactatagacaggtcagcaaaggcctgccccgtcgcctggccaccaccgtggccaccatgcggagtgtgaattactgaccccaccacacaccggaccaccaagagagccagggctgctgtttcgcgactcaccagcacagatttgctcagaaactctgcccaagattgggcagaagttactttaaaaagacttggttcagctggtcacggtggctcacgcctgtaatcccagcactttgggaggccaagccagatggatcatgaagccaggagttcgagaccagcctgaccaacatggtgaaaccccatctctactaaaaatacaaaaattaacagcagagcgagactctgtctcaaaaaaaaaaaaaaaaaagacttggttcatttgtataatcaaaaagagttgtaaattaaagatgtattatttatcagagaagactttttagataatttttttaaaggatcagatcttgaaaatggaataaataactactgtgaaatgcaa

SEQ ID NO: 122041 - DNA, 814 bp, Homo sapiens
  Payload ID: 3923
  Gene Symbol: COG7
  Gene Name: component of oligomeric golgi complex 7
  ENST ID: ENST00000561854
  CDS Start-End: 1-265
gaatcttgagccatttgtgactcaggaggactctgccttagagttggcattgcacgctggaaagctgccatttcctcctgagcagggggatgaattgcccgagctggacaacatggctgacaactggctgggctcgatcgccagagccacaatgcagacctactgtgatgcgatcctacagatccctgagctgagcccacactctgccaagcagctggccactgacatcggttctccaggccctgccccagagattctgacttagcaagaccgggctgaagctcagacatctatgttttcgaagaggacttgagaaccgttgaggggagcttcagtgagataagattcagcgagtcctgcagcctggccccacctggcccgctccatttgtgccataattcccaaccagtgtttaatgagctcttactgcataccaggcatgcctggcgctggaccaagcactcgcacccatcgtcttatgtaattccaaactcccctgtgagactatctgatcaacgtgatggatgccctgggcctgcagccgtcccgcaccctccagcacatcgtgacgctactgaagaccaggcctgaggactatagacaggtcagcaaaggcctgccccgtcgcctggccaccaccgtggccaccatgcggagtgtgaattactgaccccaccacacaccggaccaccaagagagccagggctgctgtttcgcgactcaccagcacagatttgctcagaaactctgcccaagattgggcagaagttactttaaaaagacttggttcagctggtcacggtggctcacgcct

SEQ ID NO: 122042 - DNA, 741 bp, Homo sapiens
  Payload ID: 3923
  Gene Symbol: COG7
  Gene Name: component of oligomeric golgi complex 7
  ENST ID: ENST00000563164
  CDS Start-End: 1-341
aggactctgccttagagttggcattgcacgctggaaagctgccatttcctcctgagcagggggatgaattgcccgagctggacaacatggctgacaactggctgggctcgatcgccagagccacaatgcagacctactgtgatgcgatcctacagatccctgagctgagcccacactctgccaagcagctggccactgacatcggtgggtccccacaagacaggcggtgggagggacagctcttgcctgctgcatctgtcagtttctcctttgccctccaggaatctcatcccaagtcttcccttagcttcagctgtggatttggctctgaagctggttgaaaattcaggttctccaggccctgccccagagattctgacttagcaagaccgggctgaagctcagacatctatgttttcgaagaggacttgagaaccgttgaggggagcttcagtgagataagattcagcgagtcctgcagcctggccccacctggcccgctccatttgtgccataattcccaaccagtgtttaatgagctcttactgcataccaggcatgcctggcgctggaccaagcactcgcacccatcgtcttatgtaattccaaactcccctgtgaggtgggtgctctcttctccatcataccgatagggaacggaggcccagggcagttccataacaaggccatgtggccagggtcactttgtggtctccatccagatagcatcctgcctgccaa

SEQ ID NO: 122043 - DNA, 4247 bp, Homo sapiens
  Payload ID: 3924
  Gene Symbol: COG8
  Gene Name: component of oligomeric golgi complex 8
  Uniprot ID: Q96MW5
  ENST ID: ENST00000306875
  CDS Start-End: 116-1954
aagccggccggatgagaaagcatagagaccggaaatgtgcctgtttcttcctgtcctaagttcggagtcagcgccccttgtggtccggaagggaagtgacgttgttgctgggaagatggcgaccgcggcgactatcccatcggtagccacggccacagcagcggctctcggcgaggtggaggatgaagggctcctggcgtcgctgttccgggaccgcttccccgaggcccagtggcgcgagcggcccgatgtgggccgctacctccgggagttgagcggctcggggctggagcggctgcggcgcgagcccgagcgcctggcggaggagcgggcgcagctgctgcagcagacgcgcgacttggccttcgctaactacaagaccttcatccgcggcgccgagtgcaccgagcgcatccaccgcctgtttggcgacgtggaggcgtcgctcggccgcctgctcgaccgtttgcccagcttccagcagagctgcaggaactttgtgaaggaagccgaggagatcagctccaaccgccggatgaatagcctgaccctaaaccggcacacagaaattttggaaatactggagattcctcagctcatggacacctgtgtccggaacagttattatgaagaggccctggagcttgcagcctacgtacgccgactggagaggaaatactcttccatccctgtcatccagggcatcgtgaacgaagtgcgccagtccatgcagctgatgctgagccagctgatccagcaactgaggaccaacatccagcttcctgcctgcctccgtgtcattggctacctgcggcgcatggacgtcttcactgaggctgagttgagggtgaagtttcttcaggcccgagatgcttggctccggtccatcctgactgccattcctaatgatgatccctatttccatattacaaaaaccatcgaggcctcccgtgtccatctctttgatatcatcacccagtaccgtgccatcttctcagacgaggacccactgctgccccctgccatgggtgagcacactgtgaatgagagtgccatcttccatggctgggtgctacagaaggtctcacaattcctgcaggtgctggagaccgacctttaccggggcataggcggccacctggactctctgctgggccagtgcatgtactttgggctgtccttcagccgggtgggagctgatttccggggtcagttggctcctgttttccagcgggtggccatcagcactttccagaaagcaattcaggaaacagtggagaaattccaggaagaaatgaactcctacatgctcatctcggctccagccatcctgggcaccagtaacatgcctgctgctgtgccagccacccagccggggacgctgcagccacccatggtgctcctagatttcccacccctcgcctgctttctcaacaatattctggttgccttcaatgatctgcgcctctgctgccctgtggccctggcgcaggatgtgactggggccttggaagatgcccttgccaaggtaactaaaataatcctggccttccatcgcgctgaagaggctgccttcagcagcggggagcaagagctctttgtccagttctgcactgtcttcctggaagaccttgttccgtatttaaatcgctgtctccaagtcctttttccaccagctcagatagcacagactttaggcattcctcccactcagctctccaagtacggtaacctagggcatgtgaacatcggcgccattcaggagcccctcgcctttatcctgccaaagagagagacgcttttcaccctggatgaccaggcgctggggcccgagctcacagctccagcaccagagcctcccgccgaggagccacgcctggagcccgcgggcccagcctgcccggagggagggcgagcggagacgcaggccgaaccgcccagcgtggggccctagccggcgtcccctgcctccagaacgcgggctggaccccaatggagaacaggtggtgtggcaggcgagcgggtgggcagcccgcatcatccagcacgagatggaccacctgcagggctgcctgtttattgacaaaatggacagcaggacgttcacaaacgtctattggatgaaggtgaatgactaaagctttgctactggggctgaggattccggataccaagacgcaaacactttcactttgagctgggcaaatcttacttggcatcaacttggatggctcgcatatgacaggaaactggattgccaaggcatggcagactgagctggaggaagatgtcagaaatgtttgccctgaaatcagttacggacaaaatgttggctacaacttgaggagaaaaatcacccccaaaggagtggacatttcctaacaattctgtatggaggaaggtggggtaattgcattcgtctgcagtagacacgagttcctcggacctgtataatctcccaaagccaaggtttggtaataatgtagtccccaaatacctgaaagctgtctttaaaaatgcaggtaagcatgtgactggccatttgtgccgagttcttatttttacggagggcttgtggccttagacgccagtttgcttatggaaatgaaagagaatagtccctgttcaaggatgtgtttcatgacagcacgagtgtaaatgagtgcccacacattttaacagccttgggcaggattttgctgctgagatccctagagcagctggttcttggctcattcttggggtagaggccgtggatcagggctgggggcaggggtgacaattgagaagtgcactgagccctttcctgttaacaattgggcatagaaagcaggattagtacttcctggttatacacttattttgtaaaaatagaattaatatcacagcaaccaatgtgtaggtttaagaaagtggccaggtgcagtggttcacgcctgtaatcccagcactttgggagggcggggcgggtggatcacgaggtcaggagctcaagaccagcctggccaagatggtgaaaccctgtctctactaaagatacaaaaattagccgggcgtggtggcgagcacctgtaatcccagctactcgtgaagccaaggcagagaattacttgaacccaggaggcggaggttacagtgagctgagatcacgccactgcactccatccagcctgggcgacagagcgagactcaaaagtatgattctggctgtagagttttctttttttctctgtctcaaaaaaaaaaagtgtcagctttgtcttgtcaagaggtgaaggaacttgttttattcttttattttttttttaagatagagacgggggtcttactatgttgcccaggctggcctcaaattcctggtctcaggcaatcctcctgcctcggcctcccaaagtgctgggatcagttgtgagccacactacccagccaaactccagttttagttaaactgtttcacctcatttttatgctgagttttgtaaagtaggtattcttgctgaacagagtcctgaaaatcaaactatacaagtagtaggaagtccattaagctgtttagaggaaaaagtgttataaatggcagttaaatgaacccaggaaagacccatcctcctttgtggctttctctgaggccccatgaggccaagcagaagcaaactggctctaggtgcagccagactttgaaaaggaatcccggccaggcttggtggctcatgcctgtaatcccagcactttgggaggtcaaggcaggcagatcacctgaggtcaggagttcaagaccagcctggccaacatggcgaaacactgtttctactaaaaatatgaaaattagctgggtgtgctggtaggcgcctgtaatcacagctacttgggaggctgaggcgggagaatcgctcaaacctgggaggcagaggttgcagtgggctgagatctcgccactgtactccagcctgggcgacagaccaaggctctgtctcaaaaaaaaaaaaaaaaaaaaaaaaagggaatcccaaccagatactggtgcaaggtcagagatgcagccaatggggagatttgtagaaagctcatagatgctaaaaacatgggtctttaggaaaattagaattcagctgagcctcctttcatttggacaatgttcagaagctcttacagggggctatggcaatcttttgatgcttcttatagctttctgaggttaacgcttttgtggtgggcatcggtagcaataaaatgcaaactttattgca

SEQ ID NO: 122044 - DNA, 1731 bp, Homo sapiens
  Payload ID: 3924
  Gene Symbol: COG8
  Gene Name: component of oligomeric golgi complex 8
  ENST ID: ENST00000562081
  CDS Start-End: 32-1636
ccggaagggaagtgacgttgttgctgggaagatggcgaccgcggcgactatcccatcggtagccacggccacagcagcggctctcggcgaggtggaggatgaagggctcctggcgtcgctgttccgggaccgcttccccgaggcccagtggcgcgagcggcccgatgtgggccgctacctccgggagttgagcggctcggggctggagcggctgcggcgcgagcccgagcgcctggcggaggagcgggcgcagctgctgcagcagacgcgcgacttggccttcgctaactacaagaccttcatccgcggcgccgagtgcaccgagcgcatccaccgcctgtttggcgacgtggaggcgtcgctcggccgcctgctcgaccgtttgcccagcttccagcagagctgcaggaactttgtgaaggaagccgaggagatcagctccaaccgccggatgaatagcctgaccctaaaccggcacacagaaattttggaaatactggagattcctcagctcatggacacctgtgtccggaacagttattatgaagaggccctggagcttgcagcctacgtacgccgactggagaggaaatactcttccatccctgtcatccagggcatcgtgaacgaagtgcgccagtccatgcagctgatgctgagccagctgatccagcaactgaggaccaacatccagcttcctgcctgcctccgtgtcattggctacctgcggcgcatggacgtcttcactgaggctgagttgagggtgaagtttcttcaggcccgagatgcttggctccggtccatcctgactgccattcctaatgatgatccctatttccatattacaaaaaccatcgaggcctcccgtgtccatctctttgatatcatcacccagtaccgtgccatcttctcagacgaggacccactgctgccccctgccatgggtgagcacactgtgaatgagagtgccatcttccatggctgggtgctacagaaggtctcacaattcctgcaggtgctggagaccgacctttaccggggcataggcggccacctggactctctgctgggccagtgcatgtactttgggctgtccttcagccgggtgggagctgatttccggggtcagttggctcctgttttccagcgggtggccatcagcactttccagaaagcaattcaggaaacagtggagaaattccaggaagaaatgaactcctacatgctcatctcggctccagccatcctgggcaccagtaacatgcctgctgctgtgccagccacccagccggggacgctgcagccacccatggtgctcctagatttcccacccctcgcctgctttctcaacaatattctggttgccttcaatgatctgcgcctctgctgccctgtggccctggcgcaggatgtgactggggccttggaagatgcccttgccaaggtaactaaaataatcctggccttccatcgcgctgaagaggctgccttcagcagcggggagcaagagctctttgtccagttctgcactgtcttcctggaagaccttgttccgtatttaaatcgctgtctccaagtcctttttccaccagctcagatagcacagactttaggtaagagaatgaaaattctgtaaactgccttactgatgtgtaattcacatactaaataattcatccatttgtgtaagtcagtgttttttagtaaatatgaatccaattttagaatatt

SEQ ID NO: 122045 - DNA, 2262 bp, Homo sapiens
  Payload ID: 3924
  Gene Symbol: COG8
  Gene Name: component of oligomeric golgi complex 8
  ENST ID: ENST00000562595
  CDS Start-End: 1-670
ggtggaggatgaagggctcctggcgtcgctgttccgggaccgcttccccgaggcccagtggcgcgagcggcccgatgtgggccgctacctccgggagttgagcggctcggggctggagcggctgcggcgcgagcccgagcgcctggcggaggagcgggcgcagctgctgcagcagacgcgcgacttggccttcgctaactacaagaccttcatccgcggcgccgagtgcaccgagcgcatccaccgcctgtttggcgacgtggaggcgtcgctcggccgcctgctcgaccgtttgcccagcttccagcagagctgcaggaactttgtgaaggaagccgaggagatcagctccaaccgccggatgaatagcctgaccctaaaccggcacacagaaattttggaaatactggagattcctcagctcatggacacctgtgtccggaacagttattatgaagaggccctggagcttgcagcctacgtacgccgactggagaggaaatactcttccatccctgtcatccagggcatcgtgaacgaagtgcgccatgctgggattacaggcgggagccacggcgcccggccaggagccttcttagctgcacacccccaacaccagccacaagggcagacccttgccaggatggcacgggccaggctatgcaggtgaggcgctgcctttgcaactgcgtcacagtcttgacacattcactgcctcactgcaccgcaaagccaaacccatggattgacgtcatattatctggacctgactttacttgctaaagaatataaaatgcaggctaggtgtggtggctcagctcatgcttgtaatcccagcactttgggaggccacgctgagaggatcacttgagcccagcagtttcagactggcctgggcaacactgtgaggccgtttctaaaaaaaaaaggaaaaattagctgggcatgatggtgtgtgcctgttgctactcaggaggctgaggtcagaagattgtgtgagctcgtgaggtcaagcctgcagtgagctatcactgcaccactgcatctagcctttctctgtatgtacaaaatgctaatgctgccacctgcattctgggcccccagtgagtgtaatgccagcttccctgagctacaaaggccattctcaacagcccaggacatagaagaagactattttttatttttgagacggagtctcactctgtcacccaggctggagtgcagtggcccaatctctgctcactgcaacctctgcctcccggcttcaagcgatccttctgcctcagcctcctgagtagctgggactacaagtgcacaccaccacacccggctaatttttgtatttttagtagagacagggtttctccatattggctaggctggtctcgaactcctaaccttgtgatctgcccaccctggcctcccaaagtgctgggattacaggcgtgagctaccatgcctggcctggagaagaccgtttttattctggacccaaaccctcaattttctgggctctgtgcagccctcttccctcccctgtcaagtcacttaccatgcaaaccacaggctctaagagtttgtccccagggacatccatccaagtcatctccatggctcctgggtcccctggtgagcatggagtcaggaggtcatcaatcatcatgctggggttggtgcgagaggggccacagacctgaaaccaaatggatctgactggggcagctgcccctcagtgtcagaggggctcgacccctccggtctctaaggaagtcccaaagagaatgctctgtgggtccctagcatctgaggaggacgggctccttcagaactcgggctgggtggtccgagcgactcatgatttgcatgggactctggcaatctgtagccccaatgccttgatgtcttcctcattaacactgtcacgtctcaccaggaatacagtgacattaaaagtgtgatatggtttagctgtgcccccacccacatttcaacttgaactgtatctatctcccagaattcccacatgttgtgggagggacccagggggaggtaactgaatcatgggggctggtctttcccgtgctattctcgtgatggtgaagtctcacgagatctgatgggtttatcaggggtttccacttttgtttcttcattttctcttgccaccagcatgtaagaagtgcctttggtctcctaccatgattctgaggcctccctagccatgtggaactgtaaggccaattaaacctctttttcttccca

SEQ ID NO: 122046 - DNA, 712 bp, Homo sapiens
  Payload ID: 3924
  Gene Symbol: COG8
  Gene Name: component of oligomeric golgi complex 8
  ENST ID: ENST00000567493
  CDS Start-End: 414-712
cacaaagaaaaaggattcatgcaaagctcttattatcgggtctgacacagttaacattataggtgtgagctgaatatatgtgcacatttatatacttattttatacgaaagcgtggaccggaggtcatctgcttcaaaacttccattgacgggaaggtgacaaggaaatcctcgcatttgagggcatcagatatcaaaaagtctctccatttggatggctggatgtggtggctcagcctgtaatcccagcactttgggagcctgaggcttgaacccaggagttcgagagcagcctggccaacatggcaaaaccctgtctctataaaataaaaaattagctggtcgtggtggcgtgcgcctgtagtcccaggaactttgtgaaggaagccgaggagatcagctccaaccgccggatgaatagcctgaccctaaaccggcacacagaaattttggaaatactggagattcctcagctcatggacacctgtgtccggaacagttattatgaagaggccctggagcttgcagcctacgtacgccgactggagaggaaatactcttccatccctgtcatccagggcatcgtgaacgaagtgcgccagtccatgcagctgatgctgagccagctgatccagcaactgaggaccaacatccagcttcctgcctgcctccgtgtcattggctacctgcggcgcatggacgtcttcactga

SEQ ID NO: 122047 - DNA, 426 bp, Homo sapiens
  Payload ID: 3924
  Gene Symbol: COG8
  Gene Name: component of oligomeric golgi complex 8
  ENST ID: ENST00000615447
  CDS Start-End: 1-365
cggctctcggcgaggtggaggatgaagggctcctggcgtcgctgttccgggaccgcttccccgaggcccagtggcgcgagcggcccgatgtgggccgctacctccgggagttgagcggctcggggctggagcggctgcggcgcgagcccgagcgcctggcggaggagcgggcgcagctgctgcagcagacgcgcgacttggccttcgctaactacaagaccttcatccgcggcgccgagtgcaccgagcgcatccaccgcctgtttggcgacgtggaggcgtcgctcggccgcctgctcgaccgtttgcccagcttccagcagagctgcaggtgcgacgcgcctggcgctaaaggggttttataactgtaaaagctgacatttacgatggtagaaataactaacacataaagcgtttaccacgttc

SEQ ID NO: 122048 - DNA, 4470 bp, Homo sapiens
  Payload ID: 3925
  Gene Symbol: CRX
  Gene Name: cone-rod homeobox
  Uniprot ID: O43186
  ENST ID: ENST00000221996
  CDS Start-End: 208-1107
cccaccttggccgggattaccctccgagttccaggccatgacaaatgacatcactcccggcccaggcttaaaatctccccatgtgaggggatgtgtttccttcagcctctgctgtctggccgctctgtctaggtcctgggccacgggagagccccgtccctcctttctgaaggccccctgacttgggcctcagtgtccccgaagatcatgatggcgtatatgaacccggggccccactattctgtcaacgccttggccctaagtggccccagtgtggatctgatgcaccaggctgtgccctacccaagcgcccccaggaagcagcggcgggagcgcaccaccttcacccggagccaactggaggagctggaggcactgtttgccaagacccagtacccagacgtctatgcccgtgaggaggtggctctgaagatcaatctgcctgagtccagggttcaggtttggttcaagaaccggagggctaaatgcaggcagcagcgacagcagcagaaacagcagcagcagcccccagggggccaggccaaggcccggcctgccaagaggaaggcgggcacgtccccaagaccctccacagatgtgtgtccagaccctctgggcatctcagattcctacagtccccctctgcccggcccctcaggctccccaaccacggcagtggccactgtgtccatctggagcccagcctcagagtcccctttgcctgaggcgcagcgggctgggctggtggcctcagggccgtctctgacctccgccccctatgccatgacctacgccccggcctccgctttctgctcttccccctccgcctatgggtctccgagctcctatttcagcggcctagacccctacctttctcccatggtgccccagctagggggcccggctcttagccccctctctggcccctccgtgggaccttccctggcccagtcccccacctccctatcaggccagagctatggcgcctacagccccgtggatagcttggaattcaaggaccccacgggcacctggaaattcacctacaatcccatggaccctctggactacaaggatcagagtgcctggaagtttcagatcttgtagaggacgcagtctccatctctctccatcgggcctcgggaccctttctcttctgaatctgcttccctgcagtttagatcccgggatggcattcctgagaaagcaacccgaaccagctgtccttctgacagctcggtgttcagcttacagagaccacccctttcctccacagggagaggctcctccctctcctgggacagctcacaggtcctagtgattctctcaaccctaacaccgtctggcacgattgtgaccgctgaagtacaccacgagctccaggcttcagaaagtggtgctgagaacttgctccaagaagaagtcaaaccaaacttgcagttgatttggggtcatgtttaggtcagaatcaccgtgcccttgaacaagcaggtaggggggcttgataacttaactttccacgtggacagaatttttttttttgttttgtttttgttttgcagacacagtctagctctgtcgcccaggctggagtgcagtggcacgatctcagctcactgcaagctctacctcccgggttcacgccattctcctgcctcagcctcccgagtagctgggactacagatgcccaccaccaggcccggctaattttttttgtatttttagtagagacggggtttcaccgtgttagccaggatggtctcgatctcctgacctcgtgatccgcccgcctcggcctcccaaagtgctaggattacaggcgtgagccaccgcgcccggcccttttttttttttttttttttaattgagacggagtctcactcttttgcttaggctggagtgcagtggtgtgatctcagctcactgactgcaacctccacctcccgggttgaagcgttgctcctgcctcaatctcccaattagctgggattacaggtgtgctccatcatgcccggctaatttttctattattagtagagacagggttttaccatgttggccaggctggtctggaacccctgacctcaagtgatccgcctgcctcggcctcccaaagtgctgggattacaggcatgagccattgtgcctggccctacacgtggacacttctttagcatatggttagggacctttctagaaattccaaagacagactttaagaagccccgtcgggaaaccttaggccaatgatgtggttacattaaaaataaattatctgggaatttcacagacttcacaaatgtcaggcttacatggtaggtttaggggaccgtttgagagacaaagatctacattcatatatgtagctatacatatatgtactttttcttcttagtttctttttaaagacattttatcactcattcgctcattagcacattgggaatgtgtgtatttggtagggaaatgaaaggcaccttgcctgttccatctctactccttttttcttttgttttaggattttctaaaggtgagacactggtggaactggggtagctgcttgggacgtaccacctatagttgtggctatttcacagagaagcagcagctagacagactcccatctgtaaataaacaagagataggaagagggggaaatagatttggaggaggcagccctacatttcaaacatacattcccttttttagatttttttttttttttttttggttttcagttttgatggtgggattggaaaatagagcttggcttgaggacattttcctggggtggcaccattatttcttgaaatagaatcttacttatggtgacactggcaagcacttgtgagaacctgaagacggattgaggtcatttgatgctcagaagttgggtgctgggtccctgccttctcagtccgagttctcctttcatttttgggtggggaggcgggttccaagagcccttcattggtggagttcacaaggcaaggtgtaaaaaaaaaagtagggcaggaagacagtggtgtgctggcagaggtctaacaatgggctctccaaggaagaggaaaaggttggttgtggagtgtttgtcagtttccgtggtgtaaatactcccaccacggctgacttcaagctagcaaccggaggtcactgaactaagagttgggaagagatagggcacaatatatgcttacgagttggtacacaccgtcagcagcagccagggtcaggagaaaggcgagatgtgaagagaggccgggaggtatcagatgacgtttccagcactagaccagaagaggtgcacacagcctagaccccctgaggggtacaccctgatctctagagcccacaaagaggtttttattcaacataaaacgtgttcatctctcataggcctgagtcatgctgggttctgggacattaagcccaggagtgggccgggtgcggtggctcacgcctgtaatcccagcactttgggaggccgaggcgggtggatcacctgaggtcaggagttcgagaccagcctggccaacatggtgaaaccctgtctctactaataatacaaaaattagccgggcatggtggcacgcgcctgtaatcccagctactcgggaggctgaggcaggagaattgctggaacccgggaggcggaggttgaagagagcagagattgtgccactgtgctctagcctgggtcacaagagcgaaactccgtctcaataataacaacaacaaaaataacccaggagtggctcaagagtccagtgtgggatgaaaatataaacagaggaagacaacatatgtcactggggaggctgggggagctagacaaaattcacacgggaggggcagggatgagacaatattgtgccctgggtctgtgcaaacgttgggaccagaatccactataagtttcattcttcggagacacggaagctctgcactggaggccgggactcaggcgtggaagagaatcttctccttattcaccggggaggctgtgtcttgtgcaaacaagtcatagaaacttgatgggagttggggagggactgaaggatgcatgcaaggttctgggaaggagtgagaagtagtgaaggccaaggggcccccatcacaggccgatggggtaagacttcgagagagcctgatcctggggtcttctgagactccaccaggagccggagagggcagggagccaaatccagctaggaggttacagattgcttttcctgggctgggctcctgagtgttggttcttccagctgtgcacaggggatttcaaacgttctacgtcctaaagccaggaagagtgacaaggcaggtggggacagaaggaagaagccaggagcctccctgagaaggtgtcaccttatctgtcctcctcttccccacacactggcctctgggtcccccttctctgtccacccacagagtgaaaccaattaaaatgttggatctcatttaaa

SEQ ID NO: 122049 - DNA, 2275 bp, Homo sapiens
  Payload ID: 3925
  Gene Symbol: CRX
  Gene Name: cone-rod homeobox
  Uniprot ID: O43186
  ENST ID: ENST00000539067
  CDS Start-End: 140-1039
taaaatctccccatgtgaggggatgtgtttccttcagcctctgctgtctggccgctctgtctaggtcctgggccacgggagagccccgtccctcctttctgaaggccccctgacttgggcctcagtgtccccgaagatcatgatggcgtatatgaacccggggccccactattctgtcaacgccttggccctaagtggccccagtgtggatctgatgcaccaggctgtgccctacccaagcgcccccaggaagcagcggcgggagcgcaccaccttcacccggagccaactggaggagctggaggcactgtttgccaagacccagtacccagacgtctatgcccgtgaggaggtggctctgaagatcaatctgcctgagtccagggttcaggtttggttcaagaaccggagggctaaatgcaggcagcagcgacagcagcagaaacagcagcagcagcccccagggggccaggccaaggcccggcctgccaagaggaaggcgggcacgtccccaagaccctccacagatgtgtgtccagaccctctgggcatctcagattcctacagtccccctctgcccggcccctcaggctccccaaccacggcagtggccactgtgtccatctggagcccagcctcagagtcccctttgcctgaggcgcagcgggctgggctggtggcctcagggccgtctctgacctccgccccctatgccatgacctacgccccggcctccgctttctgctcttccccctccgcctatgggtctccgagctcctatttcagcggcctagacccctacctttctcccatggtgccccagctagggggcccggctcttagccccctctctggcccctccgtgggaccttccctggcccagtcccccacctccctatcaggccagagctatggcgcctacagccccgtggatagcttggaattcaaggaccccacgggcacctggaaattcacctacaatcccatggaccctctggactacaaggatcagagtgcctggaagtttcagatcttgtagaggacgcagtctccatctctctccatcgggcctcgggaccctttctcttctgaatctgcttccctgcagtttagatcccgggatggcattcctgagaaagcaacccgaaccagctgtccttctgacagctcggtgttcagcttacagagaccacccctttcctccacagggagaggctcctccctctcctgggacagctcacaggtcctagtgattctctcaaccctaacaccgtctggcacgattgtgaccgctgaagtacaccacgagctccaggcttcagaaagtggtgctgagaacttgctccaagaagaagtcaaaccaaacttgcagttgatttggggtcatgtttaggtcagaatcaccgtgcccttgaacaagcaggtaggggggcttgataacttaactttccacgtggacagaatttttttttttgttttgtttttgttttgcagacacagtctagcctgggtcacaagagcgaaactccgtctcaataataacaacaacaaaaataacccaggagtggctcaagagtccagtgtgggatgaaaatataaacagaggaagacaacatatgtcactggggaggctgggggagctagacaaaattcacacgggaggggcagggatgagacaatattgtgccctgggtctgtgcaaacgttgggaccagaatccactataagtttcattcttcggagacacggaagctctgcactggaggccgggactcaggcgtggaagagaatcttctccttattcaccggggaggctgtgtcttgtgcaaacaagtcatagaaacttgatgggagttggggagggactgaaggatgcatgcaaggttctgggaaggagtgagaagtagtgaaggccaaggggcccccatcacaggccgatggggtaagacttcgagagagcctgatcctggggtcttctgagactccaccaggagccggagagggcagggagccaaatccagctaggaggttacagattgcttttcctgggctgggctcctgagtgttggttcttccagctgtgcacaggggatttcaaacgttctacgtcctaaagccaggaagagtgacaaggcaggtggggacagaaggaagaagccaggagcctccctgagaaggtgtcaccttatctgtcctcctcttccccacacactggcctctgggtcccccttctctgtccacccacagagtgaaaccaattaaaatgttggatctc

SEQ ID NO: 122050 - DNA, 433 bp, Homo sapiens
  Payload ID: 3925
  Gene Symbol: CRX
  Gene Name: cone-rod homeobox
  ENST ID: ENST00000566686
  CDS Start-End: 262-433
aagagttgctgacaccttctctgtcccgctggaagttattttctcctccctctccctgtacagctgaccttccttccctgctgcagggccagggggtctgttccaggactggattctcccatcaggagcctctggactggtcgccgagggtcagacggcccctccctctcttgctgtcatccctggctcttcaagctaatgagacctgtcctgattcctcagccaggccccctgacttgggcctcagtgtccccgaagatcatgatggcgtatatgaacccggggccccactattctgtcaacgccttggccctaagtggccccagtgtggatctgatgcaccaggctgtgccctacccaagcgcccccaggaagcagcggcgggagcgcaccaccttcacccggagccaactggaggagctggaggcactgt

SEQ ID NO: 122051 - DNA, 4193 bp, Homo sapiens
  Payload ID: 3925
  Gene Symbol: CRX
  Gene Name: cone-rod homeobox
  ENST ID: ENST00000613299
  CDS Start-End: 83-208
tgtctaggtcctgggccacgggagagccccgtccctcctttctgaaggccccctgacttgggcctcagtgtccccgaagatcatgatggcgtatatgaacccggggccccactattctgtcaacgccttggccctaagtggccccagtgtggatctgatgcaccaggctgtgccctacccaagtttggttcaagaaccggagggctaaatgcaggcagcagcgacagcagcagaaacagcagcagcagcccccagggggccaggccaaggcccggcctgccaagaggaaggcgggcacgtccccaagaccctccacagatgtgtgtccagaccctctgggcatctcagattcctacagtccccctctgcccggcccctcaggctccccaaccacggcagtggccactgtgtccatctggagcccagcctcagagtcccctttgcctgaggcgcagcgggctgggctggtggcctcagggccgtctctgacctccgccccctatgccatgacctacgccccggcctccgctttctgctcttccccctccgcctatgggtctccgagctcctatttcagcggcctagacccctacctttctcccatggtgccccagctagggggcccggctcttagccccctctctggcccctccgtgggaccttccctggcccagtcccccacctccctatcaggccagagctatggcgcctacagccccgtggatagcttggaattcaaggaccccacgggcacctggaaattcacctacaatcccatggaccctctggactacaaggatcagagtgcctggaagtttcagatcttgtagaggacgcagtctccatctctctccatcgggcctcgggaccctttctcttctgaatctgcttccctgcagtttagatcccgggatggcattcctgagaaagcaacccgaaccagctgtccttctgacagctcggtgttcagcttacagagaccacccctttcctccacagggagaggctcctccctctcctgggacagctcacaggtcctagtgattctctcaaccctaacaccgtctggcacgattgtgaccgctgaagtacaccacgagctccaggcttcagaaagtggtgctgagaacttgctccaagaagaagtcaaaccaaacttgcagttgatttggggtcatgtttaggtcagaatcaccgtgcccttgaacaagcaggtaggggggcttgataacttaactttccacgtggacagaatttttttttttgttttgtttttgttttgcagacacagtctagctctgtcgcccaggctggagtgcagtggcacgatctcagctcactgcaagctctacctcccgggttcacgccattctcctgcctcagcctcccgagtagctgggactacagatgcccaccaccaggcccggctaattttttttgtatttttagtagagacggggtttcaccgtgttagccaggatggtctcgatctcctgacctcgtgatccgcccgcctcggcctcccaaagtgctaggattacaggcgtgagccaccgcgcccggcccttttttttttttttttttttaattgagacggagtctcactcttttgcttaggctggagtgcagtggtgtgatctcagctcactgactgcaacctccacctcccgggttgaagcgttgctcctgcctcaatctcccaattagctgggattacaggtgtgctccatcatgcccggctaatttttctattattagtagagacagggttttaccatgttggccaggctggtctggaacccctgacctcaagtgatccgcctgcctcggcctcccaaagtgctgggattacaggcatgagccattgtgcctggccctacacgtggacacttctttagcatatggttagggacctttctagaaattccaaagacagactttaagaagccccgtcgggaaaccttaggccaatgatgtggttacattaaaaataaattatctgggaatttcacagacttcacaaatgtcaggcttacatggtaggtttaggggaccgtttgagagacaaagatctacattcatatatgtagctatacatatatgtactttttcttcttagtttctttttaaagacattttatcactcattcgctcattagcacattgggaatgtgtgtatttggtagggaaatgaaaggcaccttgcctgttccatctctactccttttttcttttgttttaggattttctaaaggtgagacactggtggaactggggtagctgcttgggacgtaccacctatagttgtggctatttcacagagaagcagcagctagacagactcccatctgtaaataaacaagagataggaagagggggaaatagatttggaggaggcagccctacatttcaaacatacattcccttttttagatttttttttttttttttttggttttcagttttgatggtgggattggaaaatagagcttggcttgaggacattttcctggggtggcaccattatttcttgaaatagaatcttacttatggtgacactggcaagcacttgtgagaacctgaagacggattgaggtcatttgatgctcagaagttgggtgctgggtccctgccttctcagtccgagttctcctttcatttttgggtggggaggcgggttccaagagcccttcattggtggagttcacaaggcaaggtgtaaaaaaaaaagtagggcaggaagacagtggtgtgctggcagaggtctaacaatgggctctccaaggaagaggaaaaggttggttgtggagtgtttgtcagtttccgtggtgtaaatactcccaccacggctgacttcaagctagcaaccggaggtcactgaactaagagttgggaagagatagggcacaatatatgcttacgagttggtacacaccgtcagcagcagccagggtcaggagaaaggcgagatgtgaagagaggccgggaggtatcagatgacgtttccagcactagaccagaagaggtgcacacagcctagaccccctgaggggtacaccctgatctctagagcccacaaagaggtttttattcaacataaaacgtgttcatctctcataggcctgagtcatgctgggttctgggacattaagcccaggagtgggccgggtgcggtggctcacgcctgtaatcccagcactttgggaggccgaggcgggtggatcacctgaggtcaggagttcgagaccagcctggccaacatggtgaaaccctgtctctactaataatacaaaaattagccgggcatggtggcacgcgcctgtaatcccagctactcgggaggctgaggcaggagaattgctggaacccgggaggcggaggttgaagagagcagagattgtgccactgtgctctagcctgggtcacaagagcgaaactccgtctcaataataacaacaacaaaaataacccaggagtggctcaagagtccagtgtgggatgaaaatataaacagaggaagacaacatatgtcactggggaggctgggggagctagacaaaattcacacgggaggggcagggatgagacaatattgtgccctgggtctgtgcaaacgttgggaccagaatccactataagtttcattcttcggagacacggaagctctgcactggaggccgggactcaggcgtggaagagaatcttctccttattcaccggggaggctgtgtcttgtgcaaacaagtcatagaaacttgatgggagttggggagggactgaaggatgcatgcaaggttctgggaaggagtgagaagtagtgaaggccaaggggcccccatcacaggccgatggggtaagacttcgagagagcctgatcctggggtcttctgagactccaccaggagccggagagggcagggagccaaatccagctaggaggttacagattgcttttcctgggctgggctcctgagtgttggttcttccagctgtgcacaggggatttcaaacgttctacgtcctaaagccaggaagagtgacaaggcaggtggggacagaaggaagaagccaggagcctccctgagaaggtgtcaccttatctgtcctcctcttccccacacactggcctctgggtcccccttctctgtccacccacagagtgaaaccaattaaaatgttggatctcatttaaa

SEQ ID NO: 122052 - DNA, 2339 bp, Homo sapiens
  Payload ID: 3926
  Gene Symbol: CTGF
  Gene Name: connective tissue growth factor
  Uniprot ID: P29279
  ENST ID: ENST00000367976
  CDS Start-End: 202-1251
cacacaacaactcttccccgctgagaggagacagccagtgcgactccaccctccagctcgacggcagccgccccggccgacagccccgagacgacagcccggcgcgtcccggtccccacctccgaccaccgccagcgctccaggccccgccgctccccgctcgccgccaccgcgccctccgctccgcccgcagtgccaaccatgaccgccgccagtatgggccccgtccgcgtcgccttcgtggtcctcctcgccctctgcagccggccggccgtcggccagaactgcagcgggccgtgccggtgcccggacgagccggcgccgcgctgcccggcgggcgtgagcctcgtgctggacggctgcggctgctgccgcgtctgcgccaagcagctgggcgagctgtgcaccgagcgcgacccatgcgacccgcacaagggcctattctgtcacttcggctccccggccaaccgcaagatcggcgtgtgcaccgccaaagatggtgctccctgcatcttcggtggtacggtgtaccgcagcggagagtccttccagagcagctgcaagtaccagtgcacgtgcctggacggggcggtgggctgcatgcccctgtgcagcatggacgttcgtctgcccagccctgactgccccttcccgaggagggtcaagctgcccgggaaatgctgcgaggagtgggtgtgtgacgagcccaaggaccaaaccgtggttgggcctgccctcgcggcttaccgactggaagacacgtttggcccagacccaactatgattagagccaactgcctggtccagaccacagagtggagcgcctgttccaagacctgtgggatgggcatctccacccgggttaccaatgacaacgcctcctgcaggctagagaagcagagccgcctgtgcatggtcaggccttgcgaagctgacctggaagagaacattaagaagggcaaaaagtgcatccgtactcccaaaatctccaagcctatcaagtttgagctttctggctgcaccagcatgaagacataccgagctaaattctgtggagtatgtaccgacggccgatgctgcaccccccacagaaccaccaccctgccggtggagttcaagtgccctgacggcgaggtcatgaagaagaacatgatgttcatcaagacctgtgcctgccattacaactgtcccggagacaatgacatctttgaatcgctgtactacaggaagatgtacggagacatggcatgaagccagagagtgagagacattaactcattagactggaacttgaactgattcacatctcatttttccgtaaaaatgatttcagtagcacaagttatttaaatctgtttttctaactgggggaaaagattcccacccaattcaaaacattgtgccatgtcaaacaaatagtctatcaaccccagacactggtttgaagaatgttaagacttgacagtggaactacattagtacacagcaccagaatgtatattaaggtgtggctttaggagcagtgggagggtaccagcagaaaggttagtatcatcagatagcatcttatacgagtaatatgcctgctatttgaagtgtaattgagaaggaaaattttagcgtgctcactgacctgcctgtagccccagtgacagctaggatgtgcattctccagccatcaagagactgagtcaagttgttccttaagtcagaacagcagactcagctctgacattctgattcgaatgacactgttcaggaatcggaatcctgtcgattagactggacagcttgtggcaagtgaatttgcctgtaacaagccagattttttaaaatttatattgtaaatattgtgtgtgtgtgtgtgtgtgtatatatatatatatgtacagttatctaagttaatttaaagttgtttgtgcctttttatttttgtttttaatgctttgatatttcaatgttagcctcaatttctgaacaccataggtagaatgtaaagcttgtctgatcgttcaaagcatgaaatggatacttatatggaaattctgctcagatagaatgacagtccgtcaaaacagattgtttgcaaaggggaggcatcagtgtccttggcaggctgatttctaggtaggaaatgtggtagcctcacttttaatgaacaaatggcctttattaaaaactgagtgactctatatagctgatcagttttttcacctggaagcatttgtttctactttgatatgactgtttttcggacagtttatttgttgagagtgtgaccaaaagttacatgtttgcacctttctagttgaaaataaagtgtatattttttctataaa

SEQ ID NO: 122053 - DNA, 2625 bp, Homo sapiens
  Payload ID: 3927
  Gene Symbol: CNKSR1
  Gene Name: connector enhancer of kinase suppressor of Ras 1
  Uniprot ID: Q969H4
  ENST ID: ENST00000361530
  CDS Start-End: 146-2287
atcttgccgtctgtgtgagcccaggtatgcagtaggctccgcccaggacccagcccggcccctccttaggcctgggctctgggagcggaaattccggcgacagcagggcaaaacaggagctgattcgagctggcagagctgggccatggaaccggtagagacctggacccccggaaaggtggcaacttggctgagaggtcttgacgactccctgcaggactatccctttgaggactggcagctgcctggcaagaacctgctccagctctgcccccaaagcctcgaggctctggctgtgcggtctctgggacaccaggagctcatcctgggcggggtggaacagctccaggccctgagctccaggctacagacagagaacctgcaaagcctgacagagggacttctgggggcaacccatgacttccagagcatagtccaaggctgcctgggggactgtgccaagacccctattgatgtcctctgtgcagctgtggagctgttgcatgaagctgacgccctcctcttctggctcagcaggtacctcttctcccacttaaatgatttctcagcatgccaggagatccgagacttgttggaggagctgagccaggtcttgcatgaggatggtccagcggctgagaaggagggcacagtcctgaggatctgcagccacgtggctgggatctgccacaacatcctggtctgctgccccaaggagctgctggaacagaaggccgtgctcgagcaggtgcagctggacagtccattgggcctagaaattcacaccaccagcaattgccagcactttgtgtcccaagtggacacccaggttcccactgactcccgactgcagatccagcctggagacgaggttgtccagatcaacgagcaggtggtggtgggatggccccgtaagaacatggtgagggaactgctgcgggagccagccggactcagcttagtgctgaagaagatcccgataccggagacccccccacagacgccccctcaggtcctggactccccgcaccagaggagcccatcactgtctctggccccactgtctcccagggccccatctgaagacgtctttgcctttgacctgtcttcaaaccccagtcccggacccagccctgcctggacagactctgcctcccttggccctgagcccctgcccatccccccggaacccccagccatactcccagcaggggtagcagggactccagggctccctgaatcccctgacaagagtcctgttggtcggaagaaatcaaaaggcctggcgacccggctgagccgccggcgggtgtcatgccgtgagctgggccggccggactgtgacggctggctcctgttgcgaaaggcaccgggcggcttcatgggcccgcgctggcgccgccgctggtttgtgctcaagggacacacgctctactggtaccgccagccccaggatgagaaggctgagggcctcatcaatgtctccaactatagtctggaaagtggacatgatcagaagaagaaatatgtgtttcagctcacccatgatgtgtacaaacccttcatcttcgctgctgataccctgacagatctgagcatgtgggtgcgtcatctcattacctgcatctccaagtaccagtctccaggccgggcccccccaccccgagaggaagactgctacagtgagaccgaagcagaggacccggacgatgaggctgggtcccactcagcctcgcccagccctgctcaagctgggagtcccctccatggagacacatcacctgcagccacccccacacagcgcagcccacggacctcctttggctctctgacagacagcagtgaagaggcactggaaggaatggtacgggggctgaggcagggtggcgtgtccctcctaggccagccacagcccctgacccaggaacagtggcggagctctttcatgcggcgcaaccgagaccctcagctcaatgagcgagtgcaccgtgtgcgggcgctacagagcacactcaaggcaaagctgcaggagctgcaggtcctagaagaagtgctgggtgaccctgagctgacaggagagaagttccgccagtggaaggagcagaaccgggagctgtactcagagggcctgggggcctggggagtggcacaggctgaaggcagctcccacatcttgacctctgactccacagaacagtccccccactccctgccctctgaccctgaagagcactcccatctctgccccctgacctcagagagcagcctccgacctcctgacctctgaccctggccagcactctagctcctgacctttgacccgagggccacctcaaccccagcttctgacgtgtccaggacagagcatccctggattctgttcagggtgggaagtagtactgctagtcatggtctcaccccgagctgacccctctgcctgggctttgtgccaccctctcccttgccaaagaagaaactctccccccaaatcctccaacctctggggccacagccctgcccctccagttccttggcagttctcccccaaaccaggtctgtacaggtgttctttattttacatgagggctactttccaaccaaataaagtcaatttttctaagaatg

SEQ ID NO: 122054 - DNA, 2538 bp, Homo sapiens
  Payload ID: 3927
  Gene Symbol: CNKSR1
  Gene Name: connector enhancer of kinase suppressor of Ras 1
  Uniprot ID: Q969H4
  ENST ID: ENST00000374253
  CDS Start-End: 40-2202
ggcaaaacaggagctgattcgagctggcagagctgggccatggaaccggtagagacctggacccccggaaaggtggcaacttggctgagaggtcttgacgactccctgcaggactatccctttgaggactggcagctgcctggcaagaacctgctccagctctgcccccaaagcctcgaggctctggctgtgcggtctctgggacaccaggagctcatcctgggcggggtggaacagctccaggccctgagctccaggctacagacagagaacctgcaaagcctgacagagggacttctgggggcaacccatgacttccagagcatagtccaaggctgcctgggggactgtgccaagacccctattgatgtcctctgtgcagctgtggagctgttgcatgaagctgacgccctcctcttctggctcagcaggtacctcttctcccacttaaatgatttctcagcatgccaggagatccgagacttgttggaggagctgagccaggtcttgcatgaggatggtccagcggctgagaaggagggcacagtcctgaggatctgcagccacgtggctgggatctgccacaacatcctggtctgctgccccaaggagctgctggaacagaaggccgtgctcgagcaggtgcagctggacagtccattgggcctagaaattcacaccaccagcaattgccagcactttgtgtcccaagtggacacccaggttcccactgactcccgactgcagatccagcctggagacgaggttgtccagatcaacgagcaggtggtggtgcgtgaggagagggacatggtgggatggccccgtaagaacatggtgagggaactgctgcgggagccagccggactcagcttagtgctgaagaagatcccgataccggagacccccccacagacgccccctcaggtcctggactccccgcaccagaggagcccatcactgtctctggccccactgtctcccagggccccatctgaagacgtctttgcctttgacctgtcttcaaaccccagtcccggacccagccctgcctggacagactctgcctcccttggccctgagcccctgcccatccccccggaacccccagccatactcccagcaggggtagcagggactccagggctccctgaatcccctgacaagagtcctgttggtcggaagaaatcaaaaggcctggcgacccggctgagccgccggcgggtgtcatgccgtgagctgggccggccggactgtgacggctggctcctgttgcgaaaggcaccgggcggcttcatgggcccgcgctggcgccgccgctggtttgtgctcaagggacacacgctctactggtaccgccagccccaggatgagaaggctgagggcctcatcaatgtctccaactatagtctggaaagtggacatgatcagaagaagaaatatgtgtttcagctcacccatgatgtgtacaaacccttcatcttcgctgctgataccctgacagatctgagcatgtgggtgcgtcatctcattacctgcatctccaagtaccagtctccaggccgggcccccccaccccgagaggaagactgctacagtgagaccgaagcagaggacccggacgatgaggctgggtcccactcagcctcgcccagccctgctcaagctgggagtcccctccatggagacacatcacctgcagccacccccacacagcgcagcccacggacctcctttggctctctgacagacagcagtgaagaggcactggaaggaatggtacgggggctgaggcagggtggcgtgtccctcctaggccagccacagcccctgacccaggaacagtggcggagctctttcatgcggcgcaaccgagaccctcagctcaatgagcgagtgcaccgtgtgcgggcgctacagagcacactcaaggcaaagctgcaggagctgcaggtcctagaagaagtgctgggtgaccctgagctgacaggagagaagttccgccagtggaaggagcagaaccgggagctgtactcagagggcctgggggcctggggagtggcacaggctgaaggcagctcccacatcttgacctctgactccacagaacagtccccccactccctgccctctgaccctgaagagcactcccatctctgccccctgacctcagagagcagcctccgacctcctgacctctgaccctggccagcactctagctcctgacctttgacccgagggccacctcaaccccagcttctgacgtgtccaggacagagcatccctggattctgttcagggtgggaagtagtactgctagtcatggtctcaccccgagctgacccctctgcctgggctttgtgccaccctctcccttgccaaagaagaaactctccccccaaatcctccaacctctggggccacagccctgcccctccagttccttggcagttctcccccaaaccaggtctgtacaggtgttctttattttacatgagggctactttccaaccaaataaagtcaatttttctaagaa

SEQ ID NO: 122055 - DNA, 2673 bp, Homo sapiens
  Payload ID: 3927
  Gene Symbol: CNKSR1
  Gene Name: connector enhancer of kinase suppressor of Ras 1
  ENST ID: ENST00000531191
  CDS Start-End: 1008-2375
ttctgattcagcaggtgtggggtgaggcctgataatttgcatttctaacaagttctccggtgagtctgctgctgctggtctgggggccacttttaagaacccatgtcctatactttcctgcttctcaactcagtggcctcatctgtgaaatgggcagaacagcctgggtgtcagagttgtcattagggttagactagagggaaaagagctttgcaggcatgaagaaccatcccaaaaggtcctgacacctctgcttccccgagctgagccttactctccctccaggtcttgacgactccctgcaggactatccctttgaggactggcagctgcctggcaagaacctgctccagctctgcccccaaagcctcgaggctctggctgtgcggtctctgggacaccaggagctcatcctgggcggggtggaacagctccaggccctgagctccaggctacagacagagaacctgcaaagcctgacagagggacttctgggggcaacccatgacttccagagcatagtccaaggctgcctgggggactgtgccaagacccctattgatgtcctctgtgcagctgtggagctgttgcatgaagctgacgccctcctcttctggctcagcaggtacctcttctcccacttaaatgatttctcagcatgccaggagatccgagacttgttggaggagctgagccaggtcttgcatgaggatggtccagcggctgagaaggagggcacagtcctgaggatctgcagccacgtggctgggatctgccacaacatcctggtctgctgccccaaggagctgctggaacagaaggccgtgctcgagcaggtgcagctggacagtccattgggcctagaaattcacaccaccagcaattgccagcactttgtgtcccaagtggacacccaggttcccactgactcccgactgcagatccagcctggagacgaggttgtccagatcaacgagcaggtggtggtgggatggccccgtaagaacatggtgagggaactgctgcgggagccagccggactcagcttagtgctgaagaagatcccgataccggagacccccccacagacgccccctcaggtcctggactccccgcaccagaggagcccatcactgtctctggccccactgtctcccagggccccatctgaagacgtctttgcctttgacctgtcttcaaaccccagtcccggacccagccctgcctggacagactctgcctcccttggccctgagcccctgcccatccccccggaacccccagccatactcccagcaggggtagcagggactccagggctccctgaatcccctgacaagagtcctgttggtcggaagaaatcaaaaggcctggcgacccggctgagccgccggcgggtgtcatgccgtgagctgggccggccggactgtgacggctggctcctgttgcgaaaggcaccgggcggcttcatgggcccgcgctggcgccgccgctggtttgtgctcaagggacacacgctctactggtaccgccagccccaggatgagaaggctgagggcctcatcaatgtctccaactatagtctggaaagtggacatgatcagaagaagaaatatgtgtttcagctcacccatgatgtgtacaaacccttcatcttcgctgctgataccctgacagatctgagcatgtgggtgcgtcatctcattacctgcatctccaagtaccagtctccaggccgggcccccccaccccgagaggaagactgctacagtgagaccgaagcagaggacccggacgatgaggctgggtcccactcagcctcgcccagccctgctcaagctgggagtcccctccatggagacacatcacctgcagccacccccacacagcgcagcccacggacctcctttggctctctgacagacagcagtgaagaggcactggaaggaatggtacgggggctgaggcagggtggcgtgtccctcctaggccagccacagcccctgacccaggaacagtggcggagctctttcatgcggcgcaaccgagaccctcagctcaatgagcgagtgcaccgtgtgcgggcgctacagagcacactcaaggcaaagctgcaggagctgcaggtcctagaagaagtgctgggtgaccctgagctgacaggagagaagttccgccagtggaaggagcagaaccgggagctgtactcagagggcctgggggcctggggagtggcacaggctgaaggcagctcccacatcttgacctctgactccacagaacagtccccccactccctgccctctgaccctgaagagcactcccatctctgccccctgacctcagagagcagcctccgacctcctgacctctgaccctggccagcactctagctcctgacctttgacccgagggccacctcaaccccagcttctgacgtgtccaggacagagcatccctggattctgttcagggtgggaagtagtactgctagtcatggtctcaccccgagctgacccctctgcctgggctttgtgccaccctctcccttgccaaagaagaaactctccccccaaatcctccaacctctggggccacagccctgcccctccagttccttggcagttctcccccaaaccaggtctgtacaggtgttctttattttacatgagg

SEQ ID NO: 122056 - DNA, 865 bp, Homo sapiens
  Payload ID: 3927
  Gene Symbol: CNKSR1
  Gene Name: connector enhancer of kinase suppressor of Ras 1
  ENST ID: ENST00000481077
  CDS Start-End: 65-256
ggagcggaaattccggcgacagcagggcaaaacaggagctgattcgagctggcagagctgggccatggaaccggtagagacctggacccccggaaaggtcttgacgactccctgcaggactatccctttgaggactggcagctgcctggcaagaacctgctccagctctgcccccaaagcctcgaggctctggctgtgcggtctctgggacaccaggagctcatcctgggcggggtggaacagctccaggccctgagctccaggctacagacagagaacctgcaaagcctgacagagggacttctgggggcaacccatgacttccagagcatagtccaaggctgcctgggggactgtgccaagacccctattgatgtcctctgtgcagctgtggagctgttgcatgaagctgacgccctcctcttctggctcagcaggtacctcttctcccacttaaatgatttctcagcatgccaggagatccgagacttgttggaggagctgagccaggtcttgcatgaggatggtccagcggctgagaaggagggcacagtcctgaggatctgcagccacgtggctgggatctgccacaacatcctggtctgctgccccaaggagctgctggaacagaaggccgtgctcgagcaggtgcagctggacagtccattgggcctagaaattcacaccaccagcaattgccagcactttgtgtcccaagtggacacccaggttcccactgactcccgactgcagatccagcctggagacgaggttgtccagatcaacgagcaggtggtggtgggatggccccgtaagaacatggtgagggaactgctgcgggagccagccggactcagcttagtgc

SEQ ID NO: 122057 - DNA, 842 bp, Homo sapiens
  Payload ID: 3927
  Gene Symbol: CNKSR1
  Gene Name: connector enhancer of kinase suppressor of Ras 1
  ENST ID: ENST00000528281
  CDS Start-End: 1-236
aaattcacaccaccagcaattgccagcactttgtgtcccaagtggacacccaggttcccactgactcccgactgcagatccagcctggagacgaggttgtccagatcaacgagcaggtggtggtgggatggccccgtaagaacatggtgagggaactgctgcgggagccagccggactcagcttagtgctgaagaagatcccgataccggagacccccccacagggccccatctgaagacgtctttgcctttgacctgtcttcaaaccccagtcccggacccagccctgcctggacagactctgcctcccttggccctgagcccctgcccatccccccggaacccccagccatactcccagcaggggtagcagggactccagggctccctgaatcccctgacaagagtcctgttggtcggaagaaatcaaaaggcctggcgacccggctgagccgccggcgggtgtcatgccgtgagctgggccggccggactgtgacggctggctcctgttgcgaaaggcaccgggcggcttcatgggcccgcgctggcgccgccgctggtttgtgctcaagggacacacgctctactggtaccgccagccccaggatgagaaggctgagggcctcatcaatgtctccaactatagtctggaaagtggacatgatcagaagaagaaatatgtgtttcagctcacccatgatgtgtacaaacccttcatcttcgctgctgataccctgacagatctgagcatgtgggtgcgtcatctcattacctgcatctccaagtaccagtctccaggccgggcccccccaccccgagaggaagactgctacagtgagac

SEQ ID NO: 122058 - DNA, 2507 bp, Homo sapiens
  Payload ID: 3927
  Gene Symbol: CNKSR1
  Gene Name: connector enhancer of kinase suppressor of Ras 1
  ENST ID: ENST00000482227
  CDS Start-End: 37-726
aaaacaggagctgattcgagctggcagagctgggccatggaaccggtagagacctggacccccggaaaggtggcaacttggctgagaggtcttgacgactccctgcaggactatccctttgaggactggcagctgcctggcaagaacctgctccagctctgcccccaaagcctcgaggctctggctgtgcggtctctgggacaccaggagctcatcctgggcggggtggaacagctccaggccctgagctccaggctacagacagagaacctgcaaagcctgacagagggacttctgggggcaacccatgacttccagagcatagtccaaggctgcctgggggactgtgccaagacccctattgatgtcctctgtgcagctgtggagctgttgcatgaagctgacgccctcctcttctggctcagcaggtacctcttctcccacttaaatgatttctcagcatgccaggagatccgagacttgttggaggagctgagccaggtcttgcatgaggatggtccagcggctgagaaggagggcacagtcctgaggatcccacgtggctgggatctgccacaacatcctggtctgctgccccaaggagctgctggaacagaaggccgtgctcgagcaggtgcagctggacagtccattgggcctagaaattcacaccaccagcaattgccagcactttgtgtcccaagtggacacccaggttcccactgactcccgactgcagatccagcctggagacgaggttgtccagatcaacgagcaggtggtggtgggatggccccgtaagaacatggtgagggaactgctgcgggagccagccggactcagcttagtgctgaagaagatcccgataccggagacccccccacagacgccccctcaggtcctggactccccgcaccagaggagcccatcactgtctctggccccactgtctcccagggccccatctgaagacgtctttgcctttgacctgtcttcaaaccccagtcccggacccagccctgcctggacagactctgcctcccttggccctgagcccctgcccatccccccggaacccccagccatactcccagcaggggtagcagggactccagggctccctgaatcccctgacaagagtcctgttggtcggaagaaatcaaaaggcctggcgacccggctgagccgccggcgggtgtcatgccgtgagctgggccggccggactgtgacggctggctcctgttgcgaaaggcaccgggcggcttcatgggcccgcgctggcgccgccgctggtttgtgctcaagggacacacgctctactggtaccgccagccccaggatgagaaggctgagggcctcatcaatgtctccaactatagtctggaaagtggacatgatcagaagaagaaatatgtgtttcagctcacccatgatgtgtacaaacccttcatcttcgctgctgataccctgacagatctgagcatgtgggtgcgtcatctcattacctgcatctccaagtaccagtctccaggccgggcccccccaccccgagaggaagactgctacagtgagaccgaagcagaggacccggacgatgaggctgggtcccactcagcctcgcccagccctgctcaagctgggagtcccctccatggagacacatcacctgcagccacccccacacagcgcagcccacggacctcctttggctctctgacagacagcagtgaagaggcactggaaggaatggtacgggggctgaggcagggtggcgtgtccctcctaggccagccacagcccctgacccaggaacagtggcggagctctttcatgcggcgcaaccgagaccctcagctcaatgagcgagtgcaccgtgtgcgggcgctacagagcacactcaaggcaaagctgcaggagctgcaggtcctagaagaagtgctgggtgaccctgagctgacaggagagaagttccgccagtggaaggagcagaaccgggagctgtactcagagggcctgggggcctggggagtggcacaggctgaaggcagctcccacatcttgacctctgactccacagaacagtccccccactccctgccctctgaccctgaagagcactcccatctctgccccctgacctcagagagcagcctccgacctcctgacctctgaccctggccagcactctagctcctgacctttgacccgagggccacctcaaccccagcttctgacgtgtccaggacagagcatccctggattctgttcagggtgggaagtagtactgctagtcatggtctcaccccgagctgacccctctgcctgggctttgtgccaccctctcccttgccaaagaagaaactctccccccaaatcctccaacctctggggccacagccctgcccctccagttccttggcagttctcccccaaaccaggtctgtacaggtgttctttattttacatgagggctactttccaaccaaataaagtcaatttttctaag

SEQ ID NO: 122059 - DNA, 1200 bp, Homo sapiens
  Payload ID: 3927
  Gene Symbol: CNKSR1
  Gene Name: connector enhancer of kinase suppressor of Ras 1
  ENST ID: ENST00000525687
  CDS Start-End: 37-975
aaaacaggagctgattcgagctggcagagctgggccatggaaccggtagagacctggacccccggaaaggtggcaacttggctgagaggtcttgacgactccctgcaggactatccctttgaggactggcagctgcctggcaagaacctgctccagctctgcccccaaagcctcgaggctctggctgtgcggtctctgggacaccaggagctcatcctgggcggggtggaacagctccaggccctgagctccaggctacagacagagaacctgcaaagcctgacagagggacttctgggggcaacccatgacttccagagcatagtccaaggctgcctgggggactgtgccaagacccctattgatgtcctctgtgcagctgtggagctgttgcatgaagctgacgccctcctcttctggctcagcaggtacctcttctcccacttaaatgatttctcagcatgccaggagatccgagacttgttggaggagctgagccaggtcttgcatgaggatggtccagcggctgagaaggagggcacagtcctgaggatctgcagccacgtggctgggatctgccacaacatcctggtctgctgccccaaggagctgctggaacagaaggccgtgctcgagcaggtgcagctggacagtccattgggcctagaaattcacaccaccagcaattgccagcactttgtgtcccaagtggacacccaggttcccactgactcccgactgcagatccagcctggagacgaggttgtccagatcaacgagcaggtggtggtgggatggccccgtaagaacatggtgagggaactgctgcgggagccagccggactcagcttagtgctgaagaagatcccgataccggagacccccccacaggtaacaggctctgtccaggtgtgtcttggtggggagaccgtgggctcatctcatcccccttgccctccccagggccccatctgaagacgtctttgcctttgacctgtcttcaaaccccagtcccggacccagccctgcctggacagactctgcctcccttggccctgagcccctgcccatccccccggaacccccagccatactcccagcaggggtagcagggactccagggctccctgaatcccctgacaagagtcctgttggtcggaagaaatcaaaaggcctggcgacccggctgagccgccggcg

SEQ ID NO: 122060 - DNA, 4478 bp, Homo sapiens
  Payload ID: 3928
  Gene Symbol: CNKSR2
  Gene Name: connector enhancer of kinase suppressor of Ras 2
  Uniprot ID: Q8WXI2
  ENST ID: ENST00000279451
  CDS Start-End: 457-3153
gtgctcggggcttcactcccgcgcgtgaggcgagcgggcaagttggctgagggcgtgcggcagaggctgcttccctcggcgacgcgacccctcagcaactcaagctatgaactgaagctccctagggacggagaccggagcggagcggcggaggcagcagcagcagcagcagcagcagcagcagcagcagccgccgccgccgccgccttagcgggaactgagcagacccggcgcggagccacgactcctgcacgtttacctccctgtcgccgttcctgccggcggttggctaaaagacgttacagccgcgagacccgacacacaaaagccgctttctccgcgccgcccgcccagggaggctgcggccagcaagggaccccacctgagagcagctcgggctgctgagttcgttttgtgtctgagctctgcgctctgcacggaaccgaccccgtacccatggctctgataatggaaccggtgagcaaatggtctccgagtcaagtagtggactggatgaaaggtcttgatgactgtttgcagcagtatattaagaactttgagagggagaagatcagtggggaccagctgctgcgcattacacatcaggagctagaagatctgggggtcagccgcattggccatcaggaactgatcttggaagcagttgaccttctgtgtgcattgaattatggcttggaaacagaaaatctaaaaaccctttctcacaagttgaatgcatctgccaaaaatctgcagaattttataacaggaaggagaaggagtggccattatgatgggaggaccagccgaaaattgccaaacgactttctgacctcagttgtggatctgattggagcagccaagagtctgcttgcctggttggacaggtcaccatttgctgctgtgacagactattcagttacaagaaataatgtcatacaactctgcctggagttaacaacaattgtgcaacaggattgtactgtatatgaaacagagaataaaattcttcacgtgtgtaaaactctttctggagtctgtgaccacatcatatccctgtcgtcagatcctctggtttcacagtctgctcacctggaagtgattcaactggcaaacattaaaccaagcgaagggctgggtatgtatattaaatctacatatgatggcctccatgtaattactggaaccacagaaaattcacctgcagatcggtgcaagaaaatccatgctggcgatgaagtgattcaagttaatcatcagactgtggtggggtggcagttgaaaaatttggtgaatgcactacgagaggacccgagtggtgttatcttaactttgaaaaagcgacctcagagcatgcttacctcagcaccagctttactgaaaaatatgagatggaagccccttgctctgcagcctcttatacctagaagtcccacaagcagcgttgccacgccttccagcaccatcagtacacccaccaaaagagacagttctgccctccaggatctctacattccccctcctcctgcagaaccatatattcccagggatgaaaaaggaaaccttccttgtgaagacctcagaggacatatggtgggcaagccagtgcataagggatctgaatcaccaaattcatttctggatcaggaatatcgaaagagatttaatattgtcgaagaagatactgtcttatattgctatgaatatgaaaaaggaagatcaagtagtcaaggaagacgagaaagcaccccaacttatggcaagctacgacctatatctatgccagtggaatataattgggtgggggactatgaagatccaaataagatgaagagagatagtagaagagaaaactctctacttcggtatatgagcaatgaaaagattgctcaagaagaatacatgtttcagagaaacagcaaaaaggacacagggaagaagtcaaaaaagaagggtgataagagtaatagcccaactcactattcattgctacctagtttacaaatggatgcactgagacaagacatcatgggcactcctgtgccagagaccacactataccatacatttcagcagtcctcactgcagcacaaatcaaagaagaaaaacaaaggtcctatagcaggcaagagcaaaagacgaatttcttgcaaagatcttggccgtggtgactgtgagggctggctttggaaaaagaaagatgcgaagagttacttttcacagaaatggaaaaaatattggtttgtcctaaaggatgcatccctttattggtatattaatgaggaggatgaaaaagcagaaggattcattagcctgcctgaatttaaaattgatagagccagtgaatgccgcaaaaaatatgcattcaaagcctgtcatcctaaaatcaaaagcttttattttgctgctgaacatcttgatgatatgaacaggtggcttaacagaattaatatgctgactgcaggatatgcagaaagagagaggattaagcaggaacaagattactggagtgagagtgacaaggaagaagcagatactccatcaacaccaaaacaagatagccctccacccccatatgatacatacccacgacctccctcgatgagttgcgccagtccttatgtggaagcaaaacatagccgactttcctccacggagacttctcagtctcagtcttctcatgaggagtttcgccaggaagtaactgggagcagtgcagtgtctcccattcgcaagacagccagtcagcgccgctcctggcaggatttaattgagacgccactgacaagttcaggcttacactatcttcagactctgcccctggaggattctgtcttctctgactccgcggccatctccccagagcacaggcggcagtctaccctgccaactcagaaatgccacctgcaggatcactatgggccataccccttagctgagagtgagaggatgcaagtgctaaatggaaatgggggcaagcctcgaagttttactctgcctcgagatagcgggttcaaccattgctgtctgaatgctccagttagtgcctgtgacccacaggatgacgtgcaacccccagaggtggaggaagaggaggaggaggaggaggaggaaggggaggcagcaggggaaaacataggagaaaaaagctaatacactgcgagagttggtagaacctctccatgccaaatcggatccacttctgttggcactcaacccattggactcacagattgataagctaatgtttagagaatttagatcggagagagtcggtacggcgcagactcaacatcaacctcttgcaagcaactaaaatggcctcgtccttgctgtttataacagaaaacagacttgtaaaaagcttagatcatcaagtgttttggattgggggcctcccaaagggatataagaggggcaggccactcttaagaagaatgcgagctttctacattgggactagcataagatcaaagccaatcaagatggagcacagtaacagaaaactgcggtttctgtgggagaacagaaggggaaagggtcttaactgggaaagggctctgtgtggtaacacctcagttgtgttctcctgacaccaggaaaagagagggatcagcttcaataactagaaaattctggctgtttaatggactctttggtggcctctttaaggcaaagcagagaaagcaaattatgtattaagtgtattttgcatttttaaaacttgacgtgctgtattgtactaaattaagtgtaatctattaaggcaaggtatacacaatttgctttgaaacttactatgtttattctattataaagtgtattcaggtgcaacacagagactgctttcggtgacattaatgaagaaaatttctcatgccaggctttattatagaatcttcagctaaaatcctaactttctccttatttcttggcacttgtatacaagtggtgttgcctcttagggcaggcatgagctattcttttctgtaaaatattttgaatctataggctgtgggtttcatttttgaaaagtattttgtctggatgtctttcaaactagcttcagatattatttaatactatgtaactgggtcccctatggctcaatcaatattgcttatttttcttctgtagtggatgtgaaatttcctttagttggataagatacactgtaataattttaatgctaattaatgatatttcatactgtgcaatgaacagataatttaacactgtattttgaaatgtttttttcttcctgtcaccgcagtgtgtggtattgcataatgtgaatacctgtaaaaatataaattacttaaaaataaaaatatgaccaattggtatcagatcttttcagatagctaaataatttgctaagtatgcctgatagtaaatatctttctaaaaagaagtaatcagtgcttctttctcacaaatggaatttgtgtctgtgaataaaatcacattgatctgcc

SEQ ID NO: 122061 - DNA, 5315 bp, Homo sapiens
  Payload ID: 3928
  Gene Symbol: CNKSR2
  Gene Name: connector enhancer of kinase suppressor of Ras 2
  Uniprot ID: Q8WXI2
  ENST ID: ENST00000379510
  CDS Start-End: 37-3141
gagctctgcgctctgcacggaaccgaccccgtacccatggctctgataatggaaccggtgagcaaatggtctccgagtcaagtagtggactggatgaaaggtcttgatgactgtttgcagcagtatattaagaactttgagagggagaagatcagtggggaccagctgctgcgcattacacatcaggagctagaagatctgggggtcagccgcattggccatcaggaactgatcttggaagcagttgaccttctgtgtgcattgaattatggcttggaaacagaaaatctaaaaaccctttctcacaagttgaatgcatctgccaaaaatctgcagaattttataacaggaaggagaaggagtggccattatgatgggaggaccagccgaaaattgccaaacgactttctgacctcagttgtggatctgattggagcagccaagagtctgcttgcctggttggacaggtcaccatttgctgctgtgacagactattcagttacaagaaataatgtcatacaactctgcctggagttaacaacaattgtgcaacaggattgtactgtatatgaaacagagaataaaattcttcacgtgtgtaaaactctttctggagtctgtgaccacatcatatccctgtcgtcagatcctctggtttcacagtctgctcacctggaagtgattcaactggcaaacattaaaccaagcgaagggctgggtatgtatattaaatctacatatgatggcctccatgtaattactggaaccacagaaaattcacctgcagatcggtgcaagaaaatccatgctggcgatgaagtgattcaagttaatcatcagactgtggtggggtggcagttgaaaaatttggtgaatgcactacgagaggacccgagtggtgttatcttaactttgaaaaagcgacctcagagcatgcttacctcagcaccagctttactgaaaaatatgagatggaagccccttgctctgcagcctcttatacctagaagtcccacaagcagcgttgccacgccttccagcaccatcagtacacccaccaaaagagacagttctgccctccaggatctctacattccccctcctcctgcagaaccatatattcccagggatgaaaaaggaaaccttccttgtgaagacctcagaggacatatggtgggcaagccagtgcataagggatctgaatcaccaaattcatttctggatcaggaatatcgaaagagatttaatattgtcgaagaagatactgtcttatattgctatgaatatgaaaaaggaagatcaagtagtcaaggaagacgagaaagcaccccaacttatggcaagctacgacctatatctatgccagtggaatataattgggtgggggactatgaagatccaaataagatgaagagagatagtagaagagaaaactctctacttcggtatatgagcaatgaaaagattgctcaagaagaatacatgtttcagagaaacagcaaaaaggacacagggaagaagtcaaaaaagaagggtgataagagtaatagcccaactcactattcattgctacctagtttacaaatggatgcactgagacaagacatcatgggcactcctgtgccagagaccacactataccatacatttcagcagtcctcactgcagcacaaatcaaagaagaaaaacaaaggtcctatagcaggcaagagcaaaagacgaatttcttgcaaagatcttggccgtggtgactgtgagggctggctttggaaaaagaaagatgcgaagagttacttttcacagaaatggaaaaaatattggtttgtcctaaaggatgcatccctttattggtatattaatgaggaggatgaaaaagcagaaggattcattagcctgcctgaatttaaaattgatagagccagtgaatgccgcaaaaaatatgcattcaaagcctgtcatcctaaaatcaaaagcttttattttgctgctgaacatcttgatgatatgaacaggtggcttaacagaattaatatgctgactgcaggatatgcagaaagagagaggattaagcaggaacaagattactggagtgagagtgacaaggaagaagcagatactccatcaacaccaaaacaagatagccctccacccccatatgatacatacccacgacctccctcgatgagttgcgccagtccttatgtggaagcaaaacatagccgactttcctccacggagacttctcagtctcagtcttctcatgaggagtttcgccaggaagtaactgggagcagtgcagtgtctcccattcgcaagacagccagtcagcgccgctcctggcaggatttaattgagacgccactgacaagttcaggcttacactatcttcagactctgcccctggaggattctgtcttctctgactccgcggccatctccccagagcacaggcggcagtctaccctgccaactcagaaatgccacctgcaggatcactatgggccataccccttagctgagagtgagaggatgcaagtgctaaatggaaatgggggcaagcctcgaagttttactctgcctcgagatagcgggttcaaccattgctgtctgaatgctccagttagtgcctgtgacccacaggatgacgtgcaacccccagaggtggaggaagaggaggaggaggaggaggaggaaggggaggcagcaggggaaaacataggagaaaaaagtgaaagcagagaagaaaagttaggagactcattgcaagatttatacagggcactggagcaggccagtctgtcaccactaggagaacatcgtatttcaaccaagatggaatacaagctatcatttataaaaagatgtaatgatcctgtaatgaatgaaaaactacaccggctgagaattctcaaaagcactttaaaggccagagaaggggaagtagccattatcgataaagtcctagacaatccagacttgacatctaaagaattccaacaatggaagcagatgtacctcgaccttttcttggatatctgtcaaaataccacctcaaatgacccactgagtatttcttctgaagtagatgtaatcacttcctctctagcacacactcattcatacattgaaacgcatgtctaaatgtattctgccttcagaccatctagtacctgctggtactctgaacaagtatataaggtagtttttatatcaatgtgtggaacacttgacaagctatactttaatgttaccaaactatatgaaacaaaccatatatggtcacaataccactatctttaatgagcatttgtatattttatatgcaacagtgctcagcttatgtttaccatgtgcaaaatcaactgtctttaatgacttaaaattaacttttgcaaacaattctaaatacaggtggtcttcaagtagtaaaaccacaaaaggcagttttctatctatggtcatcttttctccctttaagttaattttatataaacaagacttcaaaagtaaatcacattttttcaggtgcagacatccttgtgggtgggaaagaatttaaaccttttttatatttattaaaatgttctaagaattttcttaaacattgcacaaagtttaatgctgtagttttatttttgtgaaatgtagatgcgcatacaagagctaagcaaaatagaagagcatcgacataagaaaagttcaggtatctaatattcgtcttaatagtctattaacttgtgaaagctaagttaatggaaatattattccaaatctatgagaacacttggtgtatcagggcaaagctttgtaagatgtttttgtaactaagaccaaaattgaagatagagctgctttattttcttggtttaaatcttcctttatttttgtagtgatgagatgctgattgtgtacagaagaatttgagaggggatttttaaaaactgacttaacacacccagaaaggcagctaacagctatatatatatataaatttcagcccaaactcatgtttttaaactccaactcttaaaagacaacaaggtataaactgaaatgaatcaactttccacttagtttccaattttcccctagtccactaattaaacttaggtaattatacttcaggtagggaagtacaatatgtttagtttcaggctgatgtgtgttataaaaaacaacactgaaaaataaaaatgtacttcccttctaaggagcaagcaggtgatggtcattcaaagagatgtcacattgaattatgagagaaacaatttagaggtttttttcctggcttcatgaattgttctatagagtggatgaagtctaaggaaaagtcctcttcatatatttccatttataagcgtcttgtttttgaaagtgatcacagcatgaaaatgactgtgctgctttttagtgtctggctgcataatgtacaagtcacaatttgctgtttttttcaggaggagaaagggaacctcctttactattctatatcctaaaatctacttctaatcagctttatactgttgcctgtacagctcagtgaatgtactttcatctttaagagttcagatatatgccagtgaatatttttgctgtagaggagaaagtaaaaactccacagcggggatctttttctttgcttttgaaaccaccattgaatcactatcgttttgcagactttgcacaactgtacaggagagtggcctttctacagcacattttcagtaatcctatatttagtcaaaatggatgagaaatcatgtattaatgtttgtatggaattttgggtccagtgtaatatttttatcatttaaaaagaactctatttgtaaaaacatttatttactgcatggatattgacgcacattaaatttgtgggattttgtatatgtaaaaaaaaaaaaaaaaaaaaaacaaaaaacctcttgtcctaaaatgaagtgtgcttgttaacaggtgtttagacttattgatgtttactagaccaaatgtgtatgttcacttaaaaatatatgtacctgatggatgtgtcatgtttacagtggccaggttgtggcctgtaaacagcaagcagttgacgggaagactagctctgttgctactaagcagcttttacttttgtaaagtcagctctgttgttttaaatggtaaaaattaaactaatgaatttgacaagactcgtggctagcctagcatgaaagagaccttttaacactatataatatctgtacattttattgcattcgtttcaaatctaggagagaggcagcactgtaaactgaagtcaaataaattcagctcttaatgaatcctta

SEQ ID NO: 122062 - DNA, 5668 bp, Homo sapiens
  Payload ID: 3928
  Gene Symbol: CNKSR2
  Gene Name: connector enhancer of kinase suppressor of Ras 2
  Uniprot ID: Q8WXI2
  ENST ID: ENST00000425654
  CDS Start-End: 481-3495
gtcatttccgccgggcagctagtcgtgctcggggcttcactcccgcgcgtgaggcgagcgggcaagttggctgagggcgtgcggcagaggctgcttccctcggcgacgcgacccctcagcaactcaagctatgaactgaagctccctagggacggagaccggagcggagcggcggaggcagcagcagcagcagcagcagcagcagcagcagcagccgccgccgccgccgccttagcgggaactgagcagacccggcgcggagccacgactcctgcacgtttacctccctgtcgccgttcctgccggcggttggctaaaagacgttacagccgcgagacccgacacacaaaagccgctttctccgcgccgcccgcccagggaggctgcggccagcaagggaccccacctgagagcagctcgggctgctgagttcgttttgtgtctgagctctgcgctctgcacggaaccgaccccgtacccatggctctgataatggaaccggtgagcaaatggtctccgagtcaagtagtggactggatgaaaggtcttgatgactgtttgcagcagtatattaagaactttgagagggagaagatcagtggggaccagctgctgcgcattacacatcaggagctagaagatctgggggtcagccgcattggccatcaggaactgatcttggaagcagttgaccttctgtgtgcattgaattatggcttggaaacagaaaatctaaaaaccctttctcacaagttgaatgcatctgccaaaaatctgcagaattttataacaggaaggagaaggagtggccattatgatgggaggaccagccgaaaattgccaaacgactttctgacctcagttgtggatctgattggagcagccaagagtctgcttgcctggttggacaggtcaccatttgctgctgtgacagactattcagttacaagaaataatgtcatacaactctgcctggagttaacaacaattgtgcaacaggattgtactgtatatgaaacagagaataaaattcttcacgtgtgtaaaactctttctggagtctgtgaccacatcatatccctgtcgtcagatcctctggtttcacagtctgctcacctggaagtgattcaactggcaaacattaaaccaagcgaagggctgggtatgtatattaaatctacatatgatggcctccatgtaattactggaaccacagaaaattcacctgcagatcggtgcaagaaaatccatgctggcgatgaagtgattcaagttaatcatcagactgtggtggggtggcagttgaaaaatttggtgaatgcactacgagaggacccgagtggtgttatcttaactttgaaaaagcgacctcagagcatgcttacctcagcaccagctttactgaaaaatatgagatggaagccccttgctctgcagcctcttatacctagaagtcccacaagcagcgttgccacgccttccagcaccatcagtacacccaccaaaagagacagttctgccctccaggatctctacattccccctcctcctgcagaaccatatattcccagggatgaaaaaggaaaccttccttgtgaagacctcagaggacatatggtgggcaagccagtgcataagggatctgaatcaccaaattcatttctggatcaggaatatcgaaagagatttaatattgtcgaagaagatactgtcttatattgctatgaatatgaaaaaggaagatcaagtagtcaaggaagacgagaaagcaccccaacttatgaaaactctctacttcggtatatgagcaatgaaaagattgctcaagaagaatacatgtttcagagaaacagcaaaaaggacacagggaagaagtcaaaaaagaagggtgataagagtaatagcccaactcactattcattgctacctagtttacaaatggatgcactgagacaagacatcatgggcactcctgtgccagagaccacactataccatacatttcagcagtcctcactgcagcacaaatcaaagaagaaaaacaaaggtcctatagcaggcaagagcaaaagacgaatttcttgcaaagatcttggccgtggtgactgtgagggctggctttggaaaaagaaagatgcgaagagttacttttcacagaaatggaaaaaatattggtttgtcctaaaggatgcatccctttattggtatattaatgaggaggatgaaaaagcagaaggattcattagcctgcctgaatttaaaattgatagagccagtgaatgccgcaaaaaatatgcattcaaagcctgtcatcctaaaatcaaaagcttttattttgctgctgaacatcttgatgatatgaacaggtggcttaacagaattaatatgctgactgcaggatatgcagaaagagagaggattaagcaggaacaagattactggagtgagagtgacaaggaagaagcagatactccatcaacaccaaaacaagatagccctccacccccatatgatacatacccacgacctccctcgatgagttgcgccagtccttatgtggaagcaaaacatagccgactttcctccacggagacttctcagtctcagtcttctcatgaggagtttcgccaggaagtaactgggagcagtgcagtgtctcccattcgcaagacagccagtcagcgccgctcctggcaggatttaattgagacgccactgacaagttcaggcttacactatcttcagactctgcccctggaggattctgtcttctctgactccgcggccatctccccagagcacaggcggcagtctaccctgccaactcagaaatgccacctgcaggatcactatgggccataccccttagctgagagtgagaggatgcaagtgctaaatggaaatgggggcaagcctcgaagttttactctgcctcgagatagcgggttcaaccattgctgtctgaatgctccagttagtgcctgtgacccacaggatgacgtgcaacccccagaggtggaggaagaggaggaggaggaggaggaggaaggggaggcagcaggggaaaacataggagaaaaaagtgaaagcagagaagaaaagttaggagactcattgcaagatttatacagggcactggagcaggccagtctgtcaccactaggagaacatcgtatttcaaccaagatggaatacaagctatcatttataaaaagatgtaatgatcctgtaatgaatgaaaaactacaccggctgagaattctcaaaagcactttaaaggccagagaaggggaagtagccattatcgataaagtcctagacaatccagacttgacatctaaagaattccaacaatggaagcagatgtacctcgaccttttcttggatatctgtcaaaataccacctcaaatgacccactgagtatttcttctgaagtagatgtaatcacttcctctctagcacacactcattcatacattgaaacgcatgtctaaatgtattctgccttcagaccatctagtacctgctggtactctgaacaagtatataaggtagtttttatatcaatgtgtggaacacttgacaagctatactttaatgttaccaaactatatgaaacaaaccatatatggtcacaataccactatctttaatgagcatttgtatattttatatgcaacagtgctcagcttatgtttaccatgtgcaaaatcaactgtctttaatgacttaaaattaacttttgcaaacaattctaaatacaggtggtcttcaagtagtaaaaccacaaaaggcagttttctatctatggtcatcttttctccctttaagttaattttatataaacaagacttcaaaagtaaatcacattttttcaggtgcagacatccttgtgggtgggaaagaatttaaaccttttttatatttattaaaatgttctaagaattttcttaaacattgcacaaagtttaatgctgtagttttatttttgtgaaatgtagatgcgcatacaagagctaagcaaaatagaagagcatcgacataagaaaagttcaggtatctaatattcgtcttaatagtctattaacttgtgaaagctaagttaatggaaatattattccaaatctatgagaacacttggtgtatcagggcaaagctttgtaagatgtttttgtaactaagaccaaaattgaagatagagctgctttattttcttggtttaaatcttcctttatttttgtagtgatgagatgctgattgtgtacagaagaatttgagaggggatttttaaaaactgacttaacacacccagaaaggcagctaacagctatatatatatataaatttcagcccaaactcatgtttttaaactccaactcttaaaagacaacaaggtataaactgaaatgaatcaactttccacttagtttccaattttcccctagtccactaattaaacttaggtaattatacttcaggtagggaagtacaatatgtttagtttcaggctgatgtgtgttataaaaaacaacactgaaaaataaaaatgtacttcccttctaaggagcaagcaggtgatggtcattcaaagagatgtcacattgaattatgagagaaacaatttagaggtttttttcctggcttcatgaattgttctatagagtggatgaagtctaaggaaaagtcctcttcatatatttccatttataagcgtcttgtttttgaaagtgatcacagcatgaaaatgactgtgctgctttttagtgtctggctgcataatgtacaagtcacaatttgctgtttttttcaggaggagaaagggaacctcctttactattctatatcctaaaatctacttctaatcagctttatactgttgcctgtacagctcagtgaatgtactttcatctttaagagttcagatatatgccagtgaatatttttgctgtagaggagaaagtaaaaactccacagcggggatctttttctttgcttttgaaaccaccattgaatcactatcgttttgcagactttgcacaactgtacaggagagtggcctttctacagcacattttcagtaatcctatatttagtcaaaatggatgagaaatcatgtattaatgtttgtatggaattttgggtccagtgtaatatttttatcatttaaaaagaactctatttgtaaaaacatttatttactgcatggatattgacgcacattaaatttgtgggattttgtatatgtaaaaaaaaaaaaaaaaaaaaaacaaaaaacctcttgtcctaaaatgaagtgtgcttgttaacaggtgtttagacttattgatgtttactagaccaaatgtgtatgttcacttaaaaatatatgtacctgatggatgtgtcatgtttacagtggccaggttgtggcctgtaaacagcaagcagttgacgggaagactagctctgttgctactaagcagcttttacttttgtaaagtcagctctgttgttttaaatggtaaaaattaaactaatgaatttgacaagactcgtggctagcctagcatgaaagagaccttttaacactatataatatctgtacattttattgcattcgtttcaaatctaggagagaggcagcactgtaaactgaagtcaaataaattcagctcttaatgaatcctt

SEQ ID NO: 122063 - DNA, 4355 bp, Homo sapiens
  Payload ID: 3928
  Gene Symbol: CNKSR2
  Gene Name: connector enhancer of kinase suppressor of Ras 2
  Uniprot ID: Q8WXI2
  ENST ID: ENST00000543067
  CDS Start-End: 481-3030
gtcatttccgccgggcagctagtcgtgctcggggcttcactcccgcgcgtgaggcgagcgggcaagttggctgagggcgtgcggcagaggctgcttccctcggcgacgcgacccctcagcaactcaagctatgaactgaagctccctagggacggagaccggagcggagcggcggaggcagcagcagcagcagcagcagcagcagcagcagcagccgccgccgccgccgccttagcgggaactgagcagacccggcgcggagccacgactcctgcacgtttacctccctgtcgccgttcctgccggcggttggctaaaagacgttacagccgcgagacccgacacacaaaagccgctttctccgcgccgcccgcccagggaggctgcggccagcaagggaccccacctgagagcagctcgggctgctgagttcgttttgtgtctgagctctgcgctctgcacggaaccgaccccgtacccatggctctgataatggaaccggtgagcaaatggtctccgagtcaagtagtggactggatgaaaggtcttgatgactgtttgcagcagtatattaagaactttgagagggagaagatcagtggggaccagctgctgcgcattacacatcaggagctagaagatctgggggtcagccgcattggccatcaggaactgatcttggaagcagttgaccttctgtgtgcattgaattatggcttggaaacagaaaatctaaaaaccctttctcacaagttgaatgcatctgccaaaaatctgcagaattttataacaggaaggagaaggagtggccattatgatgggaggaccagccgaaaattgccaaacgactttctgacctcagttgtggatctgattggagcagccaagagtctgcttgcctggttggacaggtcaccatttgctgctgtgacagactattcagttacaagaaataatgtcatacaactctgcctggagttaacaacaattgtgcaacaggattgtactgtatatgaaacagagaataaaattcttcacgtgtgtaaaactctttctggagtctgtgaccacatcatatccctgtcgtcagatcctctggtttcacagtctgctcacctggaagtgattcaactggcaaacattaaaccaagcgaagggctgggtatgtatattaaatctacatatgatggcctccatgtaattactggaaccacagaaaattcacctgcagatcggtgcaagaaaatccatgctggcgatgaagtgattcaagttaatcatcagactgtgcctcttatacctagaagtcccacaagcagcgttgccacgccttccagcaccatcagtacacccaccaaaagagacagttctgccctccaggatctctacattccccctcctcctgcagaaccatatattcccagggatgaaaaaggaaaccttccttgtgaagacctcagaggacatatggtgggcaagccagtgcataagggatctgaatcaccaaattcatttctggatcaggaatatcgaaagagatttaatattgtcgaagaagatactgtcttatattgctatgaatatgaaaaaggaagatcaagtagtcaaggaagacgagaaagcaccccaacttatggcaagctacgacctatatctatgccagtggaatataattgggtgggggactatgaagatccaaataagatgaagagagatagtagaagagaaaactctctacttcggtatatgagcaatgaaaagattgctcaagaagaatacatgtttcagagaaacagcaaaaaggacacagggaagaagtcaaaaaagaagggtgataagagtaatagcccaactcactattcattgctacctagtttacaaatggatgcactgagacaagacatcatgggcactcctgtgccagagaccacactataccatacatttcagcagtcctcactgcagcacaaatcaaagaagaaaaacaaaggtcctatagcaggcaagagcaaaagacgaatttcttgcaaagatcttggccgtggtgactgtgagggctggctttggaaaaagaaagatgcgaagagttacttttcacagaaatggaaaaaatattggtttgtcctaaaggatgcatccctttattggtatattaatgaggaggatgaaaaagcagaaggattcattagcctgcctgaatttaaaattgatagagccagtgaatgccgcaaaaaatatgcattcaaagcctgtcatcctaaaatcaaaagcttttattttgctgctgaacatcttgatgatatgaacaggtggcttaacagaattaatatgctgactgcaggatatgcagaaagagagaggattaagcaggaacaagattactggagtgagagtgacaaggaagaagcagatactccatcaacaccaaaacaagatagccctccacccccatatgatacatacccacgacctccctcgatgagttgcgccagtccttatgtggaagcaaaacatagccgactttcctccacggagacttctcagtctcagtcttctcatgaggagtttcgccaggaagtaactgggagcagtgcagtgtctcccattcgcaagacagccagtcagcgccgctcctggcaggatttaattgagacgccactgacaagttcaggcttacactatcttcagactctgcccctggaggattctgtcttctctgactccgcggccatctccccagagcacaggcggcagtctaccctgccaactcagaaatgccacctgcaggatcactatgggccataccccttagctgagagtgagaggatgcaagtgctaaatggaaatgggggcaagcctcgaagttttactctgcctcgagatagcgggttcaaccattgctgtctgaatgctccagttagtgcctgtgacccacaggatgacgtgcaacccccagaggtggaggaagaggaggaggaggaggaggaggaaggggaggcagcaggggaaaacataggagaaaaaagctaatacactgcgagagttggtagaacctctccatgccaaatcggatccacttctgttggcactcaacccattggactcacagattgataagctaatgtttagagaatttagatcggagagagtcggtacggcgcagactcaacatcaacctcttgcaagcaactaaaatggcctcgtccttgctgtttataacagaaaacagacttgtaaaaagcttagatcatcaagtgttttggattgggggcctcccaaagggatataagaggggcaggccactcttaagaagaatgcgagctttctacattgggactagcataagatcaaagccaatcaagatggagcacagtaacagaaaactgcggtttctgtgggagaacagaaggggaaagggtcttaactgggaaagggctctgtgtggtaacacctcagttgtgttctcctgacaccaggaaaagagagggatcagcttcaataactagaaaattctggctgtttaatggactctttggtggcctctttaaggcaaagcagagaaagcaaattatgtattaagtgtattttgcatttttaaaacttgacgtgctgtattgtactaaattaagtgtaatctattaaggcaaggtatacacaatttgctttgaaacttactatgtttattctattataaagtgtattcaggtgcaacacagagactgctttcggtgacattaatgaagaaaatttctcatgccaggctttattatagaatcttcagctaaaatcctaactttctccttatttcttggcacttgtatacaagtggtgttgcctcttagggcaggcatgagctattcttttctgtaaaatattttgaatctataggctgtgggtttcatttttgaaaagtattttgtctggatgtctttcaaactagcttcagatattatttaatactatgtaactgggtcccctatggctcaatcaatattgcttatttttcttctgtagtggatgtgaaatttcctttagttggataagatacactgtaataattttaatgctaattaatgatatttcatactgtgcaatgaacagataatttaacactgtattttgaaatgtttttttcttcctgtcaccgcagtgtgtggtattgcataatgtgaatacctgtaaaaatataaattacttaaaaataaaaatatgaccaattggtatcagatcttttcagatagctaaataatttgctaagtatgcctgatagtaaatatctttctaaaaagaagtaatcagtgcttctttctcacaaatggaatttgtgtctgtgaataaaatcacattgatctgcc

SEQ ID NO: 122064 - DNA, 3625 bp, Homo sapiens
  Payload ID: 3929
  Gene Symbol: CHUK
  Gene Name: conserved helix-loop-helix ubiquitous kinase
  Uniprot ID: O15111
  ENST ID: ENST00000370397
  CDS Start-End: 88-2325
cgcgagaacaaagacgcgcgagcatcggcggcccggaaccggccttggaacaactgtggaacctgaggccgcttgccctcccgccccatggagcggcccccggggctgcggccgggcgcgggcgggccctgggagatgcgggagcggctgggcaccggcggcttcgggaacgtctgtctgtaccagcatcgggaacttgatctcaaaatagcaattaagtcttgtcgcctagagctaagtaccaaaaacagagaacgatggtgccatgaaatccagattatgaagaagttgaaccatgccaatgttgtaaaggcctgtgatgttcctgaagaattgaatattttgattcatgatgtgcctcttctagcaatggaatactgttctggaggagatctccgaaagctgctcaacaaaccagaaaattgttgtggacttaaagaaagccagatactttctttactaagtgatatagggtctgggattcgatatttgcatgaaaacaaaattatacatcgagatctaaaacctgaaaacatagttcttcaggatgttggtggaaagataatacataaaataattgatctgggatatgccaaagatgttgatcaaggaagtctgtgtacatcttttgtgggaacactgcagtatctggccccagagctctttgagaataagccttacacagccactgttgattattggagctttgggaccatggtatttgaatgtattgctggatataggccttttttgcatcatctgcagccatttacctggcatgagaagattaagaagaaggatccaaagtgtatatttgcatgtgaagagatgtcaggagaagttcggtttagtagccatttacctcaaccaaatagcctttgtagtttagtagtagaacccatggaaaactggctacagttgatgttgaattgggaccctcagcagagaggaggacctgttgaccttactttgaagcagccaagatgttttgtattaatggatcacattttgaatttgaagatagtacacatcctaaatatgacttctgcaaagataatttcttttctgttaccacctgatgaaagtcttcattcactacagtctcgtattgagcgtgaaactggaataaatactggttctcaagaacttctttcagagacaggaatttctctggatcctcggaaaccagcctctcaatgtgttctagatggagttagaggctgtgatagctatatggtttatttgtttgataaaagtaaaactgtatatgaagggccatttgcttccagaagtttatctgattgtgtaaattatattgtacaggacagcaaaatacagcttccaattatacagctgcgtaaagtgtgggctgaagcagtgcactatgtgtctggactaaaagaagactatagcaggctctttcagggacaaagggcagcaatgttaagtcttcttagatataatgctaacttaacaaaaatgaagaacactttgatctcagcatcacaacaactgaaagctaaattggagttttttcacaaaagcattcagcttgacttggagagatacagcgagcagatgacgtatgggatatcttcagaaaaaatgctaaaagcatggaaagaaatggaagaaaaggccatccactatgctgaggttggtgtcattggatacctggaggatcagattatgtctttgcatgctgaaatcatggagctacagaagagcccctatggaagacgtcagggagacttgatggaatctctggaacagcgtgccattgatctatataagcagttaaaacacagaccttcagatcactcctacagtgacagcacagagatggtgaaaatcattgtgcacactgtgcagagtcaggaccgtgtgctcaaggagctgtttggtcatttgagcaagttgttgggctgtaagcagaagattattgatctactccctaaggtggaagtggccctcagtaatatcaaagaagctgacaatactgtcatgttcatgcagggaaaaaggcagaaagaaatatggcatctccttaaaattgcctgtacacagagttctgcccggtcccttgtaggatccagtctagaaggtgcagtaacccctcagacatcagcatggctgcccccgacttcagcagaacatgatcattctctgtcatgtgtggtaactcctcaagatggggagacttcagcacaaatgatagaagaaaatttgaactgccttggccatttaagcactattattcatgaggcaaatgaggaacagggcaatagtatgatgaatcttgattggagttggttaacagaatgagttgtcacttgttcactgtccccaaacctatggaagttgttgctatacatgttggaaatgtgtttttcccccatgaaaccattcttcagacatcagtcaatggaagaaatggctatgaacagaaactacatttctactatgatcagaagaacatgattttacaagtataacagttttgagtaattcaagcctctaaacagacaggaatttagaaaaagtcaatgtacttgtttgaatatttgttttaataccacagctatttagaagcatcatcacgacacatttgccttcagtcttggtaaaacattacttatttaactgattaaaaataccttctatgtattagtgtcaacttttaacttttgggcgtaagaccaaatgtagttttgtatacagagaagaaaacctcaagtaataggcattttaagtaaaagtctacctgtgtttttttctaaaaaggctgctcacaagttctatttcttgaagaataaattctacctccttgtgttgcactgaacaggttctcttcctggcatcataaggagttggtgtaatcattttaaattccactgaaaatttaacagtatccccttctcatcgaagggattgtgtatctgtgcttctaatattagttggctttcataaatcatgttgttgtgtgtatatgtatttaagatgtacatttaataatatcaaagagaagatgcctgttaatttataatgtatttgaaaattacatgttttttcatttgtaaaaatgagtcatttgtttaaacaatctttcatgtcttgtcatacaaatttataaaggtctgcactcctttatctgtaattgtaattccaaaatccaaaaagctctgaaaacaaggtttccataagcttggtgacaaaattcatttgcttgcaatctaatctgaactgaccttgaatctttttatcccatttagtgtgaatattcctttattttgctgcttgatgatgagagggagggctgctgccacagactgtggtgagggctggttaatgtagtatggtatatgcacaaaactacttttctaaaatctaaaatttcataattctgaaacaacttgccccaagggtttcagagaaaggactgtggacctctatcatctgctaagtaatttagaagatattatttgtcttaaaaaatgtgaaatgcttttatattctaatagtttttcactttgtgtattaaatggtttttaaattactttcttgatctctattcattataaaaatcagattataataaaacagttgaatatggcttaggaaaata

SEQ ID NO: 122065 - DNA, 645 bp, Homo sapiens
  Payload ID: 3930
  Gene Symbol: CNST
  Gene Name: consortin, connexin sorting protein
  ENST ID: ENST00000366511
  CDS Start-End: 202-615
ggggcggaaaggcgagaggtgtctcctccaccggagccaggggagacccgagcaagctccgtgacagcacgtcggccgccatgtcgccgagtggggctggaaacagacccggcgcccagcggtagccctccttgcgcctccgattcccagacatggaaggtctttaatgtaactttaaatggttcaccaaaggatgctctaatggatgacagcgatactcctacatattatctgcaaatagaaccacaagatggatgtcatcctggtgacagcgtggaaaggagtgtgacctgtctgccttctgcatcagatgaaaatgaaaatcagcttgacggggacgggcatgagcatctgaccagcagtgacagtgcgatgggaaagccccaagtgtctgagcaggacagtctcaataataatgaaagctgcacattgagctgcgaggtggctgcaggtgagaacttgcaaaacaccctttgtgaagcctccagagatgaacaggccttcttgggaaaggacaaaaaaattcctggaaaaagaagtccaagaagcaaaaaagggactgctaagaagataccaccagatagcagaatcctatttccaggaggaggactatgagaaagcaatgaaattcattcagctagaacg

SEQ ID NO: 122066 - DNA, 2422 bp, Homo sapiens
  Payload ID: 3930
  Gene Symbol: CNST
  Gene Name: consortin, connexin sorting protein
  Uniprot ID: Q6PJW8
  ENST ID: ENST00000366512
  CDS Start-End: 381-2231
cgcgggccgccagcctccagccggccagccgcgaggggtgcgcagagggaggcggggcggaaaggcgagaggtgtctcctccaccggagccaggggagacccgagcaagctccgtgacagcacgtcggccgccatgtcgccgagtggggctggaaacagacccggcgcccagcggtagccctccttgcgcctccgattcccaggtgaggagaggaggagcgggatgcaggggacccgccggctcgcggccgggatggaaagcctttcggaagcctctcgctcctccccctgcgctgtcctcctccagccgcgcagcctctgccctccggacatggaaggtctttaatgtaactttaaatggttcaccaaaggatgctctaatggatgacagcgatactcctacatattatctgcaaatagaaccacaagatggatgtcatcctggtgacagcgtggaaaggagtgtgacctgtctgccttctgcatcagatgaaaatgaaaatcagcttgacggggacgggcatgagcatctgaccagcagtgacagtgcgatgggaaagccccaagtgtctgagcaggacagtctcaataataatgaaagctgcacattgagctgcgaggtggctgcaggtgagaacttgcaaaacaccctttgtgaagcctccagagatgaacaggccttcttgggaaaggacaaaaaaattcctggaaaaagaagtccaagaagcaaaaaagggactgctaagaagataccaccaggacttttttcaggagatattgcacctttaatgcaagaaaaagtactaagcgcagtcacatatgctgttgatgatgaagaagctgctgaagtaaatgctaatgagcagccagaggcgccaaagcttgttctgcagtctctgttttcacttatacgaggtgaagttgagcagttggattcaagagcacttcccctttgccttcatcagatagcagaatcctatttccaggaggaggactatgagaaagcaatgaaattcattcagctagaacgattgtatcatgagcaattgctcgcaaatctttctgccattcaagaacagtgggaaacaaaatggaaaactgtgcaaccacatacagttacggctctaaggaattcagaaaagggatttaatggtgaagattttgaacggcttacgaaaatttgtgcaacacatcaagatcctcttttatccaaacataagatagcagctgtggagaagtcccaggaaaggaaatgctccacgcagttactagtgtctgaagatccaaaggaaggaggagctaccaccaaagagtcagagagtaaaacttgtctcggcacagagtcaagtaaagaaagccaacatacagtggagcccctggggagcagtccctgctgtcatcagatggacgtgcaaacagattccccaagcctttcggtaactgcaggaaaggaccacatggaggagctgctctgcagcgctgaagccacgttagcgctccacacccagtcctccgagacagcagggagcccgtctgggccagactcttctgaggatgcttgtgaggatgacagtcgcttgcagctggctcaaacagaggcctgccaggatgtggccagaatagagggcattgctgaagaccctaaggtgtttctttccagcaagtcaaagacagagccgttgatttcaccaggctgtgaccgtatacctcctgcattgatttctgagggtaaatattcacaggctcagaggaaagaactccgtttgccacttcgggatgcttctgaggcgttgcccacagaccaacttgagaacaatgaattaaatgagctgcagcagcctgatcttacagacagtgatggaaaatcaccacaggcgcaggctgactcagacggttctgagaatgtgctctgtggaaataatcaaatatctgacttaggcatactgcttccagaggtgtgtatggccccagaggaaaagggagataaagacgaccaactcaacaaagaaacagaagactatttgaacagccttttagaaggatgtttaaaagatactgaagattccctttcctatgaagataaccaagacgacgactccgatctccttcaagatctctctcctgaagaagcatcctatagtctccaggagaatctgccttctgatgagagctgtctttctcttgatgatcttgccaaaaggatagagattgcagaggtaaatcagagatgaagtacaattaaaagtaaaatggcatttaaaaaacatatatatgtattaaatattgccttgtttttgtaagttttcccttgtctcaaacatgagggaaaattctagttaacgtaagcttttaattattagtagtttttacatttgtatgtattgaataaaatgacttttaatcattgcaatgttcatactac

SEQ ID NO: 122067 - DNA, 5126 bp, Homo sapiens
  Payload ID: 3930
  Gene Symbol: CNST
  Gene Name: consortin, connexin sorting protein
  Uniprot ID: Q6PJW8
  ENST ID: ENST00000366513
  CDS Start-End: 270-2447
tctatgctccgcggtcgcgggccgccagcctccagccggccagccgcgaggggtgcgcagagggaggcggggcggaaaggcgagaggtgtctcctccaccggagccaggggagacccgagcaagctccgtgacagcacgtcggccgccatgtcgccgagtggggctggaaacagacccggcgcccagcggtagccctccttgcgcctccgattcccagacatggaaggtctttaatgtaactttaaatggttcaccaaaggatgctctaatggatgacagcgatactcctacatattatctgcaaatagaaccacaagatggatgtcatcctggtgacagcgtggaaaggagtgtgacctgtctgccttctgcatcagatgaaaatgaaaatcagcttgacggggacgggcatgagcatctgaccagcagtgacagtgcgatgggaaagccccaagtgtctgagcaggacagtctcaataataatgaaagctgcacattgagctgcgaggtggctgcaggtgagaacttgcaaaacaccctttgtgaagcctccagagatgaacaggccttcttgggaaaggacaaaaaaattcctggaaaaagaagtccaagaagcaaaaaagggactgctaagaagataccaccaggacttttttcaggagatattgcacctttaatgcaagaaaaagtactaagcgcagtcacatatgctgttgatgatgaagaagctgctgaagtaaatgctaatgagcagccagaggcgccaaagcttgttctgcagtctctgttttcacttatacgaggtgaagttgagcagttggattcaagagcacttcccctttgccttcatcagatagcagaatcctatttccaggaggaggactatgagaaagcaatgaaattcattcagctagaacgattgtatcatgagcaattgctcgcaaatctttctgccattcaagaacagtgggaaacaaaatggaaaactgtgcaaccacatacagttacggctctaaggaattcagaaaagggatttaatggtgaagattttgaacggcttacgaaaatttgtgcaacacatcaagatcctcttttatccaaacataagatagcagctgtggagaagtcccaggaaaggaaatgctccacgcagttactagtgtctgaagatccaaaggaaggaggagctaccaccaaagagtcagagagtaaaacttgtctcggcacagagtcaagtaaagaaagccaacatacagtggagcccctggggagcagtccctgctgtcatcagatggacgtgcaaacagattccccaagcctttcggtaactgcaggaaaggaccacatggaggagctgctctgcagcgctgaagccacgttagcgctccacacccagtcctccgagacagcagggagcccgtctgggccagactcttctgaggatgcttgtgaggatgacagtcgcttgcagctggctcaaacagaggcctgccaggatgtggccagaatagagggcattgctgaagaccctaaggtgtttctttccagcaagtcaaagacagagccgttgatttcaccaggctgtgaccgtatacctcctgcattgatttctgagggtaaatattcacaggctcagaggaaagaactccgtttgccacttcgggatgcttctgaggcgttgcccacagaccaacttgagaacaatgaattaaatgagctgcagcagcctgatcttacagacagtgatggaaaatcaccacaggcgcaggctgactcagacggttctgagaatgtgctctgtggaaataatcaaatatctgacttaggcatactgcttccagaggtgtgtatggccccagaggaaaagggagataaagacgaccaactcaacaaagaaacagaagactatttgaacagccttttagaaggatgtttaaaagatactgaagattccctttcctatgaagataaccaagacgacgactccgatctccttcaagatctctctcctgaagaagcatcctatagtctccaggagaatctgccttctgatgagagctgtctttctcttgatgatcttgccaaaaggatagagattgcagaggttgttcctactgaaggattggtctccatattaaagaagaggaatgatactgtaggagatcatcctgcccaaatgcaacacaaaccatctaagcgaagagtgagattccaagaaatagacgatagcttggatcaagatgaagttggaggtggctcctgtattttgctggtcttgctgtgcatagcaacggttttcctcagtgttggaggaactgcattatactgcactttcggtgacatggagtcacctgtttgtactgactttgcagacaacatggacttctattacactaagttacttcagggagtggcagaactgaagcactggatctacctctcctagcagcattccagacacagacatgctggcagtgagagtgaaaggcgggagactttctaaacagtttttctttcaggaattctgtagcattcccccttccctctgttaggaaccaaggacatcagaaatagcaactttaagtggcaagccggaggaactctgttagaataatccacacagtgaggcaaatatcaatctaagcattgtggatggaaggaatggtctttggagagagcatatccatctcctcctcactgcctcctaatgtcatgaggtacactgagcagaattaaacagggtagtcttaaccacactatttttagctaccttgtcaagctaatggttaaagaacacttttggtttacacttgttgggtcatagaagttgctttccgccatcacgcaataagtttgtgtgtaatcagaaggagttaccttatggtttcagtgtcattctttagttaacttgggagctgtgtaatttaggctttgcgtattatttcacttctgttctccacttatgaagtgattgtgtgtttgcgtgtgtgtgcgtgcgcatgtgcttccggcagttaacataagcaaatacccaacatcacaaagatgatctttcttcttttaacttgatgatgatgtgcaggcacaaatctttggagaaggcttaactgtggaatagatgaattctagaactcttgaccctgcaatgagaaactgtgacagatctgtgtcaattaacttgattagccagaaattaatcacaggcctagagaccaaagaaaaagctcccctgagtctcaggcaacagttttgtcacggatgcaaagcttcctgaaatcatgaatgctggactcagtttggcaaacgcttacacctattatgttctgagattctgagaaccagaatgcaaacttaagtaagatacagttcccactgtaggtgttttaatcctggtcttatatagaataaaccagtactttgctgagtgaaatcaccatatagaattcagtattaacagatcatgcattcagatgcttgaatgtgcattcttgttgtgggcttgatttagatcctattgcggggtcattacgcaaaaattcaatcataccttccatagacaaatgtctgatttttgtttaaatctgtccgttaggtggcctttccttatctgaggtgtagtggtctaacatttaggaagccttgctttgactttatcgggcagcattaaaaaaaaaacaacaaagaaaaaccaaacatgaattatagtttttaacaagtgatctttatttcctgtcttctgttaggatcatttgaaagaaaaagggagaacttactttctagttgttactggctggcacagtacctccctttgtgtttctgcttatttatttagattatgtgaatcttaaagggctttttatatcagttgaaagtgtgttactgcgcatgcatttggtgattccagtgctagatatttaattactgtgtatttagtgttttgattttctataatttcagttccgcgtgtttttacacttgttcattttaaattgatgtttcattttcacttataatactgtttgacttgtctctatcatgtcaccataaactgtaatattttcaagggttatagatcaaagatatttatttagaaatgtacaagataatgaaatttagattccttatacttaaggctgattttattagaagattattttaatgttctattataaattttaagaatttgtattcaaattgtatgtaaaatatgtaaaatgttgacggtactatattaagtggttctataaaagctattcacaagttctactgtgatggacatcctcatcatagacaaacctcctctgttttatcctcaatttctagttacagaaatttggtgatgcttatttttgccaattttatgtcaaaataagttaaaacttccctcctgttcacctcttgggtctctatcctgtgtaacctctggtgtagtatttgcccataggcaaccagagccacttcctctgaacccaacatctcctggggaccttcgcagcaagaggaaagcactgagacaatagcttgctaagcaggggcccagtggtgtctcagagaaaccatgggtgtcctcgccacttcccagggagggtgaggtgagctcgggaacataacgatgttttgacttacaataggcatgaaatcgcaactagaaaaattagggcagtttttaaaaatgtcatagttatctattgcatgaactggagtaattccacctggtggtgaaaggattgttatttcacacatgaaaaattcatccagttttactaaaatgtaattttttctgtcatttgaaagtactgacaactatttgtaactaatcttccttaagaactgtatttgagggtatcaaatcaagcttgtaatttaaaatctgtaccaacaaagtgtctcagagagtttatttgaaccattgggtgctgagaaaaaactgctttaaagtgaaactttgatttcagaagttgatctggccctacaagtagacagtcatctactttgggaagactaataggtccttaggtaacggctcttctgctttaaaatacctcccccatctgctgacagtagctgaagattattctaaacattcattcttttagatttaaaaataaaaatcttctggaggatt

SEQ ID NO: 122068 - DNA, 3328 bp, Homo sapiens
  Payload ID: 3931
  Gene Symbol: CNTN1
  Gene Name: contactin 1
  Uniprot ID: Q12860
  ENST ID: ENST00000348761
  CDS Start-End: 75-3098
gtttaaaattatccaactgccatagagctaaattcttttttggaaaattgaaccgaacttctactgaatacaagatgaaaatgtggttgctggtcagtcatcttgtgataatatctattactacctgtttagcagtttctgaggaagacaaaggatttggaccaatttttgaagagcagccaatcaataccatttatccagaggaatcactggaaggaaaagtctcactcaactgtagggcacgagccagccctttcccggtttacaaatggagaatgaataatggggacgttgatctcacaagtgatcgatacagtatggtaggaggaaaccttgttatcaacaaccctgacaaacagaaagatgctggaatatactactgtttagcatctaataactacgggatggtcagaagcactgaagcaaccctgagctttggatatcttgatcctttcccacctgaggaacgtcctgaggtcagagtaaaagaagggaaaggaatggtgcttctctgtgaccccccataccattttccagatgatcttagctatcgctggcttctaaatgaatttcctgtatttatcacaatggataaacggcgatttgtgtctcagacaaatggcaatctctacattgcaaatgttgaggcttccgacaaaggcaattattcctgctttgtttccagtccttctattacaaagagcgtgttcagcaaattcatcccactcattccaatacctgaacgaacaacaaaaccatatcctgctgatattgtagttcagttcaaggatgtatatgcattgatgggccaaaatgtgaccttagaatgttttgcacttggaaatcctgttccggatatccgatggcggaaggttctagaaccaatgccaagcactgctgagattagcacctctggggctgttcttaagatcttcaatattcagctagaagatgaaggcatctatgaatgtgaggctgagaacattagaggaaaggataaacatcaagcaagaatttatgttcaagcattccctgagtgggtagaacacatcaatgacacagaggtggacataggcagtgatctctactggccttgtgtggccacaggaaagcccatccctacaatccgatggttgaaaaatggatatgcgtatcataaaggggaattaagactgtatgatgtgacttttgaaaatgccggaatgtatcagtgcatagctgaaaacacatatggagccatttatgcaaatgctgagttgaagatcttggcgttggctccaacttttgaaatgaatcctatgaagaaaaagatcctggctgctaaaggtggaagggtgataattgaatgcaaacctaaagctgcaccgaaaccaaagttttcatggagtaaagggacagagtggcttgtcaatagcagcagaatactcatttgggaagatggtagcttggaaatcaacaacattacaaggaatgatggaggtatctatacatgctttgcagaaaataacagagggaaagctaatagcactggaacccttgttatcacagatcctacgcgaattatattggccccaattaatgccgatatcacagttggagaaaacgccaccatgcagtgtgctgcgtcctttgatcctgccttggatctcacatttgtttggtccttcaatggctatgtgatcgattttaacaaagagaatattcactaccagaggaattttatgctggattccaatggggaattactaatccgaaatgcgcagctgaaacatgctggaagatacacatgcactgcccagacaattgtggacaattcttcagcttcagctgaccttgtagtgagaggccctccaggccctccaggtggtctgagaatagaagacattagagccacttctgtggcacttacttggagccgtggttcagacaatcatagtcctatttctaaatacactatccagaccaagactattctttcagatgactggaaagatgcaaagacagatcccccaattattgaaggaaatatggaggcagcaagagcagtggacttaatcccatggatggagtatgaattccgcgtggtagcaaccaatacactgggtagaggagagcccagtataccatctaacagaattaaaacagacggtgctgcaccaaatgtggctccttcagatgtaggaggtggaggtggaagaaacagagagctgaccataacatgggcgcctttgtcaagagaataccactatggcaacaattttggttacatagtggcatttaagccatttgatggagaagaatggaaaaaagtcacagttactaatcctgatactggccgatatgtccataaagatgaaaccatgagcccttccactgcatttcaagttaaagtcaaggccttcaacaacaaaggagatggaccttacagcctagtagcagtcattaattcagcacaagacgctcccagtgaagccccaacagaagtaggtgtaaaagtcttatcatcttctgagatatctgttcattgggaacatgttttagaaaaaatagtggaaagctatcagattcggtattgggctgcccatgacaaagaagaagctgcaaacagagttcaagtcaccagccaagagtactcggccaggctcgagaaccttctgccagacacccagtattttatagaagtcggggcctgcaatagtgcagggtgtggacctccaagtgacatgattgaggctttcaccaagaaagcacctcctagccagcctccaaggatcatcagttcagtaaggtctggttcacgctatataatcacctgggatcatgtcgttgcactatcaaatgaatctacagtgacgggatataaggtactctacagacctgatggccagcatgatggcaagctgtattcaactcacaaacactccatagaagtcccaatccccagagatggagaatacgttgtggaggttcgcgcgcacagtgatggaggagatggagtggtgtctcaagtcaaaatttcaggtgcacccaccctatccccaagtcttctcggcttactgctgcctgcctttggcatccttgtctacttggaattctgaatgtgttgtgacagctgctgttcccatcccagctcagaagacacccttcaaccctgggatgaccacaattccttccaatttctgcggctccatcctaagccaaataaattatactttaacaaactattcaactgatttacaacacacatgatgactgaggcattcgggaaccccttcatccaaaagaataaacttttaaatggatataaatgatttttaactcgttccaa

SEQ ID NO: 122069 - DNA, 5507 bp, Homo sapiens
  Payload ID: 3931
  Gene Symbol: CNTN1
  Gene Name: contactin 1
  Uniprot ID: Q12860
  ENST ID: ENST00000347616
  CDS Start-End: 80-3136
caggtgtttaaaattatccaactgccatagagctaaattcttttttggaaaattgaaccgaacttctactgaatacaagatgaaaatgtggttgctggtcagtcatcttgtgataatatctattactacctgtttagcagagtttacatggtatagaagatatggtcatggagtttctgaggaagacaaaggatttggaccaatttttgaagagcagccaatcaataccatttatccagaggaatcactggaaggaaaagtctcactcaactgtagggcacgagccagccctttcccggtttacaaatggagaatgaataatggggacgttgatctcacaagtgatcgatacagtatggtaggaggaaaccttgttatcaacaaccctgacaaacagaaagatgctggaatatactactgtttagcatctaataactacgggatggtcagaagcactgaagcaaccctgagctttggatatcttgatcctttcccacctgaggaacgtcctgaggtcagagtaaaagaagggaaaggaatggtgcttctctgtgaccccccataccattttccagatgatcttagctatcgctggcttctaaatgaatttcctgtatttatcacaatggataaacggcgatttgtgtctcagacaaatggcaatctctacattgcaaatgttgaggcttccgacaaaggcaattattcctgctttgtttccagtccttctattacaaagagcgtgttcagcaaattcatcccactcattccaatacctgaacgaacaacaaaaccatatcctgctgatattgtagttcagttcaaggatgtatatgcattgatgggccaaaatgtgaccttagaatgttttgcacttggaaatcctgttccggatatccgatggcggaaggttctagaaccaatgccaagcactgctgagattagcacctctggggctgttcttaagatcttcaatattcagctagaagatgaaggcatctatgaatgtgaggctgagaacattagaggaaaggataaacatcaagcaagaatttatgttcaagcattccctgagtgggtagaacacatcaatgacacagaggtggacataggcagtgatctctactggccttgtgtggccacaggaaagcccatccctacaatccgatggttgaaaaatggatatgcgtatcataaaggggaattaagactgtatgatgtgacttttgaaaatgccggaatgtatcagtgcatagctgaaaacacatatggagccatttatgcaaatgctgagttgaagatcttggcgttggctccaacttttgaaatgaatcctatgaagaaaaagatcctggctgctaaaggtggaagggtgataattgaatgcaaacctaaagctgcaccgaaaccaaagttttcatggagtaaagggacagagtggcttgtcaatagcagcagaatactcatttgggaagatggtagcttggaaatcaacaacattacaaggaatgatggaggtatctatacatgctttgcagaaaataacagagggaaagctaatagcactggaacccttgttatcacagatcctacgcgaattatattggccccaattaatgccgatatcacagttggagaaaacgccaccatgcagtgtgctgcgtcctttgatcctgccttggatctcacatttgtttggtccttcaatggctatgtgatcgattttaacaaagagaatattcactaccagaggaattttatgctggattccaatggggaattactaatccgaaatgcgcagctgaaacatgctggaagatacacatgcactgcccagacaattgtggacaattcttcagcttcagctgaccttgtagtgagaggccctccaggccctccaggtggtctgagaatagaagacattagagccacttctgtggcacttacttggagccgtggttcagacaatcatagtcctatttctaaatacactatccagaccaagactattctttcagatgactggaaagatgcaaagacagatcccccaattattgaaggaaatatggaggcagcaagagcagtggacttaatcccatggatggagtatgaattccgcgtggtagcaaccaatacactgggtagaggagagcccagtataccatctaacagaattaaaacagacggtgctgcaccaaatgtggctccttcagatgtaggaggtggaggtggaagaaacagagagctgaccataacatgggcgcctttgtcaagagaataccactatggcaacaattttggttacatagtggcatttaagccatttgatggagaagaatggaaaaaagtcacagttactaatcctgatactggccgatatgtccataaagatgaaaccatgagcccttccactgcatttcaagttaaagtcaaggccttcaacaacaaaggagatggaccttacagcctagtagcagtcattaattcagcacaagacgctcccagtgaagccccaacagaagtaggtgtaaaagtcttatcatcttctgagatatctgttcattgggaacatgttttagaaaaaatagtggaaagctatcagattcggtattgggctgcccatgacaaagaagaagctgcaaacagagttcaagtcaccagccaagagtactcggccaggctcgagaaccttctgccagacacccagtattttatagaagtcggggcctgcaatagtgcagggtgtggacctccaagtgacatgattgaggctttcaccaagaaagcacctcctagccagcctccaaggatcatcagttcagtaaggtctggttcacgctatataatcacctgggatcatgtcgttgcactatcaaatgaatctacagtgacgggatataaggtactctacagacctgatggccagcatgatggcaagctgtattcaactcacaaacactccatagaagtcccaatccccagagatggagaatacgttgtggaggttcgcgcgcacagtgatggaggagatggagtggtgtctcaagtcaaaatttcaggtgcacccaccctatccccaagtcttctcggcttactgctgcctgcctttggcatccttgtctacttggaattctgaatgtgttgtgacagctgctgttcccatcccagctcagaagacacccttcaaccctgggatgaccacaattccttccaatttctgcggctccatcctaagccaaataaattatactttaacaaactattcaactgatttacaacacacatgatgactgaggcattcgggaaccccttcatccaaaagaataaacttttaaatggatataaatgatttttaactcgttccaatatgccttataaaccacttaacctgattctgtgacagttgcatgatttaacccaatgggacaagttacagtgttcaattcaatactataggctgtagagtgaaagtcaaatcaccatatacaggtgctttaaatttaataacaagttgtgaaatataatagagattgaaatgttggttgtatgtggtaaatgtaagagtaatacagtctcttgtactttcctcactgttttgggtactgcatattattgaatggcccctatcattcatgacatcttgagttttcttgaaaagacaatagagtgtaacaaatattttgtcagaaatcccattatcaaatcatgagttgaaagattttgactattgaaaaccaaattctagaacttactatcagtattcttattttcaaaggaaataattttctaaatatttgattttcagaatcagttttttaatagtaaagttaacataccatatagatttttttttacttttatattctactctgaagttattttatgcttttcttatcaatttcaaatctcaaaaatcacagctcttatctagagtatcataatattgctatatttgttcatatgtggagtgacaaattttgaaaagtagagtgcttccttttttattgagatgtgacagtctttacatggttaggaataagtgacagttaagtgaatatcacaattactagtatgttggtttttctgcttcattcctaagtattacgtttctttattgcagatgtcagatcaaaaagtcacctgtaggttgaaaaagctaccgtattccattttgtaaaaataacaataataataataataataattagttttaagctcatttcccacttcaatgcaatactgaaaactggctaaaaataccaaatcaatatactgctaatggtactttgaagagtatgcaaaactggaaggccaggaggaggcaaataatatgtctttccgatggtgtctcccaagtgttggtgctttgggtttttataagttgtgaaaaggaagatgcacatttcttcattctccatggtgtgcatggaaatgtgtttgagtgtggatgtaaaagaaatcgagtaataaagaattagctggcttgtgaaatagtgcagtgttggatgcttcaagaggtataatcctattttattagcacaaacttgctagctaattagagtttatctttttagaaaggacaccgtataggttcgtaaaaaatatttacaggaagcaaaatagatctattactactttaccgactttaccccctttctttaatttgtataatttttgtactatatatcgatgtgtaaatgtttagagtcttcattatgaaaatatcaataaatatttcattagtttacatttaactctggtataaaatgaaacttttaaaaataagtgaaatggatgatttcccagtggaagtatgtcaacagtcttaagatcattgccagatttcataaaatatttaagtatttgaaaaagaaacaaaatgtcttcatactttagggaaacgaataccctgtataccttctgtacaaatgtttgtgttttcattgttacactttggggttttacttttgcaatgtgacccatgttgggcatttttatataatcaacaactaaatcttttgccaaatgcatgcttgccttttattttctaatatatgataataacgagcaaaactggttagattttgcatgaaatggttctgaaaggtaagaggaaaacagactttggaggttgtttagttttgaatttctgacagagataaagtagtttaaaatctctcgtacactgataactcaagcttttcattttctcatacagttgtacagatttaactgggaccatcagttttaaactgttgtcaagctaactaataatcatctgctttaagacgcaagattctgaattaaactttatataggtatagatacatctgttgtttctttgtatttcaggaaaggtgatagtagttttatttgatactgataaatattgaattgattttttagttattttttatcattttttcaatggagtagtataggactgtgctttgtcctttttatgaatgaaaaaattagtataaagtaataaatgtcttatgttaccc

SEQ ID NO: 122070 - DNA, 5557 bp, Homo sapiens
  Payload ID: 3931
  Gene Symbol: CNTN1
  Gene Name: contactin 1
  Uniprot ID: Q12860
  ENST ID: ENST00000551295
  CDS Start-End: 118-3174
tccagctgtgccgcaccgaggcgagcaggagcagggaacaggtgtttaaaattatccaactgccatagagctaaattcttttttggaaaattgaaccgaacttctactgaatacaagatgaaaatgtggttgctggtcagtcatcttgtgataatatctattactacctgtttagcagagtttacatggtatagaagatatggtcatggagtttctgaggaagacaaaggatttggaccaatttttgaagagcagccaatcaataccatttatccagaggaatcactggaaggaaaagtctcactcaactgtagggcacgagccagccctttcccggtttacaaatggagaatgaataatggggacgttgatctcacaagtgatcgatacagtatggtaggaggaaaccttgttatcaacaaccctgacaaacagaaagatgctggaatatactactgtttagcatctaataactacgggatggtcagaagcactgaagcaaccctgagctttggatatcttgatcctttcccacctgaggaacgtcctgaggtcagagtaaaagaagggaaaggaatggtgcttctctgtgaccccccataccattttccagatgatcttagctatcgctggcttctaaatgaatttcctgtatttatcacaatggataaacggcgatttgtgtctcagacaaatggcaatctctacattgcaaatgttgaggcttccgacaaaggcaattattcctgctttgtttccagtccttctattacaaagagcgtgttcagcaaattcatcccactcattccaatacctgaacgaacaacaaaaccatatcctgctgatattgtagttcagttcaaggatgtatatgcattgatgggccaaaatgtgaccttagaatgttttgcacttggaaatcctgttccggatatccgatggcggaaggttctagaaccaatgccaagcactgctgagattagcacctctggggctgttcttaagatcttcaatattcagctagaagatgaaggcatctatgaatgtgaggctgagaacattagaggaaaggataaacatcaagcaagaatttatgttcaagcattccctgagtgggtagaacacatcaatgacacagaggtggacataggcagtgatctctactggccttgtgtggccacaggaaagcccatccctacaatccgatggttgaaaaatggatatgcgtatcataaaggggaattaagactgtatgatgtgacttttgaaaatgccggaatgtatcagtgcatagctgaaaacacatatggagccatttatgcaaatgctgagttgaagatcttggcgttggctccaacttttgaaatgaatcctatgaagaaaaagatcctggctgctaaaggtggaagggtgataattgaatgcaaacctaaagctgcaccgaaaccaaagttttcatggagtaaagggacagagtggcttgtcaatagcagcagaatactcatttgggaagatggtagcttggaaatcaacaacattacaaggaatgatggaggtatctatacatgctttgcagaaaataacagagggaaagctaatagcactggaacccttgttatcacagatcctacgcgaattatattggccccaattaatgccgatatcacagttggagaaaacgccaccatgcagtgtgctgcgtcctttgatcctgccttggatctcacatttgtttggtccttcaatggctatgtgatcgattttaacaaagagaatattcactaccagaggaattttatgctggattccaatggggaattactaatccgaaatgcgcagctgaaacatgctggaagatacacatgcactgcccagacaattgtggacaattcttcagcttcagctgaccttgtagtgagaggccctccaggccctccaggtggtctgagaatagaagacattagagccacttctgtggcacttacttggagccgtggttcagacaatcatagtcctatttctaaatacactatccagaccaagactattctttcagatgactggaaagatgcaaagacagatcccccaattattgaaggaaatatggaggcagcaagagcagtggacttaatcccatggatggagtatgaattccgcgtggtagcaaccaatacactgggtagaggagagcccagtataccatctaacagaattaaaacagacggtgctgcaccaaatgtggctccttcagatgtaggaggtggaggtggaagaaacagagagctgaccataacatgggcgcctttgtcaagagaataccactatggcaacaattttggttacatagtggcatttaagccatttgatggagaagaatggaaaaaagtcacagttactaatcctgatactggccgatatgtccataaagatgaaaccatgagcccttccactgcatttcaagttaaagtcaaggccttcaacaacaaaggagatggaccttacagcctagtagcagtcattaattcagcacaagacgctcccagtgaagccccaacagaagtaggtgtaaaagtcttatcatcttctgagatatctgttcattgggaacatgttttagaaaaaatagtggaaagctatcagattcggtattgggctgcccatgacaaagaagaagctgcaaacagagttcaagtcaccagccaagagtactcggccaggctcgagaaccttctgccagacacccagtattttatagaagtcggggcctgcaatagtgcagggtgtggacctccaagtgacatgattgaggctttcaccaagaaagcacctcctagccagcctccaaggatcatcagttcagtaaggtctggttcacgctatataatcacctgggatcatgtcgttgcactatcaaatgaatctacagtgacgggatataaggtactctacagacctgatggccagcatgatggcaagctgtattcaactcacaaacactccatagaagtcccaatccccagagatggagaatacgttgtggaggttcgcgcgcacagtgatggaggagatggagtggtgtctcaagtcaaaatttcaggtgcacccaccctatccccaagtcttctcggcttactgctgcctgcctttggcatccttgtctacttggaattctgaatgtgttgtgacagctgctgttcccatcccagctcagaagacacccttcaaccctgggatgaccacaattccttccaatttctgcggctccatcctaagccaaataaattatactttaacaaactattcaactgatttacaacacacatgatgactgaggcattcgggaaccccttcatccaaaagaataaacttttaaatggatataaatgatttttaactcgttccaatatgccttataaaccacttaacctgattctgtgacagttgcatgatttaacccaatgggacaagttacagtgttcaattcaatactataggctgtagagtgaaagtcaaatcaccatatacaggtgctttaaatttaataacaagttgtgaaatataatagagattgaaatgttggttgtatgtggtaaatgtaagagtaatacagtctcttgtactttcctcactgttttgggtactgcatattattgaatggcccctatcattcatgacatcttgagttttcttgaaaagacaatagagtgtaacaaatattttgtcagaaatcccattatcaaatcatgagttgaaagattttgactattgaaaaccaaattctagaacttactatcagtattcttattttcaaaggaaataattttctaaatatttgattttcagaatcagttttttaatagtaaagttaacataccatatagatttttttttacttttatattctactctgaagttattttatgcttttcttatcaatttcaaatctcaaaaatcacagctcttatctagagtatcataatattgctatatttgttcatatgtggagtgacaaattttgaaaagtagagtgcttccttttttattgagatgtgacagtctttacatggttaggaataagtgacagttaagtgaatatcacaattactagtatgttggtttttctgcttcattcctaagtattacgtttctttattgcagatgtcagatcaaaaagtcacctgtaggttgaaaaagctaccgtattccattttgtaaaaataacaataataataataataataattagttttaagctcatttcccacttcaatgcaatactgaaaactggctaaaaataccaaatcaatatactgctaatggtactttgaagagtatgcaaaactggaaggccaggaggaggcaaataatatgtctttccgatggtgtctcccaagtgttggtgctttgggtttttataagttgtgaaaaggaagatgcacatttcttcattctccatggtgtgcatggaaatgtgtttgagtgtggatgtaaaagaaatcgagtaataaagaattagctggcttgtgaaatagtgcagtgttggatgcttcaagaggtataatcctattttattagcacaaacttgctagctaattagagtttatctttttagaaaggacaccgtataggttcgtaaaaaatatttacaggaagcaaaatagatctattactactttaccgactttaccccctttctttaatttgtataatttttgtactatatatcgatgtgtaaatgtttagagtcttcattatgaaaatatcaataaatatttcattagtttacatttaactctggtataaaatgaaacttttaaaaataagtgaaatggatgatttcccagtggaagtatgtcaacagtcttaagatcattgccagatttcataaaatatttaagtatttgaaaaagaaacaaaatgtcttcatactttagggaaacgaataccctgtataccttctgtacaaatgtttgtgttttcattgttacactttggggttttacttttgcaatgtgacccatgttgggcatttttatataatcaacaactaaatcttttgccaaatgcatgcttgccttttattttctaatatatgataataacgagcaaaactggttagattttgcatgaaatggttctgaaaggtaagaggaaaacagactttggaggttgtttagttttgaatttctgacagagataaagtagtttaaaatctctcgtacactgataactcaagcttttcattttctcatacagttgtacagatttaactgggaccatcagttttaaactgttgtcaagctaactaataatcatctgctttaagacgcaagattctgaattaaactttatataggtatagatacatctgttgtttctttgtatttcaggaaaggtgatagtagttttatttgatactgataaatattgaattgattttttagttattttttatcattttttcaatggagtagtataggactgtgctttgtcctttttatgaatgaaaaaattagtataaagtaataaatgtcttatgttacccaagaaagaacaa

SEQ ID NO: 122071 - DNA, 463 bp, Homo sapiens
  Payload ID: 3931
  Gene Symbol: CNTN1
  Gene Name: contactin 1
  ENST ID: ENST00000552248
  CDS Start-End: 194-463
ctgaactgaatttacacgaaaagggaaggaggaaaatggtttgtctttttttgcagagaattctatccaaattcacttgcatttaattacttcatattttggaaatgacattttcaagtgtttaaaattatccaactgccatagagctaaattcttttttggaaaattgaaccgaacttctactgaatacaagatgaaaatgtggttgctggtcagtcatcttgtgataatatctattactacctgtttagcagagtttacatggtatagaagatatggtcatggagtttctgaggaagacaaaggatttggaccaatttttgaagagcagccaatcaataccatttatccagaggaatcactggaaggaaaagtctcactcaactgtagggcacgagccagccctttcccggtttacaaatggagaatgaataatggggacgttgatctcacaagtgatcga

SEQ ID NO: 122072 - DNA, 553 bp, Homo sapiens
  Payload ID: 3931
  Gene Symbol: CNTN1
  Gene Name: contactin 1
  ENST ID: ENST00000548005
  CDS Start-End: 299-553
agctgaactgaatttacacgaaaagggaaggaggaaaatggtttgtctttttttgcagagaattctatccaaattcacttgcatttaattacttcatattttggaaatgacattttcaaccatgtgacaaatctgcagcccctttgccatgattaaaggtctcctgaggccctgaccagaagcaaacgctagtgccaggcttcttgtacagcccgcaaaactgtgtttaaaattatccaactgccatagagctaaattcttttttggaaaattgaaccgaacttctactgaatacaagatgaaaatgtggttgctggtcagtcatcttgtgataatatctattactacctgtttagcagagtttacatggtatagaagatatggtcatggagtttctgaggaagacaaaggatttggaccaatttttgaagagcagccaatcaataccatttatccagaggaatcactggaaggaaaagtctcactcaactgtagggcacgagccagccctttcccggtttacaaatggagaatgaataatggggacgttgat

SEQ ID NO: 122073 - DNA, 3033 bp, Homo sapiens
  Payload ID: 3931
  Gene Symbol: CNTN1
  Gene Name: contactin 1
  Uniprot ID: Q12860
  ENST ID: ENST00000547702
  CDS Start-End: 228-2111
cttctgctgtcaagtagccagggtgggctccgccgaggcgaggaggggcgccggtggggagatgcgctcccaggtgtttgcagcggaagtgggaaacctgtagggtatggtccagctgtgccgcaccgaggcgagcaggagcagggaacaggtgtttaaaattatccaactgccatagagctaaattcttttttggaaaattgaaccgaacttctactgaatacaagatgaaaatgtggttgctggtcagtcatcttgtgataatatctattactacctgtttagcagagtttacatggtatagaagatatggtcatggagtttctgaggaagacaaaggatttggaccaatttttgaagagcagccaatcaataccatttatccagaggaatcactggaaggaaaagtctcactcaactgtagggcacgagccagccctttcccggtttacaaatggagaatgaataatggggacgttgatctcacaagtgatcgatacagtatggtaggaggaaaccttgttatcaacaaccctgacaaacagaaagatgctggaatatactactgtttagcatctaataactacgggatggtcagaagcactgaagcaaccctgagctttggatatcttgatcctttcccacctgaggaacgtcctgaggtcagagtaaaagaagggaaaggaatggtgcttctctgtgaccccccataccattttccagatgatcttagctatcgctggcttctaaatgaatttcctgtatttatcacaatggataaacggcgatttgtgtctcagacaaatggcaatctctacattgcaaatgttgaggcttccgacaaaggcaattattcctgctttgtttccagtccttctattacaaagagcgtgttcagcaaattcatcccactcattccaatacctgaacgaacaacaaaaccatatcctgctgatattgtagttcagttcaaggatgtatatgcattgatgggccaaaatgtgaccttagaatgttttgcacttggaaatcctgttccggatatccgatggcggaaggttctagaaccaatgccaagcactgctgagattagcacctctggggctgttcttaagatcttcaatattcagctagaagatgaaggcatctatgaatgtgaggctgagaacattagaggaaaggataaacatcaagcaagaatttatgttcaagcattccctgagtgggtagaacacatcaatgacacagaggtggacataggcagtgatctctactggccttgtgtggccacaggaaagcccatccctacaatccgatggttgaaaaatggatatgcgtatcataaaggggaattaagactgtatgatgtgacttttgaaaatgccggaatgtatcagtgcatagctgaaaacacatatggagccatttatgcaaatgctgagttgaagatcttggcgttggctccaacttttgaaatgaatcctatgaagaaaaagatcctggctgctaaaggtggaagggtgataattgaatgcaaacctaaagctgcaccgaaaccaaagttttcatggagtaaagggacagagtggcttgtcaatagcagcagaatactcatttgggaagatggtagcttggaaatcaacaacattacaaggaatgatggaggtatctatacatgctttgcagaaaataacagagggaaagctaatagcactggaacccttgttatcacagatcctacgcgaattatattggccccaattaatgccgatatcacagttggagaaaacgccaccatgcagtgtgctgcgtcctttgatcctgccttggatctcacatttgtttggtccttcaatggctatgtgatcgattttaacaaagagaatattcactaccagaggaattttatgctggattccaatggggaattactaatccgaaatgcgcagctgaaacatgctggaagatacacatgcactgcccagacaattgtggacaattcttcagcttcagctgaccttgtagtgagaggtaaaaacagaaaaggtggagagaaaaacatggtggattcctttctccccgtctgtgcaagcctgcctccaacctggtgatcgttgacactcaccatttctgtgaaagacttttttttttttaacatattatactagatttgactaactcaatcttgtagcttctgcagttctccccacccccaacctagttcttagagtatgtttccccttttgaaacatgtaaacatactttgggcataaatattttttaaaatataactataatgcttcactaataccttaaaaatgcctagtgaactaactcagtacattatataatggccaagtgaaagttttgtgttttcatgtcctgtttttctttgaaattatatagcccagaaattagctcattatctgaaaaacgtatgaagaactgatgaattgtataatacaggagtattgccattgaatgtactgtttgatttattcaagcaggtaatgaacaatgttgtcaaactctctaatgagacatcataattaggacataagctaaaaggggcattactccggcagtctttttttcttaatcctagtaccatacatattctttggcatgaaagaatgaaaagcattagtaaacaactgaagtcctaccatggctctgtagggtttttggaacaattcctggaattggaaagtgaaaatggatagcatgtgggggaaaccctcatctgagtagcaagattttagtaaagatgactaagccattaacagcatgcattcatatttaattttattgactcctgccatcagcttttgtagatcgtttgggtggaaggttgtgatttttactgggaggacttgagtagaagtggatgattaaaattgaggagtatataattctttctgggactgcttaaatgttattgtttgaaaataccttcactttccccctttggtcaaagagatgtgcttaaaattcttattccttcacaataaataattttgattttcttagaca

SEQ ID NO: 122074 - DNA, 3125 bp, Homo sapiens
  Payload ID: 3931
  Gene Symbol: CNTN1
  Gene Name: contactin 1
  Uniprot ID: Q12860
  ENST ID: ENST00000547849
  CDS Start-End: 320-2203
gctttatttgaaagtattgctatgtagacagccggcttttctgtcatctaacctgctctccccaggttggctgaaggatgggagcggctgtgcctgcctgtgaggtcacagcatgaagtccttttaacttgctttctgctgcaggagagaggcgtattgtggtataactgttgctgtatttattcaaatggacaatttgcaatagatattatacccaggacgacagataagtcaacacataaggtgtttaaaattatccaactgccatagagctaaattcttttttggaaaattgaaccgaacttctactgaatacaagatgaaaatgtggttgctggtcagtcatcttgtgataatatctattactacctgtttagcagagtttacatggtatagaagatatggtcatggagtttctgaggaagacaaaggatttggaccaatttttgaagagcagccaatcaataccatttatccagaggaatcactggaaggaaaagtctcactcaactgtagggcacgagccagccctttcccggtttacaaatggagaatgaataatggggacgttgatctcacaagtgatcgatacagtatggtaggaggaaaccttgttatcaacaaccctgacaaacagaaagatgctggaatatactactgtttagcatctaataactacgggatggtcagaagcactgaagcaaccctgagctttggatatcttgatcctttcccacctgaggaacgtcctgaggtcagagtaaaagaagggaaaggaatggtgcttctctgtgaccccccataccattttccagatgatcttagctatcgctggcttctaaatgaatttcctgtatttatcacaatggataaacggcgatttgtgtctcagacaaatggcaatctctacattgcaaatgttgaggcttccgacaaaggcaattattcctgctttgtttccagtccttctattacaaagagcgtgttcagcaaattcatcccactcattccaatacctgaacgaacaacaaaaccatatcctgctgatattgtagttcagttcaaggatgtatatgcattgatgggccaaaatgtgaccttagaatgttttgcacttggaaatcctgttccggatatccgatggcggaaggttctagaaccaatgccaagcactgctgagattagcacctctggggctgttcttaagatcttcaatattcagctagaagatgaaggcatctatgaatgtgaggctgagaacattagaggaaaggataaacatcaagcaagaatttatgttcaagcattccctgagtgggtagaacacatcaatgacacagaggtggacataggcagtgatctctactggccttgtgtggccacaggaaagcccatccctacaatccgatggttgaaaaatggatatgcgtatcataaaggggaattaagactgtatgatgtgacttttgaaaatgccggaatgtatcagtgcatagctgaaaacacatatggagccatttatgcaaatgctgagttgaagatcttggcgttggctccaacttttgaaatgaatcctatgaagaaaaagatcctggctgctaaaggtggaagggtgataattgaatgcaaacctaaagctgcaccgaaaccaaagttttcatggagtaaagggacagagtggcttgtcaatagcagcagaatactcatttgggaagatggtagcttggaaatcaacaacattacaaggaatgatggaggtatctatacatgctttgcagaaaataacagagggaaagctaatagcactggaacccttgttatcacagatcctacgcgaattatattggccccaattaatgccgatatcacagttggagaaaacgccaccatgcagtgtgctgcgtcctttgatcctgccttggatctcacatttgtttggtccttcaatggctatgtgatcgattttaacaaagagaatattcactaccagaggaattttatgctggattccaatggggaattactaatccgaaatgcgcagctgaaacatgctggaagatacacatgcactgcccagacaattgtggacaattcttcagcttcagctgaccttgtagtgagaggtaaaaacagaaaaggtggagagaaaaacatggtggattcctttctccccgtctgtgcaagcctgcctccaacctggtgatcgttgacactcaccatttctgtgaaagacttttttttttttaacatattatactagatttgactaactcaatcttgtagcttctgcagttctccccacccccaacctagttcttagagtatgtttccccttttgaaacatgtaaacatactttgggcataaatattttttaaaatataactataatgcttcactaataccttaaaaatgcctagtgaactaactcagtacattatataatggccaagtgaaagttttgtgttttcatgtcctgtttttctttgaaattatatagcccagaaattagctcattatctgaaaaacgtatgaagaactgatgaattgtataatacaggagtattgccattgaatgtactgtttgatttattcaagcaggtaatgaacaatgttgtcaaactctctaatgagacatcataattaggacataagctaaaaggggcattactccggcagtctttttttcttaatcctagtaccatacatattctttggcatgaaagaatgaaaagcattagtaaacaactgaagtcctaccatggctctgtagggtttttggaacaattcctggaattggaaagtgaaaatggatagcatgtgggggaaaccctcatctgagtagcaagattttagtaaagatgactaagccattaacagcatgcattcatatttaattttattgactcctgccatcagcttttgtagatcgtttgggtggaaggttgtgatttttactgggaggacttgagtagaagtggatgattaaaattgaggagtatataattctttctgggactgcttaaatgttattgtttgaaaataccttcactttccccctttggtcaaagagatgtgcttaaaattcttattccttcacaataaataattttgattttcttagaca

SEQ ID NO: 122075 - DNA, 512 bp, Homo sapiens
  Payload ID: 3931
  Gene Symbol: CNTN1
  Gene Name: contactin 1
  ENST ID: ENST00000548481
  CDS Start-End: 1-174
aaacactccatagaagtcccaatccccagagatggagaatacgttgtggaggttcgcgcgcacagtgatggaggagatggagtggtgtctcaagtcaaaatttcagaaggaaaatccacatccttgagaagtaaaacagccaaagatcacagaagcatcagaaccatgtcttgagcccaaatattctctgttgctaaagttatataactagctattgacagaactagaggtgcacccaccctatccccaagtcttctcggcttactgctgcctgcctttggcatccttgtctacttggaattctgaatgtgttgtgacagctgctgttcccatcccagctcagaagacacccttcaaccctgggatgaccacaattccttccaatttctgcggctccatcctaagccaaataaattatactttaacaaactattcaactgatttacaacacacatgatgactgaggcattcgggaaccccttcatccaaaagaataaacttttaaatggata

SEQ ID NO: 122076 - DNA, 572 bp, Homo sapiens
  Payload ID: 3931
  Gene Symbol: CNTN1
  Gene Name: contactin 1
  ENST ID: ENST00000552913
  CDS Start-End: 355-572
aacttgctttctgctgcaggagagaggcgtattgtggtataactgttgctgtatttattcaaatggacaatttgcaatagatattatacccaggacgacagataagtcaacacataagtagagacggggtttcaccgtgttagccaagatggtctcgatctcctgacttcgtgatccgcccgcctcgacctcccaaagtgctgggattacaggcgtgagccaccgtgcccggccgcttcaagatttcttaatgaaggtagttgcatcgatgttcataggtgtttaaaattatccaactgccatagagctaaattcttttttggaaaattgaaccgaacttctactgaatacaagatgaaaatgtggttgctggtcagtcatcttgtgataatatctattactacctgtttagcagagtttacatggtatagaagatatggtcatggagtttctgaggaagacaaaggatttggaccaatttttgaagagcagccaatcaataccatttatccagaggaatcactggaaggaaaagtctcactcaactgtagggcacgagccagccctttccc

SEQ ID NO: 122077 - DNA, 555 bp, Homo sapiens
  Payload ID: 3931
  Gene Symbol: CNTN1
  Gene Name: contactin 1
  ENST ID: ENST00000551424
  CDS Start-End: 368-555
gggtgggctccgccgaggcgaggaggggcgccggtggggagatgcgctcccaggtgtttgcagcggaagtgggaaacctgtagggtatggtccagctgtgccgcaccgaggcgagcaggagcagggaacagtagagacggggtttcaccgtgttagccaagatggtctcgatctcctgacttcgtgatccgcccgcctcgacctcccaaagtgctgggattacaggcgtgagccaccgtgcccggccgcttcaagatttcttaatgaaggtagttgcatcgatgttcataggtgtttaaaattatccaactgccatagagctaaattcttttttggaaaattgaaccgaacttctactgaatacaagatgaaaatgtggttgctggtcagtcatcttgtgataatatctattactacctgtttagcagagtttacatggtatagaagatatggtcatggagtttctgaggaagacaaaggatttggaccaatttttgaagagcagccaatcaataccatttatccagaggaatcactggaaggaaaagtctcact

SEQ ID NO: 122078 - DNA, 8141 bp, Homo sapiens
  Payload ID: 3932
  Gene Symbol: CNTN2
  Gene Name: contactin 2 (axonal)
  Uniprot ID: Q02246
  ENST ID: ENST00000331830
  CDS Start-End: 285-3407
gctccgggcgcgctcacacacacgcgccctcacccgccaccgccgccgcggccgccgccgcacccggacagcgagcggctgaggccgccagggcccaaaggacagcggcccagacaggggctggcggcccggccggccccggctcaccgactcgggcagcatccacctgccccagccaacacccttctctcgccccaggtcctttctcagcctccagctgggctgtccccaagctgagctgaggctcttctcctccgatccccacctctgcccggacatccaccatggggacagccaccaggaggaagccacacctgctgctggtagctgctgtggcccttgtctcctcttcagcttggagttcagccctgggatcccaaaccaccttcgggcctgtctttgaagaccagcccctcagtgtgctattcccagaggagtccacggaggagcaggtgttgctggcatgccgcgcccgggccagccctccagccacctatcggtggaagatgaatggtaccgagatgaagctggagccaggttcccgtcaccagctggtggggggcaacctggtcatcatgaaccccaccaaggcacaggatgccggggtctaccagtgcctggcctccaacccagtgggcaccgttgtcagcagggaggccatcctccgcttcggctttctgcaggaattctccaaggaggagcgagacccagtgaaagctcatgaaggctggggggtgatgttgccctgtaacccacctgcccactacccaggcttgtcctaccgctggctcctcaacgagttccccaacttcatcccgacggacgggcgtcacttcgtgtcccagaccacagggaacctgtacattgcccgaaccaatgcctcagacctgggcaactactcctgtttggccaccagccacatggacttctccaccaagagcgtcttcagcaagtttgctcagctcaacctggctgctgaagatacccggctctttgcacccagcatcaaggcccggttcccagcagagacctatgcactggtggggcagcaggtcaccctggagtgcttcgcctttgggaaccctgtcccccggatcaagtggcgcaaagtggacggctccctgtccccgcagtggaccacagctgagcccaccctgcagatccccagcgtcagctttgaggatgagggcacctacgagtgtgaggcggagaactccaagggccgagacaccgtgcagggccgcatcatcgtgcaggctcagcctgagtggctaaaagtgatctcggacacagaggctgacattggctccaacctgcgttggggctgtgcagccgccggcaagccccggcctacagtgcgctggctgcggaacggggagcctctggcctcccagaaccgggtggaggtgttggctggggacctgcggttctccaagctgagcctggaagactcgggcatgtaccagtgtgtggcagagaataagcacggtaccatctacgccagcgccgagctagccgtgcaagcactcgcccctgacttcaggctgaatcccgtgaggcgtctgatccccgcggcccgcgggggagagatccttatcccctgccagccccgggcagctccaaaggccgtggtgctctggagcaaaggcacggagattttggtcaacagcagcagagtgactgtaactccagatggcaccttgatcataagaaacatcagccggtcagatgaaggcaaatacacctgctttgctgagaacttcatgggcaaagccaacagcactggaatcctatctgtgcgagatgcaaccaaaatcactctagccccctcaagtgccgacatcaacttgggtgacaacctgaccctacagtgccatgcctcccacgaccccaccatggacctcaccttcacctggaccctggacgacttccccatcgactttgataagcctggagggcactaccggagaactaatgtgaaggagaccattggggatctgaccatcctgaacgcccagctgcgccatggggggaagtacacgtgcatggcccagacggtggtggacagcgcgtccaaggaggccacagtcctggtccgaggtccgccaggtcccccaggaggtgtggtggtgagggacattggcgacaccaccatccagctcagctggagccgtggcttcgacaaccacagccccatcgctaagtacaccctgcaagctcgcactccacctgcagggaagtggaagcaggttcggaccaatcctgcaaacatcgagggcaatgccgagactgcacaggtgctgggcctcaccccctggatggactatgagttccgggtcatagccagcaacattctgggcactggggagcctagtgggccctccagcaaaatccggaccagggaagcagccccctcggtggcaccctcaggactcagcggaggaggtggagcccccggagagctcatcgtcaactggacgcccatgtcacgggagtaccagaacggagacggcttcggctacctgctgtccttccgcaggcagggcagcactcactggcagaccgcccgggtgcctggcgccgatgcccagtactttgtctacagcaacgagagcgtccggccctacacgccctttgaggtcaagatccgcagctacaaccgccgcggggatgggcccgagagcctcactgcactcgtgtactcagctgaggaagagcccagggtggcccctaccaaggtgtgggccaaaggggtctcatcctcagagatgaacgtgacctgggaacccgtgcagcaggacatgaatggtatcctcctggggtatgagatccgctactggaaagctggggacaaagaagcagctgcggaccgagtgaggacagcagggctggacaccagtgcccgagtcagcggcctgcatcccaacaccaagtaccatgtgaccgtgagggcctacaaccgggctggcactgggcctgccagcccttctgccaacgccacgaccatgaagccccctccgcggcgacctcctggcaacatctcctggactttctcaagctctagtcttagcattaagtgggaccctgtggtccctttccgaaatgagtctgcagtcaccggctataagatgctgtaccagaatgacttacacctgactcccacgctccacctcaccggcaagaactggatagaaatcccagtgcctgaagacattggccatgccctggtacaaattcggaccacagggcccggaggggatgggatccctgcagaagtccacatcgtgaggaatggaggcacaagcatgatggtggagaacatggcagtccgcccagcaccacaccctggcaccgtcatttcccactccgtggcgatgctgatcctcataggctccctggagctctgatcctggaacccctccctctgcgccgcagctggacgccacctccgacggacacagccagccccttcctgctgccaaggtggcctgacactgtgccagagagtggctggttttaaatacctactttaaacagtgccctttttgtaggaggtaggatattttatattctgccgcaggatagaacccacgcaaggattttctttaaattgagaggcaccaggcagtaacttccatgatgacactgacgcctatacctgagctctaggctgcctggagggaaggaacaggcccatgggaagaagggggttttaaaaacatgtcttcaactcagcagagatggccctctgggaccctatacggactccgccacttgagagcagtcctaggcccggcaggaacaccagacatgaacaggttgaagaactggagcgaagtgcacacctcaccatccttcagtctaaggaagaagggcaagccctgggaccaagagctctcccgccttctccctcgagcagcagcaaggaccctgacgctgtccccgataactccctaggggctcctgcctgcccaagcggctgagaaccagcgccccgatgcctgaggctgggagcctgagccccttcagctttgaggggggtgatactccaggctgtttggggtgggagccaaaaagagttgagaggccagggcccttggtggaaaggggcaccagccttggtctgagatagtcacaacccaggtgacgatgccctctcagccaacactgccaacctgaccctgtcatcccgattgacagcgccacttcaggtggctgggtgactaaagggcttgtcttggtggggtctcccacccctccaagacccattctgcacagtccctccagggtttgggcaggagatggccaatcatgcgcccacctctccagtgctgcctgcagtcagctcggcctccccgacctgcagccccagactctgctctcccagcactgactcactcctgcctgggaggggaatgcagcattcatgctgtgtgtcctggtattgggaggtttctgggaagggcagaggataaatgtggccctgcctgctcccaggtatacctaggaccacctggccagatccgctcccagacggccttggactgcttgcatttccccggagaaaaaggggttaataaatgggccatcctttcctgagctctgggtatactaccagtcacagaacgtcagagctggaagaagccttagagctcaacttcttcaagcccctcactttacagatgaggaaatggaggtggtccagagagggtctgggattcccaaggtcacacagcccagaagagatggggctgggttaagaactcgagtcttccacctttctgttcaaggctgtttgtctacccagaggaaggaggcactgctgaatggctatggcctggctaagaaggtgattagtcagtagggtgtgaaaattctacttcaaggggttcggattggtgatcatggggattggcatggctgggttcccgtccaaggtgtgggcagagcttctaccaaacttcaacatggagggctgacttgaagctccctgtccccctcactcttgccccaagaaaagaggccaaagcaagagcagattccctaggcaagagcagcagcacaactaggaaaccccaaagcccatgctccgacaggtggcccttcacagggggcagcgggacaggcatcttgaagggcatatgtcctcggaagctccgagcctgttttctgtagtttatagttagagctctattttgttatggttttttaaacttttaagtcctgctctattttcctgggcaggtttatgttgatgtttacccactacaattttttaaaaatataagctcacatgccttttccctgccacagccaaacccccactgcaccctacccacccacccctagcccaggtcagctttcctggagctggctaatgaaagcctcctcacctcttcccaacccttacaagcaagggtgctaggggctcagctatacgaccattctccctgacagggagtccaaacttggcctagcatccctcctggcccccctctggccacgacttggcctgtgcctggttctctatcagaaaggggatgctgaacaaaacctccttccaagttttatccaattcgttcctcattgcctcgggctgcgtcaggggaagcaggggacaggtgtccagttgctgggccgagggaggagctggtttggcataggacctaaccagtgaagctagaggctacagccactaaacttgcttcaggccaacgatagttactcacaagtaagtaccttaatgctaatgaggtccactaaaaaggggaggaaggcagacctcctgggagacccacgaagggtttttagccagggaaaactgagccccaggaaaacctaaccactgggcaggcagaatttgtttgagggatagaacgacaacaaaataaatgttcctgcagcctgagatttcaggtagagtactgactaaggtttaataagacaataggtgacctgaggacatgcaagcttgtaaaatgcaacagcctcctgctagagtgacttgtacatgagcttgcttgcagaagactagattagatgtttctcaggatcccctcctgcgcaggggttctctgattttcgtgttctctgcccagatgggctgggggagttgagagtgtgcttattttcactgcgatcatgagaccacagttctgggttatctcctctcatacatcaagccccagaggaggcggcaagaggaacagccacaaacaagtactttaccccacagcttagtggccagtaaacaccctggggactaggaaaaggaaccaactgtaggcacctctccagggcctagggagacaagtgtcctctcttctgcatacatttgggctccccttacagagccctttgccctggctctctggtccttgttgctctaacagtccagatgtacacccagcctcagggggaaggcagctctctccagacagagtctcagggcccagcaaggtcaggttatctgctttcattcagggcaacaaatgatacaaatggtgccagggagtggcaaggccatgggggtaggtgggggtgtctttttcttttcataaagtaacaacagacgagactgaggttaaacatcagaaaaaaacctctggaatgaccttcctcattccaggaggccctggaataaggaagaggcttctttctgagggagctttgaggaattttgacagctgttgacatgggatttgggaaaggtgaagctgtgactggaggggcaggagatggtccaagtgtccatccagagatgagactcttagaatcaaagtgttcagcccaggaagtcttggagatcccaccttctgtggccctgcaccttatgggaagccattaagggggctcatctaggaattctggttacagcccagtgctcatcccagcgtatgctgcctctttagggcagccccaagggccagccagcctgtactctgggcaagagcccaaaatggctaggaatgtttgactcccttaatctcttccccagctacagaggaatcttttctctgcctggtctcagaatgggactgccaactggctcattggtgggagacacagtatcctcaaacctgtggccactggcatgacagtggtgctctgtctccctgggtgacacccaccctaggcttcctcctggatgtgatggggattgccagagaggctcttagcataaaaggcattaggtgggcatttttctgtgtgcccccaaaaagctccatggaaacaggcacctggtagctgcggaacacccgtggacttgtgtatatggtcataggctttgggaagacaggacgtaaaggaaaatgagagaaacaaaatgggtcagatagctttggccacagccccaggcagcctttggggcctatgacacttagtgcccttagatgggatacatcttgcctcggccccaagactcctccaacttacccgtcccatccagggcctgcacagcttagagaggctcacagcttggcaaatgctagggcttcatcagaccactgacttgactcagtgtttgttaaaatggaaccactcccgttggcctactgtttctctcctgtacttcttgtaatgatagttatttattgactctggtagcaggcagttcttaaataaagatggtttctcaacctgttggggaagctggcacgagctgtgggtgttatcatcaggctaaagcatacctccttgtcctgttcttcactccagaggcttttatccaagaatttctttaccccccacacagtgaaatataagtaagttacaacatacagtctatattgcttcatccagtcccaggaggagggaaaaattaggccaagatcttaaggcaggtccaagcagagcacaggcaggcatttggctagaatcagttggctttacctaatacagtggcagtaaacaatgcttatgtgatggtactgcttcaaggtggcctgatttttaagacatctttgaggtgttgactcagtggtcccaaaggaaagtctccctgcagatatattaatgatacccaactggtgagaacgaggctgctgcctctactcttggttcacagcagccacaagggtgtgaattactagtcactttccagccacactttctcacacattcgataaccatttatcaaa

SEQ ID NO: 122079 - DNA, 4948 bp, Homo sapiens
  Payload ID: 3933
  Gene Symbol: CNTN3
  Gene Name: contactin 3 (plasmacytoma associated)
  Uniprot ID: Q9P232
  ENST ID: ENST00000263665
  CDS Start-End: 29-3115
gagttactcttgcatttggcaattaaagatgatgtttccatggaaacagttgatcctgctttcattcattggctgcttaggaggtgagcttctcttacaaggccctgtatttatcaaagaacccagcaacagcattttccctgttggttcagaagataaaaaaataactttgcattgtgaagcaagaggcaatccatcacctcattacagatggcagctgaatggaagtgatattgatatgagtatggaacatcgttataagttgaatggaggaaatcttgtggttattaatcccaacagaaattgggatacaggaacttaccaatgttttgcaacaaattcacttggaacaattgtcagcagagaagccaaacttcagtttgcctatcttgaaaattttaaaaccaaaatgaggagtacagtgtctgtgcgtgaaggccagggagttgtgctgctctgcggccccccaccacactctggagaactgtcatatgcttggatcttcaatgaatacccatcgtttgttgaagaagatagtcggagatttgtctcccaggagacagggcacctctacatatctaaggtggagccgtctgatgtgggaaattacacatgtgtggtgacaagtatggtgacaaatgcccgagtgctgggctctccaactcctttggtgctacgttctgatggtgtgatgggtgaatatgaacctaaaatagaagttcagtttccagaaactcttccagcagctaaaggttcgactgtgaaattggaatgttttgcccttggaaatcccatacctcagattaattggagaagaagtgatgggctgccattttccagcaaaattaaattaaggaagttcagtggtgtgcttgaaatccccaacttccaacaggaagatgcaggttcctatgaatgcattgctgagaattcacgaggaaaaaatgttgccagagggcgtctcacttactatgcaaagccccattgggttcaactcataaaggatgtggaaatagccgtggaggacagtctttattgggaatgcagggcaagcggcaagcccaagccttcctaccgatggctgaaaaatggagcagccctggtgctagaggagagaacacagatagaaaatggtgcccttacaatatcaaacctaagtgtgactgattctggcatgttccaatgcatagcagaaaacaaacatggccttgtttattccagtgctgagctcaaagttgttgcttctgctccagatttttcaaagaatccaatgaagaagttggttcaggtgcaggtgggcagcctggtcagcttggattgtaaacccagagcctccccaagggcactctcttcctggaagaagggggatgtgagcgtgcaggagcatgaaagaatttctttgttaaacgatggaggactcaaaatagccaatgtgactaaagctgatgctggaacttacacctgcatggcagaaaaccagtttgggaaagcaaatggcacaacacatttggttgttacggaaccaacaagaataactttggcaccatctaacatggatgtttctgttggtgaaagcgtcatattgccctgccaggtacaacatgacccgctgttagacatcatctttacctggtatttcaatggggcccttgcagattttaagaaagatggatctcactttgagaaagttggtgggagttcatctggtgatttaatgatcagaaacattcagctgaaacacagtgggaaatatgtttgtatggtgcaaacgggggtggacagtgtttcatctgctgctgacctcatagtaagaggttcacctggaccaccagaaaatgtgaaggtagatgaaattacagacacaacagcccaactctcttggaaagaaggtaaagacaaccatagcccagttatatcctattctatccaggctcggacacctttctccgtgggttggcaaaccgtcacaacagtgcctgaggtcatcgatgggaagacgcacacagccactgtagttgagttaaacccatgggtggaatatgaatttcgggttgtagccagtaacaaaattggaggtggagaaccaagtttaccctcagaaaaagtaagaactgaagaggcagttccagaagtgcctccttctgaagtcaatggaggaggcggaagccggtctgaacttgtgataacctgggatccagtccctgaagaactacagaatggtgaaggttttgggtatgttgttgctttccgccctcttggggttaccacctggatccagacagtggtgacatcccctgacaccccaagatatgtctttaggaatgaaagcatcgtgccatattcaccatatgaagttaaagtgggtgtttataataacaaaggtgaaggaccatttagcccagtgacaacagtgttctctgcagaagaagagcctacagtggccccatctcaagtctctgcaaatagcctatcttcctcagaaattgaggtttcatggaacaccattccttggaagttgagcaatggacatttactgggctatgaggtgcggtactggaatgggggtggaaaggaggaatcatccagtaagatgaaagtggcaggaaatgagacatcagccagactacggggcctgaagagcaacctggcctattacacggctgtccgggcttacaacagtgccggcgctgggccttttagcgccacagttaatgtaaccaccaagaaaacgcctcccagtcagccaccaggaaatgttgtttggaatgccacagacactaaagtgttacttaattgggagcaagttaaagccatggagaatgagtcagaagtaacaggatataaagttttctataggactagcagtcaaaataacgtacaagtactgaacacaaataaaacttcagctgaacttgtgctgcccattaaagaggactacattattgaagtcaaggccacaacagatggaggggatgggaccagtagtgaacagatcaggattccacgaataaccagtatggatgcaagaggatccacttcagccatctcgaatgtccaccctatgtcaagttatatgcctatagtactgttcttaattgtatatgtcctgtggtgatattaactcctttttattatttattggaaagttatttggttaccaaaaaaagtgctttcatgaaatgcagtgattatgcatgtttttttcaactcttatttttaactttctacttcattataggtaaatatgaatataattaaaaaaacagtaaatccttttaggggaatctgaaatgccttaatattaacttgataaaccaaaggaatttacatattacatacttcagacttttgatataaatgttcttaaactatgagtttaagcactgcctatggataaagactcacacactctcacatgtacacacacacgcatgagaatttctttttacattgaaaaactctttcatttaattcaaatgctattttcccattataatagcattatttggaagacttaaccagtatcaatttgaaatgctgatttaagtccccaaggatgaaaaatacattttaaaaattattttgttggagaggagtggcatgtgattcaaaagagcattgttggaaaatgctactgtggggcttagaagaatgatgtttggtttggtatgctgctaactagttgtaagactttacaaatcactttgccatctgtacctctcaattattcctctataaaatatggagataataatacctatctgatcagactttgccccatgaattagtttttaaaagataaagactgaagtatgaaagtgcttttgtcaccccaaatgcaattgacccatgcaaaatattagcatgaatttatttaatcacataaaagtcatgaagaccagccagattttcaagcttcattctgtttcattcagttatattccaaaattcaaatgatcacattttattctttctcaaaaaaaaaaagtttttttaaattaaaaaaggaattgtttccttcacagctatgaataagctttcaggttttattaaaacctagaggaaaaaatcaggaatgacctgaatctcaacccaaatattaaacaaaatccacataatccctcatttcaatttccaattccattaagggaccctctctttttggatggcagagatggttttttaatgaaatcccaccatctatctgagtgagtctggcaggctttttagttcctgagttaaatttgtaatagaaccaaggcaatgctgctgactttgatatgtatgactcagtctttcaatatgtggttttcaaaaaattgttgaagacgtgacttcatagcaatatatagagaataaattaaaatcagcagattgagttttcaacattgcaaaatcagttttttacctctttcctaccaatttcacattttgcagaaacttgttcacatttccaacaatatcagaattagaaaacagttcagataacaagaaagattaaaaattagggaaattctgatatcaccataaagcactattttacatttagagattacatttaagataaagtcatcatacacaaaaacaataaatatttataactttctctataaggtccgcatatactgtatatattgaaacaatctgaatgactagtagatttcatatgaccattgttatttccactttctccaatacttgtattttatgctacatgtaatgaagttggacctttttattatttagtaattcctatatgttcctatacttttcattttcaagatgattgctctattgtttcatgttgtttctagcaatatatctccatgagatatgcactttgtttcatattgaaaagtataaaatttatctttcaattcctgtgtgtgtatcctatggttatctgtatgtattattttctattctaataaaatttataacaagcaaa

SEQ ID NO: 122080 - DNA, 2322 bp, Homo sapiens
  Payload ID: 3934
  Gene Symbol: CNTN4
  Gene Name: contactin 4
  Uniprot ID: Q8IWV2
  ENST ID: ENST00000397459
  CDS Start-End: 91-2187
gttctatgttcccagtgggaacataccagatggaggctttgatttgctcaacctaattggattcaaaaaataaatgatattcacgtggccatggaagaaaatgtcttttgggaatgtaaagcaaatggaaggcctaagcctacatacaagtggctaaaaaatggcgaacctctgctaactcgggatagaattcaaattgagcaaggaacactcaacataacaatagtgaacctctcagatgctggcatgtatcagtgtttggcagagaataaacatggagttatcttttccaacgcagagcttagtgttatagctgtaggtccagatttttcaagaacactcttgaaaagagtaactcttgtcaaagtgggaggtgaagttgtcattgagtgtaagccaaaagcgtctccaaaacctgtttacacctggaagaaaggaagggatatattaaaagaaaatgaaagaattaccatttctgaagatggaaacctcagaatcatcaacgttactaaatcagacgctgggagttatacctgtatagccactaaccattttggaactgctagcagtactggaaacttggtagtgaaagatccaacaagggtaatggtacccccttccagtatggatgtcactgttggagagagtattgttttaccgtgccaggtaacgcatgatcactcgctagacatcgtgtttacttggtcatttaatggacacctgatagactttgacagagatggggaccactttgaaagagttggagggcaggattcagctggtgatttgatgatccgaaacatccaactgaagcatgctgggaaatatgtctgcatggtccaaacaagtgtggacaggctatctgctgctgcagacctgattgtaagaggtcctccaggtcccccagaggctgtgacaatagacgaaatcacagataccactgctcagctctcctggagacccgggcctgacaaccacagccccatcaccatgtatgtcattcaagccaggactccattctccgtgggctggcaagcagtcagtacagtcccagaactcattgatgggaagacattcacagcgaccgtggtgggtttgaacccttgggttgaatatgaattccgcacagttgcagccaacgtgattgggattggggagcccagccgcccctcagagaaacggagaacagaagaagctctccccgaagtcacaccagcgaatgtcagtggtggcggaggcagcaaatctgaactggttataacctgggagacggtccctgaggaattacagaatggtcgaggctttggttatgtggtggccttccggccctacggtaaaatgatctggatgctgacagtgctggcctcagctgatgcctctagatacgtgttcaggaatgagagcgtgcaccccttctctccctttgaggttaaagtaggtgtcttcaacaacaaaggagaaggccctttcagtcccaccacggtggtgtattctgcagaagaagaacccaccaaaccaccagccagtatctttgccagaagtctttctgccacagatattgaagttttctgggcctccccactggagaagaatagaggacgaatacaaggttatgaggttaaatattggagacatgaagacaaagaagaaaatgctagaaaaatacgaacagttggaaatcagacatcaacaaaaatcacgaacttaaaaggcagtgtgctgtatcacttagctgtcaaggcatataattctgctgggacaggcccctctagtgcaacagtcaatgtgacaacccgaaagccaccaccaagtcaaccccccggaaacatcatatggaattcatcagactccaaaattatcctgaattgggatcaagtgaaggccctggataatgagtcggaagtaaaaggatacaaagtcttgtacagatggaacagacaaagcagcacatctgtcattgaaacaaataaaacatcggtggagctttctttgcctttcgatgaagattatataatagaaattaagccattcagcgacggaggagatggcagcagcagtgaacaaattcgaattccaaagatatcaaatgcctacgcgagaggatctggggcttccacttcgaatgcatgtacgctgtcagccatcagtacaataatgatttccctcacagctaggtccagtttatgacaaaagttatctgaaggacttgctgtttataatataagcaacatttagctagttgttttgaagacacccagtactaagtaatattgttgttcaagtacatcttattactggaataaaaatgttttttgcttcttt

SEQ ID NO: 122081 - DNA, 5198 bp, Homo sapiens
  Payload ID: 3934
  Gene Symbol: CNTN4
  Gene Name: contactin 4
  Uniprot ID: Q8IWV2
  ENST ID: ENST00000397461
  CDS Start-End: 385-3465
gccattctcccgcctcagcctcccgagtagctgggactacaggcgccgccaccacgcctggctaatttttgtatttttagtagagacggggtttcaccgtgttagccaggatggtctcgatctcctgacctcgtgatccgcccgcctcggcctcccaaagtgctgggatgacaggcgtgagccaccgtgcccggcctggctctgtttttattagaaaaattctcaatcgtcgtcttttaagaatcattgacatagagtaactccacagcatgtgtcttcaagagcttccctaaaagattaaaggttatacaaaacttaaaagaagcagcaattctattcgcttgttattggacttgaaactccctttgacctcggaaactgaagatgaggttgccatgggaactgctggtactgcaatcattcattttgtgccttgcagatgattccacactgcatggcccgatttttattcaagaaccaagtcctgtaatgttccctttggattctgaggagaaaaaagtgaagctcaattgtgaagttaaaggaaatccaaaacctcatatcaggtggaagttaaatggaacagatgttgacactggtatggatttccgctacagtgttgttgaagggagcttgttgatcaataaccccaataaaacccaagatgctggaacgtaccagtgcacagcgacaaactcgtttggaacaattgttagcagagaagcaaagcttcagtttgcttatcttgacaactttaaaacaagaacaagaagcactgtgtctgtccgtcgaggtcaaggaatggtgctactgtgtggcccgccaccccattctggagagctgagttatgcctggatcttcaatgaatacccttcctatcaggataatcgccgctttgtttctcaagagactgggaatctgtatattgccaaagtagaaaaatcagatgttgggaattatacctgtgtggttaccaataccgtgacaaaccacaaggtcctggggccacctacaccactaatattgagaaatgatggagtgatgggtgaatatgagcccaaaatagaagtgcagttcccagaaacagttccgactgcaaaaggagcaacggtgaagctggaatgctttgctttaggaaatccagtaccaactattatctggcgaagagctgatggaaagccaatagcaaggaaagccagaagacacaagtcaaatggaattcttgagatccctaattttcagcaggaggatgctggtttatatgaatgtgtagctgaaaattccagagggaaaaatgtagcaaggggacagctaactttctatgctcaacctaattggattcaaaaaataaatgatattcacgtggccatggaagaaaatgtcttttgggaatgtaaagcaaatggaaggcctaagcctacatacaagtggctaaaaaatggcgaacctctgctaactcgggatagaattcaaattgagcaaggaacactcaacataacaatagtgaacctctcagatgctggcatgtatcagtgtttggcagagaataaacatggagttatcttttccaacgcagagcttagtgttatagctgtaggtccagatttttcaagaacactcttgaaaagagtaactcttgtcaaagtgggaggtgaagttgtcattgagtgtaagccaaaagcgtctccaaaacctgtttacacctggaagaaaggaagggatatattaaaagaaaatgaaagaattaccatttctgaagatggaaacctcagaatcatcaacgttactaaatcagacgctgggagttatacctgtatagccactaaccattttggaactgctagcagtactggaaacttggtagtgaaagatccaacaagggtaatggtacccccttccagtatggatgtcactgttggagagagtattgttttaccgtgccaggtaacgcatgatcactcgctagacatcgtgtttacttggtcatttaatggacacctgatagactttgacagagatggggaccactttgaaagagttggagggcaggattcagctggtgatttgatgatccgaaacatccaactgaagcatgctgggaaatatgtctgcatggtccaaacaagtgtggacaggctatctgctgctgcagacctgattgtaagaggtcctccaggtcccccagaggctgtgacaatagacgaaatcacagataccactgctcagctctcctggagacccgggcctgacaaccacagccccatcaccatgtatgtcattcaagccaggactccattctccgtgggctggcaagcagtcagtacagtcccagaactcattgatgggaagacattcacagcgaccgtggtgggtttgaacccttgggttgaatatgaattccgcacagttgcagccaacgtgattgggattggggagcccagccgcccctcagagaaacggagaacagaagaagctctccccgaagtcacaccagcgaatgtcagtggtggcggaggcagcaaatctgaactggttataacctgggagacggtccctgaggaattacagaatggtcgaggctttggttatgtggtggccttccggccctacggtaaaatgatctggatgctgacagtgctggcctcagctgatgcctctagatacgtgttcaggaatgagagcgtgcaccccttctctccctttgaggttaaagtaggtgtcttcaacaacaaaggagaaggccctttcagtcccaccacggtggtgtattctgcagaagaagaacccaccaaaccaccagccagtatctttgccagaagtctttctgccacagatattgaagttttctgggcctccccactggagaagaatagaggacgaatacaaggttatgaggttaaatattggagacatgaagacaaagaagaaaatgctagaaaaatacgaacagttggaaatcagacatcaacaaaaatcacgaacttaaaaggcagtgtgctgtatcacttagctgtcaaggcatataattctgctgggacaggcccctctagtgcaacagtcaatgtgacaacccgaaagccaccaccaagtcaaccccccggaaacatcatatggaattcatcagactccaaaattatcctgaattgggatcaagtgaaggccctggataatgagtcggaagtaaaaggatacaaagtcttgtacagatggaacagacaaagcagcacatctgtcattgaaacaaataaaacatcggtggagctttctttgcctttcgatgaagattatataatagaaattaagccattcagcgacggaggagatggcagcagcagtgaacaaattcgaattccaaagatatcaaatgcctacgcgagaggatctggggcttccacttcgaatgcatgtacgctgtcagccatcagtacaataatgatttccctcacagctaggtccagtttatgacaaaagttatctgaaggacttgctgtttataatataagcaacatttagctagttgttttgaagacacccagtactaagtaatattgttgttcaagtacatcttattactggaataaaaatgttttttgcttctttaggaatggcattatacagtacttcctcaaagcaaatctagctttgtctgaagtttctttggaaactctgcaatgcactgaagacatctgtaatatgatgttaccaaagcagtttacatatgtccttatatgcatattttttattatatatttagtgttttatagaattttttaaagttaacatataatgtagatattaattttttcctcggctgtaaaatgctatgggcaacacaatcatgcaattataatttgaaaatatttcctttaaagacagagtttgaaactcatcttggtaaataaattgcaaattactcgtacagttttacaaggatctcatggcagaacagcggaagacttggtccgtaactcaaggctgttgtatgcaaactactcttctagtggttaatgcacttgacatgtacagtatgtttcccatgccgttgtgattttgacatgtacagtatgttttcatgccgttgtgaattttgttgttcaacccaacttgagatggtttcaggaatggctgcaatctcaaaagctcaatgtactgcccaagaggcaccttgtgcaatattcccatccctgaatttagcattgtacaggaagattttcttttcactcaactgagttagcattgtctttgtggtagcattatcttagacattaaatttgaagtaacatatatcctgtagtaacatagacccaaagttactatagtcaaccaagtctttcaaaggataaaagatcattttattatctttaactgtatctattttgaatgtaaatttaaaaaaagtaattctctgtcaatggattcgtaatttctttacaaaatttcttatatataatatgtgtatctctgtaataatagagcccttcttttgaatcaaaattacatatggactttggaagattgctcctatttcaacaaatagttgctgcaagaatttttaatatgactctataaaagctctttagtacaattgtatggtttcttgatgattctgttttgcaataggtagcctagttgctttatatgctttaccttctaggtcttaaaatcacacattggaaaatgacaatatcaacaaaactgtattcttatgaaaagaactatttgttacaatgagaaaggttttgtgagtaaaccctactggacagtgacataaaaggcaatggaattttctataaacattttctcatgtaaacatgctgccaccttttcttctttctcagagaactcaaatttgctatagtttgtcatttttgcttacaaataatataacttttcaaccttctagttatatttatccaataaagtcataatcgggattccatttgtgtaaaaactagggtggtaaccggaaaaaaatattgtcagtatttcaagctgtgttcctttcttagtttgatatggttacttctatgttgaaataaaatttaaaatcacatgcaaaaaaaaaatcagcaaaataataaaatgaacgaaaaaaaatgacacccagggagttcccaaccccagtgtaaatgatatttaccagtgatctagcatatgtaatcttttttaaaggtattgttaataaatattctgtcatt

SEQ ID NO: 122082 - DNA, 566 bp, Homo sapiens
  Payload ID: 3934
  Gene Symbol: CNTN4
  Gene Name: contactin 4
  ENST ID: ENST00000455083
  CDS Start-End: 403-566
aagtagggagctttcgccgccgccccgggcccctcggactgtgccggcgccgcacccgaggctctcgccagcccggcgccccggtgctgagtgggtgaaaaagaacagtgtgtcatgaagacaggcacctggaggtgatttgggtggcattcatgagaaaattcacgttacccacttcgctaactgatgaaacactgccagagcccacttggactgtttcgcaactttacttaagggaataaaagctctcatgctgaggaatcattgacatagagtaactccacagcatgtgtcttcaagagcttccctaaaagattaaaggttatacaaaacttaaaagaagcagcaattctattcgcttgttattggacttgaaactccctttgacctcggaaactgaagatgaggttgccatgggaactgctggtactgcaatcattcattttgtgccttgcagatgattccacactgcatggcccgatttttattcaagaaccaagtcctgtaatgttccctttggattctgaggagaaaaaagtgaagctcaattgtgaagttaaaggaaa

SEQ ID NO: 122083 - DNA, 5093 bp, Homo sapiens
  Payload ID: 3934
  Gene Symbol: CNTN4
  Gene Name: contactin 4
  Uniprot ID: Q8IWV2
  ENST ID: ENST00000418658
  CDS Start-End: 280-3360
ctgtgccggcgccgcacccgaggctctcgccagcccggcgccccggtgctgagtgggtgaaaaagaacagtgtgtcatgaagacaggcacctggaggtgatttgggtggcattcatgagaaaattcacgttacccgaatcattgacatagagtaactccacagcatgtgtcttcaagagcttccctaaaagattaaaggttatacaaaacttaaaagaagcagcaattctattcgcttgttattggacttgaaactccctttgacctcggaaactgaagatgaggttgccatgggaactgctggtactgcaatcattcattttgtgccttgcagatgattccacactgcatggcccgatttttattcaagaaccaagtcctgtaatgttccctttggattctgaggagaaaaaagtgaagctcaattgtgaagttaaaggaaatccaaaacctcatatcaggtggaagttaaatggaacagatgttgacactggtatggatttccgctacagtgttgttgaagggagcttgttgatcaataaccccaataaaacccaagatgctggaacgtaccagtgcacagcgacaaactcgtttggaacaattgttagcagagaagcaaagcttcagtttgcttatcttgacaactttaaaacaagaacaagaagcactgtgtctgtccgtcgaggtcaaggaatggtgctactgtgtggcccgccaccccattctggagagctgagttatgcctggatcttcaatgaatacccttcctatcaggataatcgccgctttgtttctcaagagactgggaatctgtatattgccaaagtagaaaaatcagatgttgggaattatacctgtgtggttaccaataccgtgacaaaccacaaggtcctggggccacctacaccactaatattgagaaatgatggagtgatgggtgaatatgagcccaaaatagaagtgcagttcccagaaacagttccgactgcaaaaggagcaacggtgaagctggaatgctttgctttaggaaatccagtaccaactattatctggcgaagagctgatggaaagccaatagcaaggaaagccagaagacacaagtcaaatggaattcttgagatccctaattttcagcaggaggatgctggtttatatgaatgtgtagctgaaaattccagagggaaaaatgtagcaaggggacagctaactttctatgctcaacctaattggattcaaaaaataaatgatattcacgtggccatggaagaaaatgtcttttgggaatgtaaagcaaatggaaggcctaagcctacatacaagtggctaaaaaatggcgaacctctgctaactcgggatagaattcaaattgagcaaggaacactcaacataacaatagtgaacctctcagatgctggcatgtatcagtgtttggcagagaataaacatggagttatcttttccaacgcagagcttagtgttatagctgtaggtccagatttttcaagaacactcttgaaaagagtaactcttgtcaaagtgggaggtgaagttgtcattgagtgtaagccaaaagcgtctccaaaacctgtttacacctggaagaaaggaagggatatattaaaagaaaatgaaagaattaccatttctgaagatggaaacctcagaatcatcaacgttactaaatcagacgctgggagttatacctgtatagccactaaccattttggaactgctagcagtactggaaacttggtagtgaaagatccaacaagggtaatggtacccccttccagtatggatgtcactgttggagagagtattgttttaccgtgccaggtaacgcatgatcactcgctagacatcgtgtttacttggtcatttaatggacacctgatagactttgacagagatggggaccactttgaaagagttggagggcaggattcagctggtgatttgatgatccgaaacatccaactgaagcatgctgggaaatatgtctgcatggtccaaacaagtgtggacaggctatctgctgctgcagacctgattgtaagaggtcctccaggtcccccagaggctgtgacaatagacgaaatcacagataccactgctcagctctcctggagacccgggcctgacaaccacagccccatcaccatgtatgtcattcaagccaggactccattctccgtgggctggcaagcagtcagtacagtcccagaactcattgatgggaagacattcacagcgaccgtggtgggtttgaacccttgggttgaatatgaattccgcacagttgcagccaacgtgattgggattggggagcccagccgcccctcagagaaacggagaacagaagaagctctccccgaagtcacaccagcgaatgtcagtggtggcggaggcagcaaatctgaactggttataacctgggagacggtccctgaggaattacagaatggtcgaggctttggttatgtggtggccttccggccctacggtaaaatgatctggatgctgacagtgctggcctcagctgatgcctctagatacgtgttcaggaatgagagcgtgcaccccttctctccctttgaggttaaagtaggtgtcttcaacaacaaaggagaaggccctttcagtcccaccacggtggtgtattctgcagaagaagaacccaccaaaccaccagccagtatctttgccagaagtctttctgccacagatattgaagttttctgggcctccccactggagaagaatagaggacgaatacaaggttatgaggttaaatattggagacatgaagacaaagaagaaaatgctagaaaaatacgaacagttggaaatcagacatcaacaaaaatcacgaacttaaaaggcagtgtgctgtatcacttagctgtcaaggcatataattctgctgggacaggcccctctagtgcaacagtcaatgtgacaacccgaaagccaccaccaagtcaaccccccggaaacatcatatggaattcatcagactccaaaattatcctgaattgggatcaagtgaaggccctggataatgagtcggaagtaaaaggatacaaagtcttgtacagatggaacagacaaagcagcacatctgtcattgaaacaaataaaacatcggtggagctttctttgcctttcgatgaagattatataatagaaattaagccattcagcgacggaggagatggcagcagcagtgaacaaattcgaattccaaagatatcaaatgcctacgcgagaggatctggggcttccacttcgaatgcatgtacgctgtcagccatcagtacaataatgatttccctcacagctaggtccagtttatgacaaaagttatctgaaggacttgctgtttataatataagcaacatttagctagttgttttgaagacacccagtactaagtaatattgttgttcaagtacatcttattactggaataaaaatgttttttgcttctttaggaatggcattatacagtacttcctcaaagcaaatctagctttgtctgaagtttctttggaaactctgcaatgcactgaagacatctgtaatatgatgttaccaaagcagtttacatatgtccttatatgcatattttttattatatatttagtgttttatagaattttttaaagttaacatataatgtagatattaattttttcctcggctgtaaaatgctatgggcaacacaatcatgcaattataatttgaaaatatttcctttaaagacagagtttgaaactcatcttggtaaataaattgcaaattactcgtacagttttacaaggatctcatggcagaacagcggaagacttggtccgtaactcaaggctgttgtatgcaaactactcttctagtggttaatgcacttgacatgtacagtatgtttcccatgccgttgtgattttgacatgtacagtatgttttcatgccgttgtgaattttgttgttcaacccaacttgagatggtttcaggaatggctgcaatctcaaaagctcaatgtactgcccaagaggcaccttgtgcaatattcccatccctgaatttagcattgtacaggaagattttcttttcactcaactgagttagcattgtctttgtggtagcattatcttagacattaaatttgaagtaacatatatcctgtagtaacatagacccaaagttactatagtcaaccaagtctttcaaaggataaaagatcattttattatctttaactgtatctattttgaatgtaaatttaaaaaaagtaattctctgtcaatggattcgtaatttctttacaaaatttcttatatataatatgtgtatctctgtaataatagagcccttcttttgaatcaaaattacatatggactttggaagattgctcctatttcaacaaatagttgctgcaagaatttttaatatgactctataaaagctctttagtacaattgtatggtttcttgatgattctgttttgcaataggtagcctagttgctttatatgctttaccttctaggtcttaaaatcacacattggaaaatgacaatatcaacaaaactgtattcttatgaaaagaactatttgttacaatgagaaaggttttgtgagtaaaccctactggacagtgacataaaaggcaatggaattttctataaacattttctcatgtaaacatgctgccaccttttcttctttctcagagaactcaaatttgctatagtttgtcatttttgcttacaaataatataacttttcaaccttctagttatatttatccaataaagtcataatcgggattccatttgtgtaaaaactagggtggtaaccggaaaaaaatattgtcagtatttcaagctgtgttcctttcttagtttgatatggttacttctatgttgaaataaaatttaaaatcacatgcaaaaaaaaaatcagcaaaataataaaatgaacgaaaaaaaatgacacccagggagttcccaaccccagtgtaaatgatatttaccagtgatctagcatatgtaatcttttttaaaggtattgttaataaatattctgtcatt

SEQ ID NO: 122084 - DNA, 3057 bp, Homo sapiens
  Payload ID: 3934
  Gene Symbol: CNTN4
  Gene Name: contactin 4
  ENST ID: ENST00000427741
  CDS Start-End: 634-1332
gttcgacgccaggattggctgcaagtagggagctttcgccgccgccccgggcccctcggactgtgccggcgccgcacccgaggctctcgccagcccggcgccccggtgctgagccggaaaataagtttgttgcgctgcgaggcagccacaaaacaaggaaccgagagcccggaatgctgcgggaagccttcaagtcagctcctccgactggttcgggctactgccccctctccgtgcgccctggcctctggcgccgggttcccggcggggcttttcttctgacagcccagtcacagcccgcagcagagggacgcgaacctggggagtggagggacctgggactaaaggaacaggagcccgtagccgtggtggaaggagccgcgtggagacggaggctgatgtctgtggcgcccgctgggtgccgggctggctgctgagcgctgaggctgcggcggcgagcgacaggccaggtgcctgctcttagggaaggaatcattgacatagagtaactccacagcatgtgtcttcaagagcttccctaaaagattaaaggttatacaaaacttaaaagaagcagcaattctattcgcttgttattggacttgaaactccctttgacctcggaaactgaagatgaggttgccatgggaactgctggtactgcaatcattcattttgtgccttgcagatgattccacactgcatggcccgatttttattcaagaaccaagtcctgtaatgttccctttggattctgaggagaaaaaagtgaagctcaattgtgaagttaaaggaaatccaaaacctcatatcaggtggaagttaaatggaacagatgttgacactggtatggatttccgctacagtgttgttgaagggagcttgttgatcaataaccccaataaaacccaagatgctggaacgtaccagtgcacagcgacaaactcgtttggaacaattgttagcagagaagcaaagcttcagtttgcttatcttgacaactttaaaacaagaacaagaagcactgtgtctgtccgtcgaggtcaaggaatggtgctactgtgtggcccgccaccccattctggagagctgagttatgcctggatcttcaatgaatacccttcctatcaggataatcgccgctttgtttctcaagagactgggaatctgtatattgccaaagtagaaaaatcagatgttgggaattatacctgtgtggttaccaataccgtgacaaaccacaaggtcctggggccacctacaccactaatattgagaaatgatgtccagtaccaactattatctggcgaagagctgatggaaagccaatagcaaggaaagccagaagacacaagtcaaatggaattcttgagatccctaattttcagcaggaggatgctggtttatatgaatgtgtagctgaaaattccagagggaaaaatgtagcaaggggacagctaactttctatgctcaacctaattggattcaaaaaataaatgatattcacgtggccatggaagaaaatgtcttttgggaatgtaaagcaaatggaaggcctaagcctacatacaagtggctaaaaaatggcgaacctctgctaactcgggatagaattcaaattgagcaaggaacactcaacataacaatagtgaacctctcagatgctggcatgtatcagtgtttggcagagaataaacatggagttatcttttccaacgcagagcttagtgttatagctgtaggtccagatttttcaagaacactcttgaaaagagtaactcttgtcaaagtgggaggtgaagttgtcattgagtgtaagccaaaagcgtctccaaaacctgtttacacctggaagaaaggaagggatatattaaaagaaaatgaaagaattaccatttctgaagatggaaacctcagaatcatcaacgttactaaatcagacgctgggagttatacctgtatagccactaaccattttggaactgctagcagtactggaaacttggtagtgaaagatccaacaagggtaatggtacccccttccagtatggatgtcactgttggagagagtattgttttaccgtgccaggtaacgcatgatcactcgctagacatcgtgtttacttggtcatttaatggacacctgatagactttgacagagatggggaccactttgaaagagttggaggggattcagctggtgatttgatgatccgaaacatccaactgaagcatgctgggaaatatgtctgcatggtccaaacaagtgtggacaggctatctgctgctgcagacctgattgtaagaggtcctccaggtcccccagaggctgtgacaatagacgaaatcacagataccactgctcagctctcctggagacccgggcctgacaaccacagccccatcaccatgtatgtcattcaagccaggactccattctccgtgggctggcaagcagtcagtacagtcccagaactcattgatgggaagacattcacagcgaccgtggtgggtttgaacccttgggttgaatatgaattccgcacagttgcagccaacgtgattgggattggggagcccagccgcccctcagagaaacggagaacagaagaagctctccccgaagtcacaccagcgaatgtcagtggtggcggaggcagcaaatctgaactggttataacctgggagacggtccctgaggaattacagaatggtcgaggctttggttatgtggtggccttccggccctacggtaaaatgatctggatgctgacagtgctggcctcagctgatgcctctagatacgtgttcaggaatgagagcgtgcaccccttctctccctttgaggttaaagtaggtgtcttcaacaacaaaggagaaggccctttcagtcccaccacggtggtgtattctgcagaagaagaacccaccaaaccaccagccagtatctttgccagaagtctttctgccacagatattgaagttttctgggcctccccactggagaagaatagaggacgaatacaaggttatgaggttaaatattggagacatg

SEQ ID NO: 122085 - DNA, 528 bp, Homo sapiens
  Payload ID: 3934
  Gene Symbol: CNTN4
  Gene Name: contactin 4
  ENST ID: ENST00000434053
  CDS Start-End: 117-528
gaaactgggacattttactttacagtctattaaaggttatacaaaacttaaaagaagcagcaattctattcgcttgttattggacttgaaactccctttgacctcggaaactgaagatgaggttgccatgggaactgctggtactgcaatcattcattttgtgccttgcaggttcacagactgacttctggtccttgctgggggtgctgccagccttggaggctgatgattccacactgcatggcccgatttttattcaagaaccaagtcctgtaatgttccctttggattctgaggagaaaaaagtgaagctcaattgtgaagttaaaggaaatccaaaacctcatatcaggtggaagttaaatggaacagatgttgacactggtatggatttccgctacagtgttgttgaagggagcttgttgatcaataaccccaataaaacccaagatgctggaacgtaccagtgcacagcgacaaactcgtttggaacaattgttagcagagaagcaaagcttcagtttgctt

SEQ ID NO: 122086 - DNA, 658 bp, Homo sapiens
  Payload ID: 3934
  Gene Symbol: CNTN4
  Gene Name: contactin 4
  ENST ID: ENST00000422330
  CDS Start-End: 311-658
agccgccgcgagcgccgggagggagggcagcgccgcgccagacggagcccggggttcgacgccaggattggctgcaagtagggagctttcgccgccgccccgggcccctcggactgtgccggcgccgcacccgaggctctcgccagcccggcgccccggtgctgaggaatcattgacatagagtaactccacagcatgtgtcttcaagagcttccctaaaagattaaaggttatacaaaacttaaaagaagcagcaattctattcgcttgttattggacttgaaactccctttgacctcggaaactgaagatgaggttgccatgggaactgctggtactgcaatcattcattttgtgccttgcagatgattccacactgcatggcccgatttttattcaagaaccaagtcctgtaatgttccctttggattctgaggagaaaaaagtgaagctcaattgtgaagttaaaggaaatccaaaacctcatatcaggtggaagttaaatggaacagatgttgacactggtatggatttccgctacagtgttgttgaagggagcttgttgatcaataaccccaataaaacccaagatgctggaacgtaccagtgcacagcgacaaactcgtttggaacaattgttagcagagaagcaaagctt

SEQ ID NO: 122087 - DNA, 4980 bp, Homo sapiens
  Payload ID: 3934
  Gene Symbol: CNTN4
  Gene Name: contactin 4
  Uniprot ID: Q8IWV2
  ENST ID: ENST00000427331
  CDS Start-End: 164-3244
agtaaagataaacttgcagagaccacaaggagaaatattcccaaatctcattgtaatgtctcttctttcccacagattaaaggttatacaaaacttaaaagaagcagcaattctattcgcttgttattggacttgaaactccctttgacctcggaaactgaagatgaggttgccatgggaactgctggtactgcaatcattcattttgtgccttgcagatgattccacactgcatggcccgatttttattcaagaaccaagtcctgtaatgttccctttggattctgaggagaaaaaagtgaagctcaattgtgaagttaaaggaaatccaaaacctcatatcaggtggaagttaaatggaacagatgttgacactggtatggatttccgctacagtgttgttgaagggagcttgttgatcaataaccccaataaaacccaagatgctggaacgtaccagtgcacagcgacaaactcgtttggaacaattgttagcagagaagcaaagcttcagtttgcttatcttgacaactttaaaacaagaacaagaagcactgtgtctgtccgtcgaggtcaaggaatggtgctactgtgtggcccgccaccccattctggagagctgagttatgcctggatcttcaatgaatacccttcctatcaggataatcgccgctttgtttctcaagagactgggaatctgtatattgccaaagtagaaaaatcagatgttgggaattatacctgtgtggttaccaataccgtgacaaaccacaaggtcctggggccacctacaccactaatattgagaaatgatggagtgatgggtgaatatgagcccaaaatagaagtgcagttcccagaaacagttccgactgcaaaaggagcaacggtgaagctggaatgctttgctttaggaaatccagtaccaactattatctggcgaagagctgatggaaagccaatagcaaggaaagccagaagacacaagtcaaatggaattcttgagatccctaattttcagcaggaggatgctggtttatatgaatgtgtagctgaaaattccagagggaaaaatgtagcaaggggacagctaactttctatgctcaacctaattggattcaaaaaataaatgatattcacgtggccatggaagaaaatgtcttttgggaatgtaaagcaaatggaaggcctaagcctacatacaagtggctaaaaaatggcgaacctctgctaactcgggatagaattcaaattgagcaaggaacactcaacataacaatagtgaacctctcagatgctggcatgtatcagtgtttggcagagaataaacatggagttatcttttccaacgcagagcttagtgttatagctgtaggtccagatttttcaagaacactcttgaaaagagtaactcttgtcaaagtgggaggtgaagttgtcattgagtgtaagccaaaagcgtctccaaaacctgtttacacctggaagaaaggaagggatatattaaaagaaaatgaaagaattaccatttctgaagatggaaacctcagaatcatcaacgttactaaatcagacgctgggagttatacctgtatagccactaaccattttggaactgctagcagtactggaaacttggtagtgaaagatccaacaagggtaatggtacccccttccagtatggatgtcactgttggagagagtattgttttaccgtgccaggtaacgcatgatcactcgctagacatcgtgtttacttggtcatttaatggacacctgatagactttgacagagatggggaccactttgaaagagttggagggcaggattcagctggtgatttgatgatccgaaacatccaactgaagcatgctgggaaatatgtctgcatggtccaaacaagtgtggacaggctatctgctgctgcagacctgattgtaagaggtcctccaggtcccccagaggctgtgacaatagacgaaatcacagataccactgctcagctctcctggagacccgggcctgacaaccacagccccatcaccatgtatgtcattcaagccaggactccattctccgtgggctggcaagcagtcagtacagtcccagaactcattgatgggaagacattcacagcgaccgtggtgggtttgaacccttgggttgaatatgaattccgcacagttgcagccaacgtgattgggattggggagcccagccgcccctcagagaaacggagaacagaagaagctctccccgaagtcacaccagcgaatgtcagtggtggcggaggcagcaaatctgaactggttataacctgggagacggtccctgaggaattacagaatggtcgaggctttggttatgtggtggccttccggccctacggtaaaatgatctggatgctgacagtgctggcctcagctgatgcctctagatacgtgttcaggaatgagagcgtgcaccccttctctccctttgaggttaaagtaggtgtcttcaacaacaaaggagaaggccctttcagtcccaccacggtggtgtattctgcagaagaagaacccaccaaaccaccagccagtatctttgccagaagtctttctgccacagatattgaagttttctgggcctccccactggagaagaatagaggacgaatacaaggttatgaggttaaatattggagacatgaagacaaagaagaaaatgctagaaaaatacgaacagttggaaatcagacatcaacaaaaatcacgaacttaaaaggcagtgtgctgtatcacttagctgtcaaggcatataattctgctgggacaggcccctctagtgcaacagtcaatgtgacaacccgaaagccaccaccaagtcaaccccccggaaacatcatatggaattcatcagactccaaaattatcctgaattgggatcaagtgaaggccctggataatgagtcggaagtaaaaggatacaaagtcttgtacagatggaacagacaaagcagcacatctgtcattgaaacaaataaaacatcggtggagctttctttgcctttcgatgaagattatataatagaaattaagccattcagcgacggaggagatggcagcagcagtgaacaaattcgaattccaaagatatcaaatgcctacgcgagaggatctggggcttccacttcgaatgcatgtacgctgtcagccatcagtacaataatgatttccctcacagctaggtccagtttatgacaaaagttatctgaaggacttgctgtttataatataagcaacatttagctagttgttttgaagacacccagtactaagtaatattgttgttcaagtacatcttattactggaataaaaatgttttttgcttctttaggaatggcattatacagtacttcctcaaagcaaatctagctttgtctgaagtttctttggaaactctgcaatgcactgaagacatctgtaatatgatgttaccaaagcagtttacatatgtccttatatgcatattttttattatatatttagtgttttatagaattttttaaagttaacatataatgtagatattaattttttcctcggctgtaaaatgctatgggcaacacaatcatgcaattataatttgaaaatatttcctttaaagacagagtttgaaactcatcttggtaaataaattgcaaattactcgtacagttttacaaggatctcatggcagaacagcggaagacttggtccgtaactcaaggctgttgtatgcaaactactcttctagtggttaatgcacttgacatgtacagtatgtttcccatgccgttgtgattttgacatgtacagtatgttttcatgccgttgtgaattttgttgttcaacccaacttgagatggtttcaggaatggctgcaatctcaaaagctcaatgtactgcccaagaggcaccttgtgcaatattcccatccctgaatttagcattgtacaggaagattttcttttcactcaactgagttagcattgtctttgtggtagcattatcttagacattaaatttgaagtaacatatatcctgtagtaacatagacccaaagttactatagtcaaccaagtctttcaaaggataaaagatcattttattatctttaactgtatctattttgaatgtaaatttaaaaaaagtaattctctgtcaatggattcgtaatttctttacaaaatttcttatatataatatgtgtatctctgtaataatagagcccttcttttgaatcaaaattacatatggactttggaagattgctcctatttcaacaaatagttgctgcaagaatttttaatatgactctataaaagctctttagtacaattgtatggtttcttgatgattctgttttgcaataggtagcctagttgctttatatgctttaccttctaggtcttaaaatcacacattggaaaatgacaatatcaacaaaactgtattcttatgaaaagaactatttgttacaatgagaaaggttttgtgagtaaaccctactggacagtgacataaaaggcaatggaattttctataaacattttctcatgtaaacatgctgccaccttttcttctttctcagagaactcaaatttgctatagtttgtcatttttgcttacaaataatataacttttcaaccttctagttatatttatccaataaagtcataatcgggattccatttgtgtaaaaactagggtggtaaccggaaaaaaatattgtcagtatttcaagctgtgttcctttcttagtttgatatggttacttctatgttgaaataaaatttaaaatcacatgcaaaaaaaaaatcagcaaaataataaaatgaacgaaaaaaaatgacacccagggagttcccaaccccagtgtaaatgatatttaccagtgatctagcatatgtaatcttttttaaaggtattgttaataaatattctgtcatttgt

SEQ ID NO: 122088 - DNA, 726 bp, Homo sapiens
  Payload ID: 3934
  Gene Symbol: CNTN4
  Gene Name: contactin 4
  ENST ID: ENST00000473845
  CDS Start-End: 1-432
aatgatattcacgtggccatggaagaaaatgtcttttgggaatgtaaagcaaatggaaggcctaagcctacatacaagtggctaaaaaatggcgaacctctgctaactcgggatagaattcaaattgagcaaggaacactcaacataacaatagtgaacctctcagatgctggcatgtatcagtgtttggcagagaataaacatggagttatcttttccaacgcagagcttagtgttatagctgtaggtccagatttttcaagaacactcttgaaaagagtaactcttgtcaaagtgggaggtgaagttgtcattgagtgtaagccaaaagcgtctccaaaacctgtttacacctggaagaaaggaagggatatattaaaagaaaatgaaagtgtacatcaggggtttggtagtggctctgctcctctctaaggccagcctggtggaccaagatgctctggacgttgccattgcagaaggaaaagagccaaacatgcatgggttcttaaagcctctacttagaagtgcaacacttgcactttcactcacatttcattggccaaaacaggtcacatgttcctgcaactcagcagggaaatataatcttgctatgtgcctggaagaaaagagacaacctaatattttgaacagtattaatgactgcttacaactgctacagcttaaccattgttacaagctaattaaattacctttggggaaatagta

SEQ ID NO: 122089 - DNA, 5925 bp, Homo sapiens
  Payload ID: 3935
  Gene Symbol: CNTN5
  Gene Name: contactin 5
  ENST ID: ENST00000279463
  CDS Start-End: 6-3260
tttctcttacagagtattcaaaatctcttcctggtctctccacttcatatgctgctttgttaagaattaagaagagttcatcttcatctctctttggttccaaaaccagaccacgatacagcagcccttcattaggaacactgagtgcttcttcacccagctggctaggggcagctcagaattattattcccccatcaatctttatcattcctcagatgccttcaaacaagatgaaagtgtggactatgggccagtttttgtgcaagaaccagatgatattatttttccaactgattctgatgaaaagaaggtagcattgaattgtgaagttcgtggcaatccagttcccagttacagatggcttcgaaatggaacagaaatagatctggaaagtgattatcgctacagtttgatagatggcaccttcattataagcaatccaagtgaagcaaaggattctggtcattatcagtgtttagcaaccaacactgtggggagtattcttagtagagaagctacactgcagtttgcctatctgggaaattttagtggccggacaagaagtgcagtctctgtgagggaaggccagggtgtcgttctgatgtgctctcctccgccacattcaccagagatcatctatagctgggtatttaatgagttcccttcctttgtggcggaagacagccggcggttcatctcccaggagacaggcaacctttatatttctaaagtccaaacatcagatgttggcagctatatttgtctggtgaaaaacacagtgacgaatgctagagtccttagtcctccaacgccactcactctgcgtaatgatggtgtgatgggagaatatgagccgaaaattgaggtccattttcctttcacggttacagctgctaaaggaacaactgttaagatggaatgctttgcacttggcaaccccgttccaacaatcacatggatgaaggttaatggttatattcctagtaaggcacgtctgcggaaatctcaggcggtgctggaaataccgaatgtacagctggatgatgcaggcatttatgagtgcagagctgaaaactcacgtggaaaaaattcctttcgtggacaattacaagtatacacctacccacactgggtagaaaaactgaatgatactcagttagacagtgggagccctctccgatgggaatgtaaggctactggaaaacccagacccacgtatcgttggctgaagaatggagtacccctctcacctcagagtagggttgagatggttaatggagtattgatgatccacaatgtgaatcaatcagatgctggaatgtatcagtgtttggctgaaaataagtatggagccatttacgctagtgctgagctgaagattctagcttcagctcccacttttgcactgaatcaactgaagaaaacaataattgttaccaaagaccaagaagttgtcatagagtgcaaaccccaaggctctccaaaaccaaccatctcttggaagaaaggagacagagcagttagagaaaacaaaagaatagctattcttccagacgggagtctacggatcctaaatgcttccaaatcagacgagggaaagtacgtttgccgaggggaaaacgtctttggttctgctgaaattatagcttcgctatctgtaaaagaacctacaaggatagaacttactcctaaaagaacagaattgacagtgggagaaagcattgtccttaattgcaaagcaattcacgatgctagtttggatgtcactttctactggactctgaaaggacagcctattgatttcgaggaagagggtggacattttgaaagcatcagggcccaagcatcctctgcagatttaatgatcaggaacatccttctgatgcatgctgggagatatggctgcagggtacagaccacagcagacagtgtgtcagatgaggcagaacttcttgttaggggacccccaggcccacctgggatagtaattgttgaggaaataaccgaaagtacggccacactgtcctggagcccagcagctgacaaccacagcccaatctcctcctacaaccttcaagctcgcagcccattttccctgggctggcaaacagtaaagacagtcccagaaatcataacaggggacatggagtcagccatggctgtggacctaaatccctgggtggaatatgaatttcgagtggtagccaccaaccctattgggacaggagatccaagcaccccatctcgaatgatccgcacaaatgaagcagttccgaagacagcacccaccaatgtaagcggaagaagtggaagaaggcatgagttagtcattgcctgggagccagtatctgaagagtttcagaatggggaaggcttcggctatattgtggctttcagacccaatggaacacgtggctggaaggaaaaaatggtgacatcctctgaagcttccaaattcatttatcgagatgaaagtgtccctcctcttactccctttgaagtgaaagttggcgtttataacaataaaggagatgggccttttagtcaaattgtggtcatctgttcagctgaaggagaacccagtgctgctcccacagatgtcaaggcgacaagtgtgtctgtgtcagagattcttgttgcatggaaacacattaaagagagtctaggaagaccacagggatttgaggttggttactggaaagacatggaacaggaagatacagcagaaacagtcaaaactagagggaatgagtctttcgtcatcctaacaggattagaaggaaatacgttatatcacttcacagtgagggcttacaatggagctggatatgggccacctagcagtgaagtgagtgcaaccaccaagaaatcccctcctagtcaagcacctagcaacctcaggtgggagcagcaaggctctcaggtttctctgggctgggaacccgtcataccattagccaacgaatctgaagttgtgggttacaaggttttttataggcaagagggtcacagcaacagccaagttattgaaacacagaaacttcaagcagtagtaccactcccagatgctggagtctatattattgaagttcgagcatatagtgaaggaggagatggaacagctagttctcaaattagggtaccatcatattcaggtggaaaaatcacaagtgcacagtcgacccttcactctctctccacatcttcgtcatcagtcaccttgctcttggcattgatgattccttcaacttcctggtgaaaactgctgacttaatttgcttttgtttgctttagcttggtaacagcggtgaatagagtgtagtgtaagtggagaaccaggatcctgagatgagcttgagctttaaaaacttgggactatacatggtgaacttacaggaggttaggggggaaatattacttatccatcaggtttctctttggtttttgtaaacggagaggacagttcttagtccagtaaaaatatgcagattgtatgtaatgaatttttgtaaacaaaggtaatttctgtcaaatgtattctttacttttttaatatgttgggattttattttatatctgatgactccgagtgtgtgccatccatttgttaagtaactggcctttagcagatctgtttcaaaaacaaatacaaaaatgagaatgaaaagtttgcttaagactaagtccagtgtttttcattttccctttggctgaatatttcaattgacaaaccagcaggacatatgaaaaatgcttcagtgatgtggtccattataagataagtacacaaaaattttcttgaaaaatattgtatgattgcatagtgaaatagcaagatttgtcaatatgctattctatatgcacccctagagcaagtcattagggtagggaataagccatttacattagtgcaagatagaaagcgagtccagatgaatttcagtgctatagtttttcataaagtactatgttatctagcagcaaatataataaatatttatttttaataacaaaagatggtttaacatcaccaaaaaatatgatcactaaaaactgcagacatgctggcatgggtgctaacttaaaaatgagatgaatatgggacagagcgtttccatttctttacctactgccaaaacagatgttgaattaggtccaaggttttcttctaattgcaaaattttgcaaaaattttaagggcaatgaaaatttgttgtgcaaataattatgcatagtctgtagattaaaatggttcaagtataacaaataagttttgatttttaaaaacagttccatgcatcacataccactgataaaatcaactagtaaaataaagacagtctttcttggataaattgaatttttaattaagctgtggaaacatggcatcagtacagggattcagctagtctagccagctatgcactgtttgattctgtggcttgggaagtaatccttatttgctatttcaaagagtcatcttgagcctgagagatcctagagagttgttggaaaatgagatgaaaattttctacttgatgatatcttaaagaagttctaacaagcacaagaatgtgccagagttggcatcatacccatgaagatgcgtgaaaggatagttattgcaaagtcatatgccagagaagagcctggagaaactatggttttataggcgatgttaacaagagaacaaaaattggttttataattttatataatttaaacttgttaactgtatttgcttcattaataacaagcaaaatgaaacaatatggagctcaaattgctagctctcaaggttaatccttgtagaatcagagaagtgattgaagtttctgttctgaacatcctgaaagaatagtttcagagccacagtaaaagtctgtatgtaggttacatattctctttggggaaatgatgtaagacaccctaaacaaacaagaaattagttaaaagactcactcaatgatattatagtaaatactacagatggtaagtatttaagcctgtaagtaagtaattatgaccaagtggcctttcttgaacgcctcctttaaagtgggagaggctggactttgcaaaaacagggatgctaattgtttagctggcaaaacatgagctctcccaagtatagtttacctttatgaattgtgcatctgaataaaagacagaaagaatatttttaatgcaaaataattttacgtatttcatgaatcaagccattttcttcattttccatggtggtgtacaccagatttagtgaaggactttaagaatcaacttcttacttacactctcagaaagcaaagcccagtaaaatattaaacaaataaaatggcaaatttaaattaaccaatatttttaattagctgatggatggtacgtatctgacagagtatttacacatatagaatgtctgatgtattcttacaggaatcagagatatggaatgtttttacttaacatacacagaatatgtattttgcatcataaacctatttaaaaaacaggttttcaatgtttatgtacttatgtgctgcatatctgttactttgtagaaaccagaagagcattcttatcaaggtacattatttttcagctacagtactgagttttttctgctatgggatagtaaccacagtcttaaatcactaaagagactgtatttttgtataatgtccattgaatatgaagaaagcaacagtccttataattagaaatttcatgaaagcaaaagttttgcatacccaaatgaaggtactgtggaccccatgtcaaactgttaaatatattgtgtacgatctgtatatatactatatataaggcatataccgtgtggaaggcacagtcaaataatagttctgtgtactgttcttgtaacattagatctttttaataaataattctctttttattgactttta

SEQ ID NO: 122090 - DNA, 3679 bp, Homo sapiens
  Payload ID: 3935
  Gene Symbol: CNTN5
  Gene Name: contactin 5
  Uniprot ID: O94779
  ENST ID: ENST00000418526
  CDS Start-End: 77-3157
aaacagggcactctttaatgaagaaacaccagagctgttaaacacattgagacacagaagattctagtgactgaggatggcttcctcttggaaactaatgctgtttctgtcagtcaccatgtgtctttcagaaagtgtggactatgggccagtttttgtgcaagaaccagatgatattatttttccaactgattctgatgaaaagaaggtagcattgaattgtgaagttcgtggcaatccagttcccagttacagatggcttcgaaatggaacagaaatagatctggaaagtgattatcgctacagtttgatagatggcaccttcattataagcaatccaagtgaagcaaaggattctggtcattatcagtgtttagcaaccaacactgtggggagtattcttagtagagaagctacactgcagtttgcctatctgggaaattttagtggccggacaagaagtgcagtctctgtgagggaaggccagggtgtcgttctgatgtgctctcctccgccacattcaccagagatcatctatagctgggtatttaatgagttcccttcctttgtggcggaagacagccggcggttcatctcccaggagacaggcaacctttatatttctaaagtccaaacatcagatgttggcagctatatttgtctggtgaaaaacacagtgacgaatgctagagtccttagtcctccaacgccactcactctgcgtaatgatggtgtgatgggagaatatgagccgaaaattgaggtccattttcctttcacggttacagctgctaaaggaacaactgttaagatggaatgctttgcacttggcaaccccgttccaacaatcacatggatgaaggttaatggttatattcctagtaaggcacgtctgcggaaatctcaggcggtgctggaaataccgaatgtacagctggatgatgcaggcatttatgagtgcagagctgaaaactcacgtggaaaaaattcctttcgtggacaattacaagtatacacctacccacactgggtagaaaaactgaatgatactcagttagacagtgggagccctctccgatgggaatgtaaggctactggaaaacccagacccacgtatcgttggctgaagaatggagtacccctctcacctcagagtagggttgagatggttaatggagtattgatgatccacaatgtgaatcaatcagatgctggaatgtatcagtgtttggctgaaaataagtatggagccatttacgctagtgctgagctgaagattctagcttcagctcccacttttgcactgaatcaactgaagaaaacaataattgttaccaaagaccaagaagttgtcatagagtgcaaaccccaaggctctccaaaaccaaccatctcttggaagaaaggagacagagcagttagagaaaacaaaagaatagctattcttccagacgggagtctacggatcctaaatgcttccaaatcagacgagggaaagtacgtttgccgaggggaaaacgtctttggttctgctgaaattatagcttcgctatctgtaaaagaacctacaaggatagaacttactcctaaaagaacagaattgacagtgggagaaagcattgtccttaattgcaaagcaattcacgatgctagtttggatgtcactttctactggactctgaaaggacagcctattgatttcgaggaagagggtggacattttgaaagcatcagggcccaagcatcctctgcagatttaatgatcaggaacatccttctgatgcatgctgggagatatggctgcagggtacagaccacagcagacagtgtgtcagatgaggcagaacttcttgttaggggacccccaggcccacctgggatagtaattgttgaggaaataaccgaaagtacggccacactgtcctggagcccagcagctgacaaccacagcccaatctcctcctacaaccttcaagctcgcagcccattttccctgggctggcaaacagtaaagacagtcccagaaatcataacaggggacatggagtcagccatggctgtggacctaaatccctgggtggaatatgaatttcgagtggtagccaccaaccctattgggacaggagatccaagcaccccatctcgaatgatccgcacaaatgaagcagttccgaagacagcacccaccaatgtaagcggaagaagtggaagaaggcatgagttagtcattgcctgggagccagtatctgaagagtttcagaatggggaaggcttcggctatattgtggctttcagacccaatggaacacgtggctggaaggaaaaaatggtgacatcctctgaagcttccaaattcatttatcgagatgaaagtgtccctcctcttactccctttgaagtgaaagttggcgtttataacaataaaggagatgggccttttagtcaaattgtggtcatctgttcagctgaaggagaacccagtgctgctcccacagatgtcaaggcgacaagtgtgtctgtgtcagagattcttgttgcatggaaacacattaaagagagtctaggaagaccacagggatttgaggttggttactggaaagacatggaacaggaagatacagcagaaacagtcaaaactagagggaatgagtctttcgtcatcctaacaggattagaaggaaatacgttatatcacttcacagtgagggcttacaatggagctggatatgggccacctagcagtgaagtgagtgcaaccaccaagaaatcccctcctagtcaagcacctagcaacctcaggtgggagcagcaaggctctcaggtttctctgggctgggaacccgtcataccattagccaacgaatctgaagttgtgggttacaaggttttttataggcaagagggtcacagcaacagccaagttattgaaacacagaaacttcaagcagtagtaccactcccagatgctggagtctatattattgaagttcgagcatatagtgaaggaggagatggaacagctagttctcaaattagggtaccatcatattcaggtggaaaaatcacaagtgcacagtcgacccttcactctctctccacatcttcgtcatcagtcaccttgctcttggcattgatgattccttcaacttcctggtgaaaactgctgacttaatttgcttttgtttgctttagcttggtaacagcggtgaatagagtgtagtgtaagtggagaaccaggatcctgagatgagcttgagctttaaaaacttgggactatacatggtgaacttacaggaggttaggggggaaatattacttatccatcaggtttctctttggtttttgtaaacggagaggacagttcttagtccagtaaaaatatgcagattgtatgtaatgaatttttgtaaacaaaggtaatttctgtcaaatgtattctttacttttttaatatgttgggattttattttatatctgatgactccgagtgtgtgccatccatttgttaagtaactggcctttagcagatctgtttcaaaaacaaatacaaaaatgagaatgaaaagtttgcttaagactaagtccagtgtttttcattttccctttggctgaatatttcaattgacaaaccagcaggacatatgaaaaatgcttcagtgatgtggtccattataagata

SEQ ID NO: 122091 - DNA, 4303 bp, Homo sapiens
  Payload ID: 3935
  Gene Symbol: CNTN5
  Gene Name: contactin 5
  Uniprot ID: O94779
  ENST ID: ENST00000527185
  CDS Start-End: 340-3075
aattcgcctctgccacaggctgcaaaggacccgaggaaccgctctctctgaactgtgctgatgggcaggaggatgggagacaggaattgagagtcacagaggaaggacagtggagtctggcatcttattggtgtctttaaaggattgccatttaatgccattcaagatctactaagcatcatttttgcatgactactgcaaaaggattactttacagataccagttcctttgtcaagagcatactttggaccctgttttcagaaagcagggcactctttaatgaagaaacaccagagctgttaaacacattgagacacagaagattctagtgactgaggatggcttcctcttggaaactaatgctgtttctgtcagtcaccatgtgtctttcagagtattcaaaatctcttcctggtctctccacttcatatgctgctttgttaagaattaagaagagttcatcttcatctctctttggttccaaaaccagaccacgatacagcagcccttcattaggaacactgagtgcttcttcacccagctggctaggggcagctcagaattattattcccccatcaatctttatcattcctcagatgccttcaaacaagatgaaagtgtggactatgggccagtttttgtgcaagaaccagatgatattatttttccaactgattctgatgaaaagaaggtagcattgaattgtgaagttcgtggcaatccagttcccagttacagatggcttcgaaatggaacagaaatagatctggaaagtgattatcgctacagtttgatagatggcaccttcattataagcaatccaagtgaagcaaaggattctggtcattatcagtgtttagcaaccaacactgtggggagtattcttagtagagaagctacactgcagtttgcctatctgggaaattttagtggccggacaagaagtgcagtctctgtgagggaaggccagggtgtcgttctgatgtgctctcctccgccacattcaccagagatcatctatagctgggtatttaatgagttcccttcctttgtggcggaagacagccggcggttcatctcccaggagacaggcaacctttatatttctaaagtccaaacatcagatgttggcagctatatttgtctggtgaaaaacacagtgacgaatgctagagtccttagtcctccaacgccactcactctgcgtaatgatggtgtgatgggagaatatgagccgaaaattgaggtccattttcctttcacggttacagctgctaaaggaacaactgttaagatggaatgctttgcacttggcaaccccgttccaacaatcacatggatgaaggttaatggttatattcctagtaaggcacgtctgcggaaatctcaggcggtgctggaaataccgaatgtacagctggatgatgcaggcatttatgagtgcagagctgaaaactcacgtggaaaaaattcctttcgtggacaattacaagtatacacctacccacactgggtagaaaaactgaatgatactcagttagacagtgggagccctctccgatgggaatgtaaggctactggaaaacccagacccacgtatcgttggctgaagaatggagtacccctctcacctcagagtagggttgagatggttaatggagtattgatgatccacaatgtgaatcaatcagatgctggaatgtatcagtgtttggctgaaaataagtatggagccatttacgctagtgctgagctgaagattctagcttcagctcccacttttgcactgaatcaactgaagaaaacaataattgttaccaaagaccaagaagttgtcatagagtgcaaaccccaaggctctccaaaaccaaccatctcttggaagaaaggagacagagcagttagagaaaacaaaagaatagctattcttccagacgggagtctacggatcctaaatgcttccaaatcagacgagggaaagtacgtttgccgaggggaaaacgtctttggttctgctgaaattatagcttcgctatctgtaaaagaacctacaaggatagaacttactcctaaaagaacagaattgacagtgggagaaagcattgtccttaattgcaaagcaattcacgatgctagtttggatgtcactttctactggactctgaaaggacagcctattgatttcgaggaagagggtggacattttgaaagcatcagggcccaagcatcctctgcagatttaatgatcaggaacatccttctgatgcatgctgggagatatggctgcagggtacagaccacagcagacagtgtgtcagatgaggcagaacttcttgttaggggacccccaggcccacctgggatagtaattgttgaggaaataaccgaaagtacggccacactgtcctggagcccagcagctgacaaccacagcccaatctcctcctacaaccttcaagctcgcagcccattttccctgggctggcaaacagtaaagacagtcccagaaatcataacaggggacatggagtcagccatggctgtggacctaaatccctgggtggaatatgaatttcgagtggtagccaccaaccctattgggacaggagatccaagcaccccatctcgaatgatccgcacaaatgaagcagttccgaagacagcacccaccaatgtaagcggaagaagtggaagaaggcatgagttagtcattgcctgggagccagtatctgaagagtttcagaatggggaaggcttcggctatattgtggctttcagacccaatggaacacgtggctggaaggaaaaaatggtgacatcctctgaagcttccaaattcatttatcgagatgaaagtgtccctcctcttactccctttgaagtgaaagttggcgtttataacaataaaggagatgggccttttagtcaaattgtggtcatctgttcagctgaaggagaacccagtgctgctcccacagatgtcaaggcgacaagtgtgtctgtgtcagagattcttgttgcatggaaacacattaaagagagtctaggaagaccacagggatttgaggtatgaacagaatgattgaaaataagccttattgtttcttctgacatcacattctcctaaagagaggttttggtgacacctcagaatttcaacagaatttcttagaaattttgctctatgttaaagaaactaagaaatactattttactgggatgtgttatgttgctcattaactggtttatttttcagtacagtagcttccgtagcactatgcaaagatgtttttaaaagatgaaatagagttttagacaaaagcaggagctacaggtagatatttaattgtatccaatttactggtcattttaaaagtttttgtgtcttcctttctaataatttaatgtataaatacaagttttccttttgtactttattggtatctcttaccctcagtgctgaattatcaaattttgcttggaatttaatgatctgtattgtatctatgtattcagatagtttttttggtcccttaaatgttgctatttttaaacatagttattccagccttataatggtgaacatttcatatcaaatgaataacatcaatgaaattttagcctccgcagagaatagcagattgtgagtagtctgtgaacatgaatattttatgataacaaggtttggcttctcacacagctcttgttcttgttcttgccttgcttggccagtcatggagaggaattagggggataatgtctaaaagaaaaaaagaattagcatctgacccaagactttagttgcatttaaaaaaatttattcttacttttcctctgcttcagttcccattaagagaaaatcatcttgtgtcttgaacaatgatcaagtataggacttgtatactaacatggtttccaggctgaaacatatttttaattctatttgagttttcaaataatgcccaacaattatttgattaacatacagctggcattaaataatgatttctatgataaaaaaatttatacaatctttctaagagttacagcaagaacaatttatgggaaaccattacctacttatacaatatcatggacttatttctacaatcttgcttcaattaattatttggaatgataatttagtatctcattatgattgcatgtttaatgtgatgaatatttctgtttctcccaatccatgcttcagggaccatgtttgttcatcattaaatctcagcaaatgataatatatatatttggcccataactgaccacaataaatatgttgaatgaataaa

SEQ ID NO: 122092 - DNA, 6258 bp, Homo sapiens
  Payload ID: 3935
  Gene Symbol: CNTN5
  Gene Name: contactin 5
  Uniprot ID: O94779
  ENST ID: ENST00000524871
  CDS Start-End: 291-3593
gaactgtgctgatgggcaggaggatgggagacaggaattgagagtcacagaggaaggacagtggagtctggcatcttattggtgtctttaaaggattgccatttaatgccattcaagatctactaagcatcatttttgcatgactactgcaaaaggattactttacagataccagttcctttgtcaagagcatactttggaccctgttttcagaaagcagggcactctttaatgaagaaacaccagagctgttaaacacattgagacacagaagattctagtgactgaggatggcttcctcttggaaactaatgctgtttctgtcagtcaccatgtgtctttcagagtattcaaaatctcttcctggtctctccacttcatatgctgctttgttaagaattaagaagagttcatcttcatctctctttggttccaaaaccagaccacgatacagcagcccttcattaggaacactgagtgcttcttcacccagctggctaggggcagctcagaattattattcccccatcaatctttatcattcctcagatgccttcaaacaagatgaaagtgtggactatgggccagtttttgtgcaagaaccagatgatattatttttccaactgattctgatgaaaagaaggtagcattgaattgtgaagttcgtggcaatccagttcccagttacagatggcttcgaaatggaacagaaatagatctggaaagtgattatcgctacagtttgatagatggcaccttcattataagcaatccaagtgaagcaaaggattctggtcattatcagtgtttagcaaccaacactgtggggagtattcttagtagagaagctacactgcagtttgcctatctgggaaattttagtggccggacaagaagtgcagtctctgtgagggaaggccagggtgtcgttctgatgtgctctcctccgccacattcaccagagatcatctatagctgggtatttaatgagttcccttcctttgtggcggaagacagccggcggttcatctcccaggagacaggcaacctttatatttctaaagtccaaacatcagatgttggcagctatatttgtctggtgaaaaacacagtgacgaatgctagagtccttagtcctccaacgccactcactctgcgtaatgatggtgtgatgggagaatatgagccgaaaattgaggtccattttcctttcacggttacagctgctaaaggaacaactgttaagatggaatgctttgcacttggcaaccccgttccaacaatcacatggatgaaggttaatggttatattcctagtaaggcacgtctgcggaaatctcaggcggtgctggaaataccgaatgtacagctggatgatgcaggcatttatgagtgcagagctgaaaactcacgtggaaaaaattcctttcgtggacaattacaagtatacacctacccacactgggtagaaaaactgaatgatactcagttagacagtgggagccctctccgatgggaatgtaaggctactggaaaacccagacccacgtatcgttggctgaagaatggagtacccctctcacctcagagtagggttgagatggttaatggagtattgatgatccacaatgtgaatcaatcagatgctggaatgtatcagtgtttggctgaaaataagtatggagccatttacgctagtgctgagctgaagattctagcttcagctcccacttttgcactgaatcaactgaagaaaacaataattgttaccaaagaccaagaagttgtcatagagtgcaaaccccaaggctctccaaaaccaaccatctcttggaagaaaggagacagagcagttagagaaaacaaaagaatagctattcttccagacgggagtctacggatcctaaatgcttccaaatcagacgagggaaagtacgtttgccgaggggaaaacgtctttggttctgctgaaattatagcttcgctatctgtaaaagaacctacaaggatagaacttactcctaaaagaacagaattgacagtgggagaaagcattgtccttaattgcaaagcaattcacgatgctagtttggatgtcactttctactggactctgaaaggacagcctattgatttcgaggaagagggtggacattttgaaagcatcagggcccaagcatcctctgcagatttaatgatcaggaacatccttctgatgcatgctgggagatatggctgcagggtacagaccacagcagacagtgtgtcagatgaggcagaacttcttgttaggggacccccaggcccacctgggatagtaattgttgaggaaataaccgaaagtacggccacactgtcctggagcccagcagctgacaaccacagcccaatctcctcctacaaccttcaagctcgcagcccattttccctgggctggcaaacagtaaagacagtcccagaaatcataacaggggacatggagtcagccatggctgtggacctaaatccctgggtggaatatgaatttcgagtggtagccaccaaccctattgggacaggagatccaagcaccccatctcgaatgatccgcacaaatgaagcagttccgaagacagcacccaccaatgtaagcggaagaagtggaagaaggcatgagttagtcattgcctgggagccagtatctgaagagtttcagaatggggaaggcttcggctatattgtggctttcagacccaatggaacacgtggctggaaggaaaaaatggtgacatcctctgaagcttccaaattcatttatcgagatgaaagtgtccctcctcttactccctttgaagtgaaagttggcgtttataacaataaaggagatgggccttttagtcaaattgtggtcatctgttcagctgaaggagaacccagtgctgctcccacagatgtcaaggcgacaagtgtgtctgtgtcagagattcttgttgcatggaaacacattaaagagagtctaggaagaccacagggatttgaggttggttactggaaagacatggaacaggaagatacagcagaaacagtcaaaactagagggaatgagtctttcgtcatcctaacaggattagaaggaaatacgttatatcacttcacagtgagggcttacaatggagctggatatgggccacctagcagtgaagtgagtgcaaccaccaagaaatcccctcctagtcaagcacctagcaacctcaggtgggagcagcaaggctctcaggtttctctgggctgggaacccgtcataccattagccaacgaatctgaagttgtgggttacaaggttttttataggcaagagggtcacagcaacagccaagttattgaaacacagaaacttcaagcagtagtaccactcccagatgctggagtctatattattgaagttcgagcatatagtgaaggaggagatggaacagctagttctcaaattagggtaccatcatattcaggtggaaaaatcacaagtgcacagtcgacccttcactctctctccacatcttcgtcatcagtcaccttgctcttggcattgatgattccttcaacttcctggtgaaaactgctgacttaatttgcttttgtttgctttagcttggtaacagcggtgaatagagtgtagtgtaagtggagaaccaggatcctgagatgagcttgagctttaaaaacttgggactatacatggtgaacttacaggaggttaggggggaaatattacttatccatcaggtttctctttggtttttgtaaacggagaggacagttcttagtccagtaaaaatatgcagattgtatgtaatgaatttttgtaaacaaaggtaatttctgtcaaatgtattctttacttttttaatatgttgggattttattttatatctgatgactccgagtgtgtgccatccatttgttaagtaactggcctttagcagatctgtttcaaaaacaaatacaaaaatgagaatgaaaagtttgcttaagactaagtccagtgtttttcattttccctttggctgaatatttcaattgacaaaccagcaggacatatgaaaaatgcttcagtgatgtggtccattataagataagtacacaaaaattttcttgaaaaatattgtatgattgcatagtgaaatagcaagatttgtcaatatgctattctatatgcacccctagagcaagtcattagggtagggaataagccatttacattagtgcaagatagaaagcgagtccagatgaatttcagtgctatagtttttcataaagtactatgttatctagcagcaaatataataaatatttatttttaataacaaaagatggtttaacatcaccaaaaaatatgatcactaaaaactgcagacatgctggcatgggtgctaacttaaaaatgagatgaatatgggacagagcgtttccatttctttacctactgccaaaacagatgttgaattaggtccaaggttttcttctaattgcaaaattttgcaaaaattttaagggcaatgaaaatttgttgtgcaaataattatgcatagtctgtagattaaaatggttcaagtataacaaataagttttgatttttaaaaacagttccatgcatcacataccactgataaaatcaactagtaaaataaagacagtctttcttggataaattgaatttttaattaagctgtggaaacatggcatcagtacagggattcagctagtctagccagctatgcactgtttgattctgtggcttgggaagtaatccttatttgctatttcaaagagtcatcttgagcctgagagatcctagagagttgttggaaaatgagatgaaaattttctacttgatgatatcttaaagaagttctaacaagcacaagaatgtgccagagttggcatcatacccatgaagatgcgtgaaaggatagttattgcaaagtcatatgccagagaagagcctggagaaactatggttttataggcgatgttaacaagagaacaaaaattggttttataattttatataatttaaacttgttaactgtatttgcttcattaataacaagcaaaatgaaacaatatggagctcaaattgctagctctcaaggttaatccttgtagaatcagagaagtgattgaagtttctgttctgaacatcctgaaagaatagtttcagagccacagtaaaagtctgtatgtaggttacatattctctttggggaaatgatgtaagacaccctaaacaaacaagaaattagttaaaagactcactcaatgatattatagtaaatactacagatggtaagtatttaagcctgtaagtaagtaattatgaccaagtggcctttcttgaacgcctcctttaaagtgggagaggctggactttgcaaaaacagggatgctaattgtttagctggcaaaacatgagctctcccaagtatagtttacctttatgaattgtgcatctgaataaaagacagaaagaatatttttaatgcaaaataattttacgtatttcatgaatcaagccattttcttcattttccatggtggtgtacaccagatttagtgaaggactttaagaatcaacttcttacttacactctcagaaagcaaagcccagtaaaatattaaacaaataaaatggcaaatttaaattaaccaatatttttaattagctgatggatggtacgtatctgacagagtatttacacatatagaatgtctgatgtattcttacaggaatcagagatatggaatgtttttacttaacatacacagaatatgtattttgcatcataaacctatttaaaaaacaggttttcaatgtttatgtacttatgtgctgcatatctgttactttgtagaaaccagaagagcattcttatcaaggtacattatttttcagctacagtactgagttttttctgctatgggatagtaaccacagtcttaaatcactaaagagactgtatttttgtataatgtccattgaatatgaagaaagcaacagtccttataattagaaatttcatgaaagcaaaagttttgcatacccaaatgaaggtactgtggaccccatgtcaaactgttaaatatattgtgtacgatctgtatatatactatatataaggcatataccgtgtggaaggcacagtcaaataatagttctgtgtactgttcttgtaacattagatctttttaataaataattctctttttattgactttta

SEQ ID NO: 122093 - DNA, 3800 bp, Homo sapiens
  Payload ID: 3935
  Gene Symbol: CNTN5
  Gene Name: contactin 5
  Uniprot ID: O94779
  ENST ID: ENST00000528682
  CDS Start-End: 152-3454
gaactgtgctgatgggcaggaggatgggagacaggaattgagagtcacagaggaaggacagtggagtctggcatcttattgggcactctttaatgaagaaacaccagagctgttaaacacattgagacacagaagattctagtgactgaggatggcttcctcttggaaactaatgctgtttctgtcagtcaccatgtgtctttcagagtattcaaaatctcttcctggtctctccacttcatatgctgctttgttaagaattaagaagagttcatcttcatctctctttggttccaaaaccagaccacgatacagcagcccttcattaggaacactgagtgcttcttcacccagctggctaggggcagctcagaattattattcccccatcaatctttatcattcctcagatgccttcaaacaagatgaaagtgtggactatgggccagtttttgtgcaagaaccagatgatattatttttccaactgattctgatgaaaagaaggtagcattgaattgtgaagttcgtggcaatccagttcccagttacagatggcttcgaaatggaacagaaatagatctggaaagtgattatcgctacagtttgatagatggcaccttcattataagcaatccaagtgaagcaaaggattctggtcattatcagtgtttagcaaccaacactgtggggagtattcttagtagagaagctacactgcagtttgcctatctgggaaattttagtggccggacaagaagtgcagtctctgtgagggaaggccagggtgtcgttctgatgtgctctcctccgccacattcaccagagatcatctatagctgggtatttaatgagttcccttcctttgtggcggaagacagccggcggttcatctcccaggagacaggcaacctttatatttctaaagtccaaacatcagatgttggcagctatatttgtctggtgaaaaacacagtgacgaatgctagagtccttagtcctccaacgccactcactctgcgtaatgatggtgtgatgggagaatatgagccgaaaattgaggtccattttcctttcacggttacagctgctaaaggaacaactgttaagatggaatgctttgcacttggcaaccccgttccaacaatcacatggatgaaggttaatggttatattcctagtaaggcacgtctgcggaaatctcaggcggtgctggaaataccgaatgtacagctggatgatgcaggcatttatgagtgcagagctgaaaactcacgtggaaaaaattcctttcgtggacaattacaagtatacacctacccacactgggtagaaaaactgaatgatactcagttagacagtgggagccctctccgatgggaatgtaaggctactggaaaacccagacccacgtatcgttggctgaagaatggagtacccctctcacctcagagtagggttgagatggttaatggagtattgatgatccacaatgtgaatcaatcagatgctggaatgtatcagtgtttggctgaaaataagtatggagccatttacgctagtgctgagctgaagattctagcttcagctcccacttttgcactgaatcaactgaagaaaacaataattgttaccaaagaccaagaagttgtcatagagtgcaaaccccaaggctctccaaaaccaaccatctcttggaagaaaggagacagagcagttagagaaaacaaaagaatagctattcttccagacgggagtctacggatcctaaatgcttccaaatcagacgagggaaagtacgtttgccgaggggaaaacgtctttggttctgctgaaattatagcttcgctatctgtaaaagaacctacaaggatagaacttactcctaaaagaacagaattgacagtgggagaaagcattgtccttaattgcaaagcaattcacgatgctagtttggatgtcactttctactggactctgaaaggacagcctattgatttcgaggaagagggtggacattttgaaagcatcagggcccaagcatcctctgcagatttaatgatcaggaacatccttctgatgcatgctgggagatatggctgcagggtacagaccacagcagacagtgtgtcagatgaggcagaacttcttgttaggggacccccaggcccacctgggatagtaattgttgaggaaataaccgaaagtacggccacactgtcctggagcccagcagctgacaaccacagcccaatctcctcctacaaccttcaagctcgcagcccattttccctgggctggcaaacagtaaagacagtcccagaaatcataacaggggacatggagtcagccatggctgtggacctaaatccctgggtggaatatgaatttcgagtggtagccaccaaccctattgggacaggagatccaagcaccccatctcgaatgatccgcacaaatgaagcagttccgaagacagcacccaccaatgtaagcggaagaagtggaagaaggcatgagttagtcattgcctgggagccagtatctgaagagtttcagaatggggaaggcttcggctatattgtggctttcagacccaatggaacacgtggctggaaggaaaaaatggtgacatcctctgaagcttccaaattcatttatcgagatgaaagtgtccctcctcttactccctttgaagtgaaagttggcgtttataacaataaaggagatgggccttttagtcaaattgtggtcatctgttcagctgaaggagaacccagtgctgctcccacagatgtcaaggcgacaagtgtgtctgtgtcagagattcttgttgcatggaaacacattaaagagagtctaggaagaccacagggatttgaggttggttactggaaagacatggaacaggaagatacagcagaaacagtcaaaactagagggaatgagtctttcgtcatcctaacaggattagaaggaaatacgttatatcacttcacagtgagggcttacaatggagctggatatgggccacctagcagtgaagtgagtgcaaccaccaagaaatcccctcctagtcaagcacctagcaacctcaggtgggagcagcaaggctctcaggtttctctgggctgggaacccgtcataccattagccaacgaatctgaagttgtgggttacaaggttttttataggcaagagggtcacagcaacagccaagttattgaaacacagaaacttcaagcagtagtaccactcccagatgctggagtctatattattgaagttcgagcatatagtgaaggaggagatggaacagctagttctcaaattagggtaccatcatattcaggtggaaaaatcacaagtgcacagtcgacccttcactctctctccacatcttcgtcatcagtcaccttgctcttggcattgatgattccttcaacttcctggtgaaaactgctgacttaatttgcttttgtttgctttagcttggtaacagcggtgaatagagtgtagtgtaagtggagaaccaggatcctgagatgagcttgagctttaaaaacttgggactatacatggtgaacttacaggaggttaggggggaaatattacttatccatcaggtttctctttggtttttgtaaacggagaggacagttcttagtccagtaaaaatatgcagattgtatgtaatgaatttttgtaaacaaaggtaatttctgtcaaatgtattctttacttttttaatatgttgggattttattttatatctgatgactccgagtgtgtgccatccatt

SEQ ID NO: 122094 - DNA, 5734 bp, Homo sapiens
  Payload ID: 3935
  Gene Symbol: CNTN5
  Gene Name: contactin 5
  ENST ID: ENST00000619298
  CDS Start-End: 1-3069
gctagtttaaggaaatttaaaatgtgtctgttttgtcttacagaaagtgtggactatgggccagtttttgtgcaagaaccagatgatattatttttccaactgattctgatgaaaagaaggtagcattgaattgtgaagttcgtggcaatccagttcccagttacagatggcttcgaaatggaacagaaatagatctggaaagtgattatcgctacagtttgatagatggcaccttcattataagcaatccaagtgaagcaaaggattctggtcattatcagtgtttagcaaccaacactgtggggagtattcttagtagagaagctacactgcagtttgcctatctgggaaattttagtggccggacaagaagtgcagtctctgtgagggaaggccagggtgtcgttctgatgtgctctcctccgccacattcaccagagatcatctatagctgggtatttaatgagttcccttcctttgtggcggaagacagccggcggttcatctcccaggagacaggcaacctttatatttctaaagtccaaacatcagatgttggcagctatatttgtctggtgaaaaacacagtgacgaatgctagagtccttagtcctccaacgccactcactctgcgtaatgatggtgtgatgggagaatatgagccgaaaattgaggtccattttcctttcacggttacagctgctaaaggaacaactgttaagatggaatgctttgcacttggcaaccccgttccaacaatcacatggatgaaggttaatggttatattcctagtaaggcacgtctgcggaaatctcaggcggtgctggaaataccgaatgtacagctggatgatgcaggcatttatgagtgcagagctgaaaactcacgtggaaaaaattcctttcgtggacaattacaagtatacacctacccacactgggtagaaaaactgaatgatactcagttagacagtgggagccctctccgatgggaatgtaaggctactggaaaacccagacccacgtatcgttggctgaagaatggagtacccctctcacctcagagtagggttgagatggttaatggagtattgatgatccacaatgtgaatcaatcagatgctggaatgtatcagtgtttggctgaaaataagtatggagccatttacgctagtgctgagctgaagattctagcttcagctcccacttttgcactgaatcaactgaagaaaacaataattgttaccaaagaccaagaagttgtcatagagtgcaaaccccaaggctctccaaaaccaaccatctcttggaagaaaggagacagagcagttagagaaaacaaaagaatagctattcttccagacgggagtctacggatcctaaatgcttccaaatcagacgagggaaagtacgtttgccgaggggaaaacgtctttggttctgctgaaattatagcttcgctatctgtaaaagaacctacaaggatagaacttactcctaaaagaacagaattgacagtgggagaaagcattgtccttaattgcaaagcaattcacgatgctagtttggatgtcactttctactggactctgaaaggacagcctattgatttcgaggaagagggtggacattttgaaagcatcagggcccaagcatcctctgcagatttaatgatcaggaacatccttctgatgcatgctgggagatatggctgcagggtacagaccacagcagacagtgtgtcagatgaggcagaacttcttgttaggggacccccaggcccacctgggatagtaattgttgaggaaataaccgaaagtacggccacactgtcctggagcccagcagctgacaaccacagcccaatctcctcctacaaccttcaagctcgcagcccattttccctgggctggcaaacagtaaagacagtcccagaaatcataacaggggacatggagtcagccatggctgtggacctaaatccctgggtggaatatgaatttcgagtggtagccaccaaccctattgggacaggagatccaagcaccccatctcgaatgatccgcacaaatgaagcagttccgaagacagcacccaccaatgtaagcggaagaagtggaagaaggcatgagttagtcattgcctgggagccagtatctgaagagtttcagaatggggaaggcttcggctatattgtggctttcagacccaatggaacacgtggctggaaggaaaaaatggtgacatcctctgaagcttccaaattcatttatcgagatgaaagtgtccctcctcttactccctttgaagtgaaagttggcgtttataacaataaaggagatgggccttttagtcaaattgtggtcatctgttcagctgaaggagaacccagtgctgctcccacagatgtcaaggcgacaagtgtgtctgtgtcagagattcttgttgcatggaaacacattaaagagagtctaggaagaccacagggatttgaggttggttactggaaagacatggaacaggaagatacagcagaaacagtcaaaactagagggaatgagtctttcgtcatcctaacaggattagaaggaaatacgttatatcacttcacagtgagggcttacaatggagctggatatgggccacctagcagtgaagtgagtgcaaccaccaagaaatcccctcctagtcaagcacctagcaacctcaggtgggagcagcaaggctctcaggtttctctgggctgggaacccgtcataccattagccaacgaatctgaagttgtgggttacaaggttttttataggcaagagggtcacagcaacagccaagttattgaaacacagaaacttcaagcagtagtaccactcccagatgctggagtctatattattgaagttcgagcatatagtgaaggaggagatggaacagctagttctcaaattagggtaccatcatattcaggtggaaaaatcacaagtgcacagtcgacccttcactctctctccacatcttcgtcatcagtcaccttgctcttggcattgatgattccttcaacttcctggtgaaaactgctgacttaatttgcttttgtttgctttagcttggtaacagcggtgaatagagtgtagtgtaagtggagaaccaggatcctgagatgagcttgagctttaaaaacttgggactatacatggtgaacttacaggaggttaggggggaaatattacttatccatcaggtttctctttggtttttgtaaacggagaggacagttcttagtccagtaaaaatatgcagattgtatgtaatgaatttttgtaaacaaaggtaatttctgtcaaatgtattctttacttttttaatatgttgggattttattttatatctgatgactccgagtgtgtgccatccatttgttaagtaactggcctttagcagatctgtttcaaaaacaaatacaaaaatgagaatgaaaagtttgcttaagactaagtccagtgtttttcattttccctttggctgaatatttcaattgacaaaccagcaggacatatgaaaaatgcttcagtgatgtggtccattataagataagtacacaaaaattttcttgaaaaatattgtatgattgcatagtgaaatagcaagatttgtcaatatgctattctatatgcacccctagagcaagtcattagggtagggaataagccatttacattagtgcaagatagaaagcgagtccagatgaatttcagtgctatagtttttcataaagtactatgttatctagcagcaaatataataaatatttatttttaataacaaaagatggtttaacatcaccaaaaaatatgatcactaaaaactgcagacatgctggcatgggtgctaacttaaaaatgagatgaatatgggacagagcgtttccatttctttacctactgccaaaacagatgttgaattaggtccaaggttttcttctaattgcaaaattttgcaaaaattttaagggcaatgaaaatttgttgtgcaaataattatgcatagtctgtagattaaaatggttcaagtataacaaataagttttgatttttaaaaacagttccatgcatcacataccactgataaaatcaactagtaaaataaagacagtctttcttggataaattgaatttttaattaagctgtggaaacatggcatcagtacagggattcagctagtctagccagctatgcactgtttgattctgtggcttgggaagtaatccttatttgctatttcaaagagtcatcttgagcctgagagatcctagagagttgttggaaaatgagatgaaaattttctacttgatgatatcttaaagaagttctaacaagcacaagaatgtgccagagttggcatcatacccatgaagatgcgtgaaaggatagttattgcaaagtcatatgccagagaagagcctggagaaactatggttttataggcgatgttaacaagagaacaaaaattggttttataattttatataatttaaacttgttaactgtatttgcttcattaataacaagcaaaatgaaacaatatggagctcaaattgctagctctcaaggttaatccttgtagaatcagagaagtgattgaagtttctgttctgaacatcctgaaagaatagtttcagagccacagtaaaagtctgtatgtaggttacatattctctttggggaaatgatgtaagacaccctaaacaaacaagaaattagttaaaagactcactcaatgatattatagtaaatactacagatggtaagtatttaagcctgtaagtaagtaattatgaccaagtggcctttcttgaacgcctcctttaaagtgggagaggctggactttgcaaaaacagggatgctaattgtttagctggcaaaacatgagctctcccaagtatagtttacctttatgaattgtgcatctgaataaaagacagaaagaatatttttaatgcaaaataattttacgtatttcatgaatcaagccattttcttcattttccatggtggtgtacaccagatttagtgaaggactttaagaatcaacttcttacttacactctcagaaagcaaagcccagtaaaatattaaacaaataaaatggcaaatttaaattaaccaatatttttaattagctgatggatggtacgtatctgacagagtatttacacatatagaatgtctgatgtattcttacaggaatcagagatatggaatgtttttacttaacatacacagaatatgtattttgcatcataaacctatttaaaaaacaggttttcaatgtttatgtacttatgtgctgcatatctgttactttgtagaaaccagaagagcattcttatcaaggtacattatttttcagctacagtactgagttttttctgctatgggatagtaaccacagtcttaaatcactaaagagactgtatttttgtataatgtccattgaatatgaagaaagcaacagtccttataattagaaatttcatgaaagcaaaagttttgcatacccaaatgaaggtactgtggaccccatgtcaaactgttaaatatattgtgtacgatctgtatatatactatatataaggcatataccgtgtggaaggcacagtcaaataatagttctgtgtactgttcttgtaacattagatctttttaataaataattctctttttattgactttta

SEQ ID NO: 122095 - DNA, 3814 bp, Homo sapiens
  Payload ID: 3936
  Gene Symbol: CNTN6
  Gene Name: contactin 6
  Uniprot ID: Q9UQ52
  ENST ID: ENST00000350110
  CDS Start-End: 552-3638
aagagagattttctgatgacccgacaggagtgactatctccagtcaaagaaagaggagggtgaatttaatctttcatggccctggaatggcagctgctctcagctctctctgattctgtgaaggttgatgaagatagagctggctttcaatgtagaaagaattttccttttgaatattccaaacgagagctttgcacatgtgcctcaagaactgattgtctggctccgacaggaatgcagcaggagaggagcgtatttcatgcttaagaccagagaagagccacgcaatactcagtggataaaaggcttgcagtcccagctgggaaaaagagtcccattatctcccagctgcatagacattccatacggcttggttctgcctggacgcacagcatgcctggctgagagcttgaaacagagttctgcagaaaaactgtaaagatcccgagacatttccctggtaagatctactcttgagatactgactggaagatagactgttttgttccacctgattgtatgggagaaatttttgaccttagaaagtggaaatgaggttgctatggaaactggtaattctgctgccactcataaactcttctgcaggtgatggtcttttaagccgtcctatttttactcaggagccacatgatgtcatttttcctttggatttatcaaaatctgaggtcatcctgaattgtgctgctaatggttacccttcgcctcattataggtggaagcaaaatggcacagacattgattttactatgagttatcactacaggttggatggaggcagtcttgcaatcaatagcccccacacagatcaagatattggcatgtaccagtgcctggccaccaatcttctggggacaattctgagtcggaaggcaaagctccaatttgcatatattgaagactttgaaactaaaacaagaagcacagtatctgtccgagaaggtcaaggtgtggtgcttctctgtggcccaccgccacattttggagatttatcttatgcatggaccttcaatgataaccccttatacgtccaagaggacaataggcgatttgtatctcaagagacgggaaacttgtacattgccaaagtggaaccatcagatgtgggcaactacacttgctttataactaacaaagaggcccagagaagtgttcaaggtccacccactccattagtgcagcgcactgatggtgtgatgggggaatatgaaccaaagattgaagtgcgttttcctgaaactatacaagctgcaaaggattcatctgtaaaactggaatgttttgcccttggaaatccagtccccgatattagttggagaaggttggacgggagcccgttgccagggaaagtcaagtacagcaaatcccaagctatccttgaaatcccgaacttccaacaagaagatgaaggcttttatgagtgcattgcaagcaaccttcgaggaagaaaccttgcaaagggtcaactcattttttatgctcctccagaatgggaacagaaaatccaaaatacacacctctctatctatgacaacttgctctgggaatgtaaagctagtggaaagccaaacccttggtatacatggttaaaaaatggtgaacgactcaacccagaggagagaattcaaatagaaaatgggacactcatcataacgatgctgaatgtgtcagattctggtgtgtaccaatgtgctgcagaaaacaaatatcagataatttatgcaaatgctgaattgagagttttagcctcagctccagatttctccaaaagtccagttaaaaaaaagtcttttgttcaagttggtggggatattgttatcggatgcaaaccaaatgcttttcccagggcagctatctcttggaaaagaggaacggagacccttagacaaagcaaaagaatatttctcttggaggatggcagcctcaagatatataatattaccaggtcagatgctggatcatatacatgcatagccacaaatcagtttggcactgcaaagaacactggcagcctcattgtaaaagagagaactgtcattaccgtcccaccttccaaaatggatgttacagttggcgagagtatagtgctaccatgccaggtgtcccatgacccctccattgaagtggtatttgtatggtttttcaatggagatgtcatagacttaaaaaaaggagtggctcattttgaaaggattggaggagaatctgttggggatttgatgataaggaatattcagttacatcattcaggaaaatatctctgcacagtacaaacaaccctagaaagtttatctgcagtagccgatatcattgttagaggtccaccaggtcctcctgaggatgtgcaagtggaagacatttccagtactacttctcaactaagttggagagcaggcccagataataacagtcccattcaaatatttactattcagactcggacaccattttctgtgggttggcaggctgttgctacagttccagaaattctcaatggtaagacatacaatgcaacagtggttggtttgagtccttgggtggaatatgaatttcgtgttgttgccggcaacagcattgggattggagaaccaagtgaaccatcagaattgttaagaactaaagcatcagtccctgttgtggcaccagtaaacatccatggaggtggaggaagtcggtctgaactcgtcattacgtgggagtcaattccagaagaactgcagaatggggagggatttggatatatcatcatgttccggccagtgggctcgacaacctggtccaaggagaaagtgtcatctgtggaatcatcaaggtttgtctacagaaatgaaagcatcatcccactgtctccctttgaagtcaaagtgggtgtgtataataatgaaggagaaggatccctgagtactgtgaccattgtctactctggggaagatgaacctcaactggccccaaggggaacttctctccagagtttttctgcttctgaaatggaggtttcatggaatgctattgcctggaatagaaacactggaagagtgctgggctatgaggtcttatactggacagatgactccaaagaatccatgataggtaaaattagagtcagtggaaatgtcacaaccaaaaacatcacggggctgaaagctaataccatctactttgcttccgtaagagcttacaacactgctgggacagggccctcaagccccccagtcaatgttaccaccaaaaagtctcctccaagccaaccaccagcaaacattgcctggaagctgacaaactctaaattatgcttgaactgggagcatgtaaaaaccatggaaaatgagtctgaagttttggggtacaagattctgtaccggcaaaacagacagagtaaaactcatattttggaaacaaacaatacatcagctgagcttctggttccatttgaagaagactacttaattgaaataagaacagtcagtgatggtggagatggaagcagcagtgaggaaattaggattccaaaaatgtcaagtttgagttccagaggaattcaattcttagaacctagcacccattttctttccattgtcattgtgatttttcactgttttgctattcagccacttatctgatgaataaaaccataaatctttgagagttttttgaaagcaaatcattctgtatatatgctctccagcctctgacacaagatgcgttcttaatacagacttgtttgcaaagaaaaaaaaaagtatattattaaaatcctgtaaatatctatggtatattaataaaacaattttaaaca

SEQ ID NO: 122096 - DNA, 1433 bp, Homo sapiens
  Payload ID: 3936
  Gene Symbol: CNTN6
  Gene Name: contactin 6
  ENST ID: ENST00000394261
  CDS Start-End: 191-316
atacggcttggttctgcctggacgcacagcatgcctggctgagagcttgaaacagagttctgcagaaaaactgtaaagatcccgagacatttccctgactcttgagatactgactggaagatagactgttttgttccacctgattgtatgggagaaatttttgaccttagaaagtggaaatgaggttgctatggaaactggtaattctgctgccactcataaactcttctgcagaaaagtttatatcagtccaattctgctgctaactggacttcgtctctggcttcttcatttggaaatctacctcttatgctaagtgcccttatatcacctggcggtttgcaaagaggtgatggtcttttaagccgtcctatttttactcaggagccacatgatgtcatttttcctttggatttatcaaaatctgaggtcatcctgaattgtgctgctaatggttacccttcgcctcattataggtggaagcaaaatggcacagacattgattttactatgagttatcactacaggttggatggaggcagtcttgcaatcaatagcccccacacagatcaagatattggcatgtaccagtgcctggccaccaatcttctggggacaattctgagtcggaaggcaaagctccaatttgcatatattgaagactttgaaactaaaacaagaagcacagtatctgtccgagaaggtcaaggtgtggtgcttctctgtggcccaccgccacattttggagatttatcttatgcatggaccttcaatgataaccccttatacgtccaagaggacaataggcgatttgtatctcaagagacgggaaacttgtacattgccaaagtggaaccatcagatgtgggcaactacacttgctttataactaacaaagaggcccagagaagtgttcaaggtccacccactccattagtgcagcgcactgatggtgtgatgggggaatatgaaccaaagattgaagtgcgttttcctgaaactatacaagctgcaaaggattcatctgtaaaactggaatgttttgcccttggaaagtaaggtttttgtttttgtttttgttttcctggttgcattaatttttttttattaaaaacctttttgttattcatatattgctctaaggtaaattaccaagtagatttcaaatgctgggcaacagtggaactttctgatttgaatttaaacaaacatgtctaatactgagacaatgaccaggcctgtaactgaaaatgatcagggctgcaattcttccctacaggtgctgatatttccttagtttaagcataatgagacccatttaggcagcacattgcaagggaataagtgcactcgtataagatgatgggcaagtcactaaaccttccacatatccttcactccatcttgtcctacatccagaaatacattgcctg

SEQ ID NO: 122097 - DNA, 3519 bp, Homo sapiens
  Payload ID: 3936
  Gene Symbol: CNTN6
  Gene Name: contactin 6
  ENST ID: ENST00000397479
  CDS Start-End: 79-270
aataagagagattttctgatgacccgacaggagtgactatctccagtcaaagaaagaggagggtgaatttaatctttcatggccctggaatggcagctgctctcagctctctctgattctgtgaaggttgatgaagatagagctggctttcaatgtagaaagaattttccttttgaatattccaaacgagagctttgcacatgtgcctcaagaactgattgtctggctccgacaggaatgcagcaggagaggagcgtatttcatgcttaagaccagagaagagccacgcaatactcagtggataaaaggcttgcagtcccagctgggaaaaagagtcccattatctcccagctgcatagacattccatacggcttggttctgcctggacgcacagcatgcctggctgagagcttgaaacagagttctgcagaaaaactgtaaagatcccgagacatttccctggtgatggtcttttaagccgtcctatttttactcaggagccacatgatgtcatttttcctttggatttatcaaaatctgaggtcatcctgaattgtgctgctaatggttacccttcgcctcattataggtggaagcaaaatggcacagacattgattttactatgagttatcactacaggttggatggaggcagtcttgcaatcaatagcccccacacagatcaagatattggcatgtaccagtgcctggccaccaatcttctggggacaattctgagtcggaaggcaaagctccaatttgcatatattgaagactttgaaactaaaacaagaagcacagtatctgtccgagaaggtcaaggtgtggtgcttctctgtggcccaccgccacattttggagatttatcttatgcatggaccttcaatgataaccccttatacgtccaagaggacaataggcgatttgtatctcaagagacgggaaacttgtacattgccaaagtggaaccatcagatgtgggcaactacacttgctttataactaacaaagaggcccagagaagtgttcaaggtccacccactccattagtgcagcgcactgatggtgtgatgggggaatatgaaccaaagattgaagtgcgttttcctgaaactatacaagctgcaaaggattcatctgtaaaactggaatgttttgcccttggaaatccagtccccgatattagttggagaaggttggacgggagcccgttgccagggaaagtcaagtacagcaaatcccaagctatccttgaaatcccgaacttccaacaagaagatgaaggcttttatgagtgcattgcaagcaaccttcgaggaagaaaccttgcaaagggtcaactcattttttatgctcctccagaatgggaacagaaaatccaaaatacacacctctctatctatgacaacttgctctgggaatgtaaagctagtggaaagccaaacccttggtatacatggttaaaaaatggtgaacgactcaacccagaggagagaattcaaatagaaaatgggacactcatcataacgatgctgaatgtgtcagattctggtgtgtaccaatgtgctgcagaaaacaaatatcagataatttatgcaaatgctgaattgagagttttagcctcagctccagatttctccaaaagtccagttaaaaaaaagtcttttgttcaagttggtggggatattgttatcggatgcaaaccaaatgcttttcccagggcagctatctcttggaaaagaggaacggagacccttagacaaagcaaaagaatatttctcttggaggatggcagcctcaagatatataatattaccaggtcagatgctggatcatatacatgcatagccacaaatcagtttggcactgcaaagaacactggcagcctcattgtaaaagagagaactgtcattaccgtcccaccttccaaaatggatgttacagttggcgagagtatagtgctaccatgccaggtgtcccatgacccctccattgaagtggtatttgtatggtttttcaatggagatgtcatagacttaaaaaaaggagtggctcattttgaaaggattggaggagaatctgttggggatttgatgataaggaatattcagttacatcattcaggaaaatatctctgcacagtacaaacaaccctagaaagtttatctgcagtagccgatatcattgttagaggtccaccaggtcctcctgaggatgtgcaagtggaagacatttccagtactacttctcaactaagttggagagcaggcccagataataacagtcccattcaaatatttactattcagactcggacaccattttctgtgggttggcaggctgttgctacagttccagaaattctcaatggtaagacatacaatgcaacagtggttggtttgagtccttgggtggaatatgaatttcgtgttgttgccggcaacagcattgggattggagaaccaagtgaaccatcagaattgttaagaactaaagcatcagtccctgttgtggcaccagtaaacatccatggaggtggaggaagtcggtctgaactcgtcattacgtgggagtcaattccagaagaactgcagaatggggagggatttggatatatcatcatgttccggccagtgggctcgacaacctggtccaaggagaaagtgtcatctgtggaatcatcaaggtttgtctacagaaatgaaagcatcatcccactgtctccctttgaagtcaaagtgggtgtgtataataatgaaggagaaggatccctgagtactgtgaccattgtctactctggggaagatgaacctcaactggccccaaggggaacttctctccagagtttttctgcttctgaaatggaggtttcatggaatgctattgcctggaatagaaacactggaagagtgctgggctatgaggtcttatactggacagatgactccaaagaatccatgataggtaaaattagagtcagtggaaatgtcacaaccaaaaacatcacggggctgaaagctaataccatctactttgcttccgtaagagcttacaacactgctgggacagggccctcaagccccccagtcaatgttaccaccaaaaagtctcctccaagccaaccaccagcaaacattgcctggaagctgacaaactctaaattatgcttgaactgggagcatgtaaaaaccatggaaaatgagtctgaagttttggggtacaagattctgtaccggcaaaacagacagagtaaaactcatattttggaaacaaacaatacatcagctgagcttctggttccatttgaagaagactacttaattgaaataagaacagtcagtgatggtggagatggaagcagcagtgaggaaattaggattccaaaaatgtcaagtttgagttccagaggaattcaattcttagaacctagcacccattttctttccattgtcattgtgatttttcactgttttgctattcagccacttatctgatgaataaaaccataaatctttgag

SEQ ID NO: 122098 - DNA, 4513 bp, Homo sapiens
  Payload ID: 3936
  Gene Symbol: CNTN6
  Gene Name: contactin 6
  Uniprot ID: Q9UQ52
  ENST ID: ENST00000446702
  CDS Start-End: 628-3714
aatgcagtgaaaccagaggaagaaaaaaattacttcctttcctgttggaaacctaataagtagttagtctgacccagttttcaataagagagattttctgatgacccgacaggagtgactatctccagtcaaagaaagaggagggtgaatttaatctttcatggccctggaatggcagctgctctcagctctctctgattctgtgaaggttgatgaagatagagctggctttcaatgtagaaagaattttccttttgaatattccaaacgagagctttgcacatgtgcctcaagaactgattgtctggctccgacaggaatgcagcaggagaggagcgtatttcatgcttaagaccagagaagagccacgcaatactcagtggataaaaggcttgcagtcccagctgggaaaaagagtcccattatctcccagctgcatagacattccatacggcttggttctgcctggacgcacagcatgcctggctgagagcttgaaacagagttctgcagaaaaactgtaaagatcccgagacatttccctgactcttgagatactgactggaagatagactgttttgttccacctgattgtatgggagaaatttttgaccttagaaagtggaaatgaggttgctatggaaactggtaattctgctgccactcataaactcttctgcaggtgatggtcttttaagccgtcctatttttactcaggagccacatgatgtcatttttcctttggatttatcaaaatctgaggtcatcctgaattgtgctgctaatggttacccttcgcctcattataggtggaagcaaaatggcacagacattgattttactatgagttatcactacaggttggatggaggcagtcttgcaatcaatagcccccacacagatcaagatattggcatgtaccagtgcctggccaccaatcttctggggacaattctgagtcggaaggcaaagctccaatttgcatatattgaagactttgaaactaaaacaagaagcacagtatctgtccgagaaggtcaaggtgtggtgcttctctgtggcccaccgccacattttggagatttatcttatgcatggaccttcaatgataaccccttatacgtccaagaggacaataggcgatttgtatctcaagagacgggaaacttgtacattgccaaagtggaaccatcagatgtgggcaactacacttgctttataactaacaaagaggcccagagaagtgttcaaggtccacccactccattagtgcagcgcactgatggtgtgatgggggaatatgaaccaaagattgaagtgcgttttcctgaaactatacaagctgcaaaggattcatctgtaaaactggaatgttttgcccttggaaatccagtccccgatattagttggagaaggttggacgggagcccgttgccagggaaagtcaagtacagcaaatcccaagctatccttgaaatcccgaacttccaacaagaagatgaaggcttttatgagtgcattgcaagcaaccttcgaggaagaaaccttgcaaagggtcaactcattttttatgctcctccagaatgggaacagaaaatccaaaatacacacctctctatctatgacaacttgctctgggaatgtaaagctagtggaaagccaaacccttggtatacatggttaaaaaatggtgaacgactcaacccagaggagagaattcaaatagaaaatgggacactcatcataacgatgctgaatgtgtcagattctggtgtgtaccaatgtgctgcagaaaacaaatatcagataatttatgcaaatgctgaattgagagttttagcctcagctccagatttctccaaaagtccagttaaaaaaaagtcttttgttcaagttggtggggatattgttatcggatgcaaaccaaatgcttttcccagggcagctatctcttggaaaagaggaacggagacccttagacaaagcaaaagaatatttctcttggaggatggcagcctcaagatatataatattaccaggtcagatgctggatcatatacatgcatagccacaaatcagtttggcactgcaaagaacactggcagcctcattgtaaaagagagaactgtcattaccgtcccaccttccaaaatggatgttacagttggcgagagtatagtgctaccatgccaggtgtcccatgacccctccattgaagtggtatttgtatggtttttcaatggagatgtcatagacttaaaaaaaggagtggctcattttgaaaggattggaggagaatctgttggggatttgatgataaggaatattcagttacatcattcaggaaaatatctctgcacagtacaaacaaccctagaaagtttatctgcagtagccgatatcattgttagaggtccaccaggtcctcctgaggatgtgcaagtggaagacatttccagtactacttctcaactaagttggagagcaggcccagataataacagtcccattcaaatatttactattcagactcggacaccattttctgtgggttggcaggctgttgctacagttccagaaattctcaatggtaagacatacaatgcaacagtggttggtttgagtccttgggtggaatatgaatttcgtgttgttgccggcaacagcattgggattggagaaccaagtgaaccatcagaattgttaagaactaaagcatcagtccctgttgtggcaccagtaaacatccatggaggtggaggaagtcggtctgaactcgtcattacgtgggagtcaattccagaagaactgcagaatggggagggatttggatatatcatcatgttccggccagtgggctcgacaacctggtccaaggagaaagtgtcatctgtggaatcatcaaggtttgtctacagaaatgaaagcatcatcccactgtctccctttgaagtcaaagtgggtgtgtataataatgaaggagaaggatccctgagtactgtgaccattgtctactctggggaagatgaacctcaactggccccaaggggaacttctctccagagtttttctgcttctgaaatggaggtttcatggaatgctattgcctggaatagaaacactggaagagtgctgggctatgaggtcttatactggacagatgactccaaagaatccatgataggtaaaattagagtcagtggaaatgtcacaaccaaaaacatcacggggctgaaagctaataccatctactttgcttccgtaagagcttacaacactgctgggacagggccctcaagccccccagtcaatgttaccaccaaaaagtctcctccaagccaaccaccagcaaacattgcctggaagctgacaaactctaaattatgcttgaactgggagcatgtaaaaaccatggaaaatgagtctgaagttttggggtacaagattctgtaccggcaaaacagacagagtaaaactcatattttggaaacaaacaatacatcagctgagcttctggttccatttgaagaagactacttaattgaaataagaacagtcagtgatggtggagatggaagcagcagtgaggaaattaggattccaaaaatgtcaagtttgagttccagaggaattcaattcttagaacctagcacccattttctttccattgtcattgtgatttttcactgttttgctattcagccacttatctgatgaataaaaccataaatctttgagagttttttgaaagcaaatcattctgtatatatgctctccagcctctgacacaagatgcgttcttaatacagacttgtttgcaaagaaaaaaaaaagtatattattaaaatcctgtaaatatctatggtatattaataaaacaattttaaacacttttgaattttaaaatccgcacatgattacatgaattcctaggtgccacattaacctggggagttgtaactgctgtgtcttttaagttacttatatggagaaaataaataactcccctcaatgatgctgatgatgaatacaaacttggctcctagttaccataactcacatgtacatttttatgtattccagacaatcacttcagtatttaaaatttccaccctacttcaaaataaaatacaattatttgtttatagttgggattctttaaaaatacaaactattccaaagcatggggtgcttttatctctgaatcaagttggaataagaaatctttttactcaagaatatttcaatatacatgatgttcttctcagcccacttttcagaagattcagtcacaataaaggcagaaaaagtattttatggcaaagaaaaataaatgatgggaaatgagcacccacctaaaataatcttctaacaactctggtatatattaagcaattgctcatggcaaagttgaacatttgaactgctgcatgaacaaatctcaggtaattatgacaagttgattgcaatgtatgtggccttatttttataataaaacaatgtggaaacagaa

SEQ ID NO: 122099 - DNA, 551 bp, Homo sapiens
  Payload ID: 3936
  Gene Symbol: CNTN6
  Gene Name: contactin 6
  ENST ID: ENST00000413210
  CDS Start-End: 15-206
gaatttaatctttcatggccctggaatggcagctgctctcagctctctctgattctgtgaaggttgatgaagatagagctggctttcaatgtagaaagaattttccttttgaatattccaaacgagagctttgcacatgtgcctcaagaactgattgtctggctccgacaggaatgcagcaggagaggagcgtatttcatgcttaagaccagagaagagccacgcaatactcagtggataaaaggcttgcagtcccagctgggaaaaagagtcccattatctcccagctgcatagacattccatacggcttggttctgcctggacgcacagcatgcctggctgagagcttgaaacagagttctgcagaaaaactgtaaagatcccgagacatttccctgaatgcctactctgaggccttaattctcacatctgatgataccctgaggatgacatgtgaggccaagagggagtgaagcctcatccccactttgtgcttctttattaaccagactcttgagatactgactggaagatagactgttttgttcca

SEQ ID NO: 122100 - DNA, 5276 bp, Homo sapiens
  Payload ID: 3937
  Gene Symbol: CNTNAP1
  Gene Name: contactin associated protein 1
  Uniprot ID: P78357
  ENST ID: ENST00000264638
  CDS Start-End: 218-4372
gaagagcggaggaccaggaaccagagagagagagagagaaaagagagaggagagacagagcgcttgggggcgaaaggagagagggagggaagggtgggtaaggaggagagagcggtctgctgcaaaccccaggaggagagcttggagcccaagccagaactcgagccctagccggagccgttcacagggaggcggctgccgggaccgtcagccctgcatgatgcatctccggctcttctgcatcctgctcgccgcggtctcaggagccgagggctggggctactacggctgcgacgaggagctggtgggtcccctgtatgcacgctccctgggcgcctcctcctactacagtctccttactgcgccgagattcgccaggctgcacggcataagcgggtggtcaccacggattggggatccgaatccctggctccagatagacttaatgaagaagcaccggatccgggccgtggccacacagggctcctttaattcttgggactgggtcacacgttacatgctactctacggcgaccgagtggacagctggacaccgttctaccagcgagggcacaactcgaccttctttggtaacgtgaacgagtcggcggtggtgcgccatgacctgcacttccacttcactgcgcgctacatccgcatcgtgcccctggcctggaacccacgcggcaagatcggcctgaggctcggcctctatggctgcccatacaaggccgacatactctatttcgacggcgacgatgccatctcctaccgcttcccgcgaggggtcagccgaagcctgtgggacgtgttcgccttcagcttcaagaccgaggagaaggacggtcttctgctgcacgccgagggcgcccagggcgactacgtgacgctcgagctggagggggcacacctgctgctgcacatgagcctgggcagcagccctatccagccaagaccaggtcacaccaccgtgagcgcaggcggagtcctcaatgaccagcactggcactatgtgcgggtggaccgatttggccgcgatgtaaatttcaccctggacggctatgtgcagcgctttattctcaatggagacttcgagaggctgaacctggacactgagatgttcatcggaggtctggtgggcgccgcgcggaagaacctggcctatcggcataacttccgcggctgcatagaaaacgtaatcttcaaccgcgtcaacatcgcagacctggccgtgcggcgccattcccggatcaccttcgagggtaaggtggcttttcgttgcctggacccggtaccgcaccctatcaacttcggaggccctcacaacttcgttcaagtgcccggtttcccacgccgtggccgcctggcagtctcatttcgcttccgcacctgggacctcaccgggcttctccttttctcccgtctgggggacgggctgggccacgtggagctgacgctcagcgaagggcaggtcaacgtgtccatcgcgcagagcggccgaaagaagcttcagttcgctgctgggtaccgactgaatgacggcttttggcacgaggtgaattttgtggcacaggaaaaccatgcagttatcagcattgatgatgtggaaggggcagaggtcagggtctcatacccgttgctgatccggacagggacctcatatttctttgggggttgtcccaagccagccagtcgatgggactgccactccaaccagacggcattccatggctgcatggagctgctcaaggtggatggtcaactggtcaacctgactctggtggagggccggcggcttggattctatgctgaggtcctctttgatacatgtggcatcactgataggtgcagccctaacatgtgtgagcatgatggacgctgctaccagtcttgggatgacttcatttgctactgcgaactgacgggctacaagggagagacctgccacacacctttgtataaggaatcctgtgaggcttatcggctcagtgggaaaacttctggaaacttcaccattgatcctgatggcagtggccccctgaagccatttgtagtgtactgtgatatccgagagaaccgagcgtggacagttgtgcggcatgacaggctgtggacaactcgagtgacaggttccagcatggagcggccattcctgggggctatccagtactggaatgcatcctgggaggaagtcagtgcccttgccaatgcttcccagcattgtgaacagtggatcgagttctcctgctacaattcccggctgctcaacactgcaggaggctacccctacagcttttggattggccgaaatgaggagcagcacttctactggggaggctcccagcctgggatccagcgctgtgcctgtggtctggaccggagctgtgtggaccctgccttgtactgcaactgtgacgctgaccagccccagtggagaactgacaagggactgctgacctttgtggaccatctgcctgtcactcaggtagtgataggggatacgaaccgctccacttctgaggcccagttcttcctgaggcctctgcgctgctatggcgatcgaaattcctggaacaccatttccttccacaccggggctgcactacgcttccccccaatccgtgccaaccacagcctggatgtctccttctacttcaggacctctgctccctcgggggtcttcctagagaatatggggggcccttactgccagtggcgccgaccttatgtgcgggtggaactcaacacatcccgggatgtggtcttcgcctttgatgtggggaatggggatgagaacctcacagtacactcagacgactttgagttcaatgatgacgagtggcacctggtccgggctgaaatcaacgtgaagcaggcccggctccgagtggatcaccggccctgggttctgcggcctatgccactgcagacctacatctggatggagtatgaccagcccctctatgtgggatctgcagagcttaagagacgcccctttgtgggttgcttgagggccatgcgtctgaacggagtgactctgaacctggagggccgtgccaatgcctctgagggtacctcacccaactgcacaggccactgtgcccaccctcggctcccctgtttccatggaggccgctgcgtggagcgctatagctactacacgtgtgactgtgacctcacggcttttgatgggccatactgcaaccacgatattggtggtttctttgagccgggcacctggatgcgctataacctacagtcagcgctgcgctctgcagccagggagttctcccacatgctgagccggccagtgccaggctatgagcctggctacatcccgggctatgatactccgggctatgtgcctggctaccatggccccgggtaccgcctgcccgactacccccggcctggtcggcctgtgcccggttaccgtgggcctgtctacaacgttacgggagaggaggtctccttcagcttcagcaccagctccgcccctgctgtcctgctctacgtcagttcctttgttcgtgactacatggctgtgctcatcaaggatgatgggacccttcagctgcgatatcagctgggcaccagtccctacgtgtaccagctaaccactcgaccagtgaccgatggccagccccatagcatcaatatcacccgtgtttaccggaacctcttcatccaggtggactacttcccactgacagagcagaagttctcgctgttggtggacagccagttggactcacccaaggccttgtatttagggcgtgtgatggagacaggagtcattgacccggagatccagcgctacaacaccccaggtttctcaggctgcctgtctggtgttcgattcaacaacgtggctcccctcaagacccacttccgaacccctcgacccatgactgctgagctagctgaggcccttcgagttcagggagaactgtccgaatctaattgcggagctatgccacgtcttgtttcagaggtgccacctgagcttgatccctggtatctgcccccagacttcccctactaccatgatgaaggatgggttgccatacttttaggctttttggtggcctttctgctgctggggctggtgggaatgttggtgctcttctatctgcaaaatcatcgctataagggctcctaccataccaatgagcccaaggctgcccacgagtaccatcctggcagcaaacctcccctacccacttcaggccctgcccaggtccccacccctacagcagctcccaaccaagctccagcctcagccccagccccagccccaactccagccccagcccctggcccccgggatcagaacctaccccagatcctggaggagtccaggtctgaatgagtcagaagggcttctgggaccaattccagctcctgacattcccccagtcctgcctctcccccatcctatcagggacatttggctcctcttagctggctctgctcatccagaggatattcccccatcccccccccatcaagtttggtgggcagagctacagatgggacccaagggagtggccgagcctcactgcctaaaccaatgcccttctcatccctgtttccccaggctcctggctgtttatctgccccaaaggagaagcctcatggggttgacataggtcctttctgccatctctgttccagctgctgtcagggattaacaacagagtgtaggggagattaactgcctcccttccaatagacactatcagcagggacagatgtgtgggagtgcagggctgcagagggtatggggggaggaggctgctaaaccctatcccccagcctcccccctgccctgaagatcttccatttgcttccactcagctggaggctcaagagggcttgatggctgtcccctgcccccctccttttgttttgtacacagagaccaagaggcctcagtttagcaccttagtacctccgctgcttcacttgctttagccaaagccataaaaaacctgcaacgtagagaaaataatgcagataccctgactagccagccctctactcctccaaccttttccaagatatgcaatggcctttgtgcctgcccaaaggcttcgccccctccagtgcatgaggaaccctctttcctccgctcagagatgctgcttcatttacccaggaggtcatattctttatatatattttttgttgcaaagtgtctctctagagaaactctatatattattcgaatttttaaattatttgtttatatataaaagaaaagctcaattggc

SEQ ID NO: 122101 - DNA, 4499 bp, Homo sapiens
  Payload ID: 3937
  Gene Symbol: CNTNAP1
  Gene Name: contactin associated protein 1
  ENST ID: ENST00000591662
  CDS Start-End: 132-2354
gggaagggtgggtaaggaggagagagcggtctgctgcaaaccccaggaggagagcttggagcccaagccagaactcgagccctagccggagccgttcacagggaggcggctgccgggaccgtcagccctgcatgatgcatctccggctcttctgcatcctgctcgccgcggtctcaggagccgagggctggggctactacggctgcgacgaggagctggtgggtcccctgtatgcacgctccctgggcgcctcctcctactacagtctccttactgcgccgagattcgccaggctgcacggcataagcgggtggtcaccacggattggggatccgaatccctggctccagatagacttaatgaagaagcaccggatccgggccgtggccacacagggctcctttaattcttgggactgggtcacacgttacatgctactctacggcgaccgagtggacagctggacaccgttctaccagcgagggcacaactcgaccttctttggtaacgtgaacgagtcggcggtggtgcgccatgacctgcacttccacttcactgcgcgctacatccgcatcgtgcccctggcctggaacccacgcggcaagatcggcctgaggctcggcctctatggctgcccatacaaggccgacatactctatttcgacggcgacgatgccatctcctaccgcttcccgcgaggggtcagccgaagcctgtgggacgtgttcgccttcagcttcaagaccgaggagaaggacggtcttctgctgcacgccgagggcgcccagggcgactacgtgacgctcgagctggagggggcacacctgctgctgcacatgagcctgggcagcagccctatccagccaagaccaggtcacaccaccgtgagcgcaggcggagtcctcaatgaccagcactggcactatgtgcgggtggaccgatttggccgcgatgtaaatttcaccctggacggctatgtgcagcgctttattctcaatggagacttcgagaggctgaacctggacactgagatgttcatcggaggtctggtgggcgccgcgcggaagaacctggcctatcggcataacttccgcggctgcatagaaaacgtaatcttcaaccgcgtcaacatcgcagacctggccgtgcggcgccattcccggatcaccttcgagggtaaggtggcttttcgttgcctggacccggtaccgcaccctatcaacttcggaggccctcacaacttcgttcaagtgcccggtttcccacgccgtggccgcctggcagtctcatttcgcttccgcacctgggacctcaccgggcttctccttttctcccgtctgggggacgggctgggccacgtggagctgacgctcagcgaagggcaggtcaacgtgtccatcgcgcagagcggccgaaagaagcttcagttcgctgctgggtaccgactgaatgacggcttttggcacgaggtgaattttgtggcacaggaaaaccatgcagttatcagcattgatgatgtggaaggggcagaggtcagggtctcatacccgttgctgatccggacagggacctcatatttctttgggggttgtcccaagccagccagtcgatgggactgccactccaaccagacggcattccatggctgcatggagctgctcaaggtggatggtcaactggtcaacctgactctggtggagggccggcggcttggattctatgctgaggtcctctttgatacatgtggcatcactgataggtgcagccctaacatgtgtgagcatgatggacgctgctaccagtcttgggatgacttcatttgctactgcgaactgacgggctacaagggagagacctgccacacacctttgtataaggaatcctgtgaggcttatcggctcagtgggaaaacttctggaaacttcaccattgatcctgatggcagtggccccctgaagccatttgtagtgtactgtgatatccgagagaaccgagcgtggacagttgtgcggcatgacaggctgtggacaactcgagtgacaggttccagcatggagcggccattcctgggggctatccagtactggaatgcatcctgggaggaagtcagtgcccttgccaatgcttcccagcattgtgaacagtggatcgagttctcctgctacaattcccggctgctcaacactgcagcttttggattggccgaaatgaggagcagcacttctactggggaggctcccagcctgggatccagcgctgtgcctgtggtctggaccggagctgtgtggaccctgccttgtactgcaactgtgacgctgaccagccccagtggagaactgacaagggactgctgacctttgtggaccatctgcctgtcactcaggtagtgataggggatacgaaccgctccacttctgaggcccagttcttcctgaggcctctgcgctgctatggcgatcgaaattcctggaacaccatttccttccacaccggggctgcactacgcttccccccaatccgtgccaaccacagcctggatgtctccttctacttcaggacctctgctccctcgggggtcttcctagagaatatggggggcccttactgccagtggcgccgaccttatgtgcgggtggaactcaacacatcccgggatgtggtcttcgcctttgatgtggggaatggggatgagaacctcacagtacactcagacgactttgagttcaatgatgacgagtggcacctggtccgggctgaaatcaacgtgaagcaggcccggctccgagtggatcaccggccctgggttctgcggcctatgccactgcagacctacatctggatggagtatgaccagcccctctatgtgggatctgcagagcttaagagacgcccctttgtgggttgcttgagggccatgcgtctgaacggagtgactctgaacctggagggccgtgccaatgcctctgagggtacctcacccaactgcacaggccactgtgcccaccctcggctcccctgtttccatggaggccgctgcgtggagcgctatagctactacacgtgtgactgtgacctcacggcttttgatgggccatactgcaaccacgatattggtggtttctttgagccgggcacctggatgcgctataacctacagtcagcgctgcgctctgcagccagggagttctcccacatgctgagccggccagtgccaggctatgagcctggctacatcccgggctatgatactccgggctatgtgcctggctaccatggccccgggtaccgcctgcccgactacccccggcctggtcggcctgtgcccggttaccgtgggcctgtctacaacgttacgggagaggaggtctccttcagcttcagcaccagctccgcccctgctgtcctgctctacgtcagttcctttgttcgtgactacatggctgtgctcatcaaggatgatgggacccttcagctgcgatatcagctgggcaccagtccctacgtgtaccagctaaccactcgaccagtgaccgatggccagccccatagcatcaatatcacccgtgtttaccggaacctcttcatccaggtggactacttcccactgacagagcagaagttctcgctgttggtggacagccagttggactcacccaaggccttgtatttagggcgtgtgatggagacaggagtcattgacccggagatccagcgctacaacaccccaggtttctcaggctgcctgtctggtgttcgattcaacaacgtggctcccctcaagacccacttccgaacccctcgacccatgactgctgagctagctgaggcccttcgagttcagggagaactgtccgaatctaattgcggagctatgccacgtcttgtttcagaggtgccacctgagcttgatccctggtatctgcccccagacttcccctactaccatgatgaaggatgggttgccatacttttaggctttttggtggcctttctgctgctggggctggtgggaatgttggtgctcttctatctgcaaaatcatcgctataagggctcctaccataccaatgagcccaaggctgcccacgagtaccatcctggcagcaaacctcccctacccacttcaggccctgcccaggtccccacccctacagcagctcccaaccaagctccagcctcagccccagccccagccccaactccagccccagcccctggcccccgggatcagaacctaccccagatcctggaggagtccaggtctgaatgagtcagaagggcttctgggaccaattccagctcctgacattcccccagtcctgcctctcccccatcctatcagggacatttggctcctcttagctggctctgctcatccagaggatattcccccatcccccccccatcaagtttggtgggcagagctacagatgggacccaagggagtggccgagcctcactgcctaaaccaatgcccttctcatccctgtttccccagg

SEQ ID NO: 122102 - DNA, 9896 bp, Homo sapiens
  Payload ID: 3938
  Gene Symbol: CNTNAP2
  Gene Name: contactin associated protein-like 2
  Uniprot ID: Q9UHC6
  ENST ID: ENST00000361727
  CDS Start-End: 519-4514
acacaagctctccatgtgagctgacaggcgagtggaaacccctcgagtcacgctgcccggcggcggagggagcgctcgcccgcagtggcaacagctgcaccaccgtccccgtcgctctgccttcctcttctgcagcctctgctcttctgattacctccctcccccgtcctttggtgatttttttttttcaagaaggagagggcggggtaggtgtccgttccctcccctcttccccctcctttgccttcttggtttgaatttcctcccccggcgttgcactggcacacagtgcaagaggcaatacccgcacggagggagaacgaaggctgagactcccctgccgctccaagcccggaagaactggagcctggaggggggtgaggggagaagaggaagcgggaggggcttggcttcctcgcgtatttgaggacagcccatctcccttcaagaaccctacggagagtcggactgcatctccgcagcgagctcttggagcgccgccggccgggaggcgaaggatgcaggcggctccgcgcgccggctgcggggcagcgctcctgctgtggattgtcagcagctgcctctgcagagcctggacggctccctccacgtcccaaaaatgtgatgagccacttgtctctggactcccccatgtggctttcagcagctcctcctccatctctggtagctattctcccggctatgccaagataaacaagagaggaggtgctgggggatggtctccatcagacagcgaccattatcaatggcttcaggttgactttggcaatcggaagcagatcagtgccattgcaacccaaggaaggtatagcagctcagattgggtgacccaataccggatgctctacagcgacacagggagaaactggaaaccctatcatcaagatgggaatatctgggcatttcccggaaacattaactctgacggtgtggtccggcacgaattacagcatccgattattgcccgctatgtgcgcatagtgcctctggattggaatggagaaggtcgcattggactcagaattgaagtttatggctgttcttactgggctgatgttatcaactttgatggccatgttgtattaccatatagattcagaaacaagaagatgaaaacactgaaagatgtcattgccttgaactttaagacgtctgaaagtgaaggagtaatcctgcacggagaaggacagcaaggagattacattaccttggaactgaaaaaagccaagctggtcctcagtttaaacttaggaagcaaccagcttggccccatatatggccacacatcagtgatgacaggaagtttgctggatgaccaccactggcactctgtggtcattgagcgccaggggcggagcattaacctcactctggacaggagcatgcagcacttccgtaccaatggagagtttgactacctggacttggactatgagataacctttggaggcatccctttctctggcaagcccagctccagcagtagaaagaatttcaaaggctgcatggaaagcatcaactacaatggcgtcaacattactgatcttgccagaaggaagaaattagagccctcaaatgtgggaaatttgagcttttcttgtgtggaaccctatacggtgcctgtctttttcaacgctacaagttacctggaggtgcccggacggcttaaccaggacctgttctcagtcagtttccagtttaggacatggaaccccaatggtctcctggtcttcagtcactttgcggataatttgggcaatgtggagattgacctcactgaaagcaaagtgggtgttcacatcaacatcacacagaccaagatgagccaaatcgatatttcctcaggttctgggttgaatgatggacagtggcacgaggttcgcttcctagccaaggaaaattttgctattctcaccatcgatggagatgaagcatcagcagttcgaactaatagtccccttcaagttaaaactggcgagaagtacttttttggaggttttctgaaccagatgaataactcaagtcactctgtccttcagccttcattccaaggatgcatgcagctcattcaagtggacgatcaacttgtaaatttatacgaagtggcacaaaggaagccgggaagtttcgcgaatgtcagcattgacatgtgtgcgatcatagacagatgtgtgcccaatcactgtgagcatggtggaaagtgctcgcaaacatgggacagcttcaaatgcacttgtgatgagacaggatacagtggggccacctgccacaactctatctacgagccttcctgtgaagcctacaaacacctaggacagacatcaaattattactggatagatcctgatggcagcggacctctggggcctctgaaagtttactgcaacatgacagaggacaaagtgtggaccatagtgtctcatgacttgcagatgcagacgcctgtggtcggctacaacccagaaaaatactcagtgacacagctcgtttacagcgcctccatggaccagataagtgccatcactgacagtgccgagtactgcgagcagtatgtctcctatttctgcaagatgtcaagattgttgaacaccccagatggaagcccttacacttggtgggttggcaaagccaacgagaagcactactactggggaggctctgggcctggaatccagaaatgtgcctgcggcatcgaacgcaactgcacagatcccaagtactactgtaactgcgacgcggactacaagcaatggaggaaggatgctggtttcttatcatacaaagatcacctgccagtgagccaagtggtggttggagatactgaccgtcaaggctcagaagccaaattgagcgtaggtcctctgcgctgccaaggagacaggaattattggaatgccgcctctttcccaaacccatcctcctacctgcacttctctactttccaaggggaaactagcgctgacatttctttctacttcaaaacattaaccccctggggagtgtttcttgaaaatatgggaaaggaagatttcatcaagctggagctgaagtctgccacagaagtgtccttttcatttgatgtgggaaatgggccagtagagattgtagtgaggtcaccaacccctctcaacgatgaccagtggcaccgggtcactgcagagaggaatgtcaagcaggccagcctacaggtggaccggctaccgcagcagatccgcaaggccccaacagaaggccacacccgcctggagctctacagccagttatttgtgggtggtgctgggggccagcagggcttcctgggctgcatccgctccttgaggatgaatggggtgacacttgacctggaggaaagagcaaaggtcacatctgggttcatatccggatgctcgggccattgcaccagctatggaacaaactgtgaaaatggaggcaaatgcctagagagataccacggttactcctgcgattgctctaatactgcatatgatggaacattttgcaacaaagatgttggtgcattttttgaagaagggatgtggctacgatataactttcaggcaccagcaacaaatgccagagactccagcagcagagtagacaacgctcccgaccagcagaactcccacccggacctggcacaggaggagatccgcttcagcttcagcaccaccaaggcgccctgcattctcctctacatcagctccttcaccacagacttcttggcagtcctcgtcaaacccactggaagcttacagattcgatacaacctgggtggcacccgagagccatacaatattgacgtagaccacaggaacatggccaatggacagccccacagtgtcaacatcacccgccacgagaagaccatctttctcaagctcgatcattatccttctgtgagttaccatctgccaagttcatccgacaccctcttcaattctcccaagtcgctctttctgggaaaagttatagaaacagggaaaattgaccaagagattcacaaatacaacaccccaggattcactggttgcctctccagagtccagttcaaccagatcgcccctctcaaggccgccttgaggcagacaaacgcctcggctcacgtccacatccagggcgagctggtggagtccaactgcggggcctcgccgctgaccctctcccccatgtcgtccgccaccgacccctggcacctggatcacctggattcagccagtgcggattttccatataatccaggacaaggccaagctataagaaatggagtcaacagaaactcggctatcattggaggcgtcattgctgtggtgattttcaccatcctgtgcaccctggtcttcctgatccggtacatgttccgccacaagggcacctaccataccaacgaagcaaagggggcggagtcggcagagagcgcggacgccgccatcatgaacaacgaccccaacttcacagagaccattgatgaaagcaaaaaggaatggctcatttgaggggtggctacttggctatgggatagggaggagggaattactagggaggagagaaagggacaaaagcaccctgcttcatactcttgagcacatccttaaaatatcagcacaagttgggggaggcaggcaatggaatataatggaatattcttgagactgatcacaaaaaaaaaaacctttttaatatttctttatagctgagttttcccttctgtatcaaaacaaaataatacaaaaaatgcttttagagtttaagcaatggttgaaatttgtaggtactatctgtcttattttgtgtgtgtttagaggtgttctaaagacccgtggtaacagggcaagttttctacgtttttaagagcccttagaacgtgggtattttttttcttgagaaaagctaatgcacctacagatggcccccaacattctcttccttttgcttctagtcaaccttaatgggctgttacagaaactagttcgtgtttatatactatttcctttgatgtcctataagtcggaaaagaaaggggcaaagagaacctattatttgccagtttttaagcagagctcaatctatgccagctctctggcatctggggttcctgactgataccagcagttgaaggaagagagtgcatggcacctggtgtgtaacgacacaatcagcacaactggagagaggcattaaagaaccagggaaggtagtttgatttttcattgaattctacaagctaatattgttccacgtatgtagtcttagaccaatagctgtaactatcagctgcaataccatggtgaccagctgttacaaaagattttttcctgttttatctgaaacatactggatttatatatgtataagcgcctcaatggggaattagagccagatgttatgatttgtttgctctttttcttttatagtttagttatagcaaaaatatggataatttctagtgaatgcataaattaggttgcgtttcttattttgctttaaatctctggtagtttttccacccctgtgacacaatcctaatagacagtgtcctgtaaatggacacaacacaataaagtcaagttattattgctgttactctggatgatatggaaaacactgccatattttaaatcaactactccacgtgtttttccatccaatcacactgctgtgattcagggatctttcttctaagacggacacatttgaacctcaggttcatcacaaacctggtacctgttgcttcccagaggatggagaagtgtagttaatcacacctcttagtttaatctgaaatcttgacccagttatttaacaaataaatacctcattgattatatttaaaagtaatacacttcctgtaaacaaatggggacaatgcatccaaaaaatctttttaaacagattacacaaaaattatttccagaaaggctaccatttatcatcattatatttcaagcctcttatacttaataagcactttctaaaaagtcttgagatcccaccattctgaggaattcaatatgatcactttttccttctttgcctgggagaggttaagaggaggtttcgaaggtatagatgctattgttctgatggcccggctgaataaaatggaaattctagtttgttagaattatgcattctttttcaagattctcagtgtgcctaacttattggagcacatcagtttcttgggtaatggaaaacattacctagagttgccagtggcacattacaccagtacagagcacattccaaaggagacattggaccagttaattcccatacaagtcaaggtaacagaacaaaagggaatcctgatgcccttttaccattgctggttgagctcaggcactgtcatggacacccttaattttaaaaggttttaatcattcttctataaaatacatttaaaatggaaaaatacttaatatcactaaatatcagaacaatgtaacatttacaaatgacatattgaaagcaaaggctgttttatttagccaagatgattaccattaggagttactttatgtattgttgaaagcaaattttaaacatgatgttttagaagtgtttctgatttttaaacctggtttacaggtattacttctgcacttaccaaataatgccagatggaaatttattatttcttgcaattcccatgatagctctgttctttatgcattgtctcaacactttcccttttttcccaaaatgagtagagaattaaagccacccaaaacagcttctgctactaaaatgttctcatcctttctcctccctctccttttcctgccacaaaaggtgaaaaatgagatccaatcctctcaccaaaatttcaaacctaggacactggaatgactgcagggatcagtggttctcccatatcaccatcaattaagacatataggacactgtcttccttcaagagggttacaatgtggccatcagacaggaaaccaaacggtggataaagtattaagtaactaagtgccaaataaatgctggaaatcttgacctctccttgggattatgggtgtaacaaaaatccctacatctgtttatgaaggccatattcagtacattttaaatggtaaataatctgtttatgtgaagaaaaagaattaagtctttcttccaactctctccttggatagcctagcacagtgcagcctccataaccatgacattcccgcccaagctctcagtgcctaatcctgctttgtcattcacatctcacaaaatcttgacatcttacattccaatacattatcaagcaagcacaagtatgctggtagtagcctctttaaataatatgtatagacaacaacaacgacaaaaaatagactgttttaaagtttcagggaaagttggtggctgatttaaagttgtgcaggaaacatcttctgtgtatgaagcaaatgtcgatgttttgaaaaaagctaggagatgactttgaatgaatgcaaggttagtgagatcctaagctctcaaaatagcatattccctagagctcaagaaagctggtccaggaggttgaaaaagctattttgttgttaaattattttctggcccttcttaatatttaaaaatgtatttccccttgtggctttcaaccacctgctcaaaaaaagagacttgttacatgaaagttttcattaaagagctgaaaacaagaatttagagagccattcctagaaaatgtcctactgccctgcatttgacaaacaagcatcctttactaacaagagcaggaattcagaggcacaagaaaaagcattggcatgagccaaagagtctgtcttaatgttacttttgaaaatctgctgagcggccaccatatgcaggctgagagctgggcacaggcgaagccattggaagcacttcaggaacaagcacacagctgtgggacttgaacatgcaagtgttcaggttgtgtcaagaagcttttctttccttctatgatggaatctgttcttttctatcctacttttttctctcttcctctcctcaccacattataccctgctcttacgcagtaaacgttttaatggcccgtttatgtctcatgcctccaaacaacactgaatttgaaaccccccattttttcttttcaccaccctgttgagcaattttcccaaaaaaagggcagcaattattaaattgaattcaagtaagccagccaaagataggtcctaaattgctagtcccagtagaaccacctgatcctaaaccagtgcgaaacaaacagtaacaatgtccccagctgacttcagctaagaaccaatggctcctacccccgccccgcttttttttgttgttttttgttttgttttgagacggagtcttgctctgtcccccaggctggagtgcactggcgcaatctcgggctcactgcaacctcctcctcctcccacattgaggcgattctcctgcctcagcctcccaagtagctgggattacaggcacccgccatcacacccagctaatttttttttttttttgtattattagtagaagccaggtttcaccatgttggccagggtggtctcgaactcctgacctcaagtgatccgtccacctcggccttgcaaattgctgggattacaggtgtgagccaccgtgccgagccagccccattttttaaatgatgttttggttaagagtggaccatgagaattagctgacagcatcccctttctctctccctgccttggtgggaccctccctgtgtgaccttggtcaagtcctcgaacttttgtcccgtatttaagatggagctgttttacctacttcataagacagttgcgaggtgccattgattcttgactgcaaaataccttgaaacccttatataaagactgaagtcaacggagcctagtgaaagacttactttgtggcttgtggttgaaagtcacatcaaaagacaaatgtggccacgttcaggaattggagacttactggcatggctctacagctgctcagttattaatcatgcagactaacctgtcaacactgggagatgcaacatagcaaaaggacagagaaattagaattttttgtgcagaaagccctaaattcccacctgaatgtaacttacagctcccttacctactctcacacatgccctcaaacatgctagattggcttatacataggccaacacaaaatacaaacgtgacgtgttcatgtagcctagtggctatatgcctattctccatgtaccctgcatggtagtgctgcaaactttaaagtacatttctttcacagcagtattttttttcataagtggcatataaatgtcattcaatgaaatggggaaatcacgttgagaagttggtctgtcatctcccattgagcaaagactggcaggagataataaaaataaatatgggcacacatgtattaatatacagcacgcatttacaagtttattttccagataaaattgtgctataagaacagctctaccaagacagtctgcaccatttccaagtctcagttaatttacagcaactgctgctttcggagatggctgtgaaaatatggaagttcctctcaagtaggccaagaaacagttctagattttactaagttttattttgtcaggttttttaaattttttcagtgagcgtggtgactgcagaggttagtgctgtgaaaagctgggctaaatattctttctgtaaagtcaaacaggattccatcccctgtgaaataacacaaaatttcactctctaaaagcaacagcatgtaaactagaatgaaagaaggaaattatgtacgtatgcctaatattctttgtgaatgtctttcatttaactaaaattatattagaaaccagattgataaataaaaaattcaaagtagttttaattatcctaaaa

SEQ ID NO: 122103 - DNA, 6076 bp, Homo sapiens
  Payload ID: 3938
  Gene Symbol: CNTNAP2
  Gene Name: contactin associated protein-like 2
  Uniprot ID: Q9UHC6
  ENST ID: ENST00000613345
  CDS Start-End: 368-694
agtggtgcggggtttgatcccgagagcggtggactcaaagctgcccgccgggactcgggctgccggccgacaaaggacggtcctcgggggttctgaagtctgacccggccagtgggaaagccacctgcatcacaaagcgaggggcacacctgaaccggggctggcgggaagagaaacagggaaaattgaccaagagattcacaaatacaacaccccaggattcactggttgcctctccagagtccagttcaaccagatcgcccctctcaaggccgccttgaggcagacaaacgcctcggctcacgtccacatccagggcgagctggtggagtccaactgcggggcctcgccgctgaccctctcccccatgtcgtccgccaccgacccctggcacctggatcacctggattcagccagtgcagattttccatataatccaggacaaggccaagctataagaaatggagtcaacagaaactcggctatcattggaggcgtcattgctgtggtgattttcaccatcctgtgcaccctggtcttcctgatccggtacatgttccgccacaagggcacctaccataccaacgaagcaaagggggcggagtcggcagagagcgcggacgccgccatcatgaacaacgaccccaacttcacagagaccattgatgaaagcaaaaaggaatggctcatttgaggggtggctacttggctatgggatagggaggagggaattactagggaggagagaaagggacaaaagcaccctgcttcatactcttgagcacatccttaaaatatcagcacaagttgggggaggcaggcaatggaatataatggaatattcttgagactgatcacaaaaaaaaaaacctttttaatatttctttatagctgagttttcccttctgtatcaaaacaaaataatacaaaaaatgcttttagagtttaagcaatggttgaaatttgtaggtaatatctgtcttattttgtgtgtgtttagaggtgttctaaagacccgtggtaacagggcaagttttctacgtttttaagagcccttagaacgtgggtattttttttcttgagaaaagctaatgcacctacagatggcccccaacattctcttccttttgcttctagtcaaccttaatgggctgttacagaaactagttcgtgtttatatactatttcctttgatgtcctataagtcggaaaagaaaggggcaaagagaacctattatttgccagtttttaagcagagctcaatctatgccagctctctggcatctggggttcctgactgataccagcagttgaaggaagagagtgcatggcacctggtgtgtaacgacacaatcagcacaactggagagaggcattaaagaaccagggaaggtagtttgatttttcattgaattctacaagctaatattgttccacgtatgtagtcttagaccaatagctgtaactatcagctgcaataccatggtgaccagctgttacaaaagattttttcctgttttatctgaaacatactggatttatatatgtataagcgcctcaatggggaattagagccagatgttatgatttgtttgctctttttcttttatagtttagttatagcaaaaatatggataatttctagtgaatgcataaattaggttgcgtttcttattttgctttaaatctctggtagtttttccacccctgtgacacaatcctaatagacagtgtcctgtaaatggacacaacacaataaagtcaagttattattgctgttactctggatgatatggaaaacactgccatattttaaatcaactactccacgtgtttttccatccaatcacactgctgtgattcagggatctttcttctaagacggacacatttgaacctcaggttcatcacaaacctggtacctgttgcttcccagaggatggagaagtgtagttaatcacacctcttagtttaatctgaaatcttgacccagttatttaacaaataaatacctcattgattatatttaaaagtaatacacttcctgtaaacaaatggggacaatgcatccaaaaaatctttttaaacagattacacaaaaattatttccagaaaggctaccatttatcatcattatatttcaagcctcttatacttaataagcactttctaaaaagtcttgagatcccaccattctgaggaattcaatatgatcactttttccttctttgcctgggagaggttaagaggaggtttcgaaggtatagatgctattgttctgatggcccggctgaataaaatggaaattctagtttgttagaattatgcattctttttcaagattctcagtgtgcctaacttattggagcacatcagtttcttgggtaatggaaaacattacctagagttgccagtggcacattacaccagtacagagcacattccaaaggagacattggaccagttaattcccatacaagtcaaggtaacagaacaaaagggaatcctgatgcccttttaccattgctggttgagctcaggcactgtcatggacacccttaattttaaaaggttttaatcattcttctataaaatacatttaaaatggaaaaatacttaatatcactaaatatcagaacaatgtaacatttacaaatgacatattgaaagcaaaggctgttttatttagccaagatgattaccattaggagttactttatgtattgttgaaagcaaattttaaacatgatgttttagaagtgtttctgatttttaaacctggtttacaggtattacttctgcacttaccaaataatgccagatggaaatttattatttcttgcaattcccatgatagctctgttctttatgcattgtctcaacactttcccttttttcccaaaatgagtagagaattaaagccacccaaaacagcttctgctactaaaatgttctcatcctttctcctccctctccttttcctgccacaaaaggtgaaaaatgagatccaatcctctcaccaaaatttcaaacctaggacactggaatgactgcagggatcagtggttctcccatatcaccatcaattaagacatataggacactgtcttccttcaagagggttacaatgtggccatcagacaggaaaccaaacggtggataaagtattaagtaactaagtgccaaataaatgctggaaatcttgacctctccttgggattatgggtgtaacaaaaatccctacatctgtttatgaaggccatattcagtacattttaaatggtaaataatctgtttatgtgaagaaaaagaattaagtctttcttccaactctctccttggatagcctagcacagtgcagcctccataaccatgacattcccgcccaagctctcagtgcctaatcctgctttgtcattcacatctcacaaaatcttgacatcttacattccaatacattatcaagcaagcacaagtatgctggtagtagcctctttaaataatatgtatagacaacaacaacgacaaaaaatagactgttttaaagtttcagggaaagttggtggctgatttaaagttgtgcaggaaacatcttctgtgtatgaagcaaatgtcgatgttttgaaaaaagctaggagatgactttgaatgaatgcaaggttagtgagatcctaagctctcaaaatagcatattccctagagctcaagaaagctggtccaggaggttgaaaaagctattttgttgttaaattattttctggcccttcttaatatttaaaaatgtatttccccttgtggctttcaaccacctgctcaaaaaaagagacttgttacatgaaagttttcattaaagagctgaaaacaagaatttagagagccattcctagaaaatgtcctactgccctgcatttgacaaacaagcatcctttactaacaagagcaggaattcagaggcacaagaaaaagcattggcatgagccaaagagtctgtcttaatgttacttttgaaaatctgctgagcggccaccatatgcaggctgagagctgggcacaggcgaagccattggaagcacttcaggaacaagcacacagctgtgggacttgaacatgcaagtgttcaggttgtgtcaagaagcttttctttccttctatgatggaatctgttcttttctatcctacttttttctctcttcctctcctcaccacattataccctgctcttacgcagtaaacgttttaatggcccgtttatgtctcatgcctccaaacaacactgaatttgaaaccccccattttttcttttcaccaccctgttgagcaattttcccaaaaaaagggcagcaattattaaattgaattcaagtaagccagccaaagataggtcctaaattgctagtcccagtagaaccacctgatcctaaaccagtgcgaaacaaacagtaacaatgtccccagctgacttcagctaagaaccaatggctcctacccccgccccgcttttttttgttgttttttgttttgttttgagacggagtcttgctctgtcccccaggctggagtgcactggcgcaatctcgggctcactgcaacctcctcctcctcccacattgaggcgattctcctgcctcagcctcccaagtagctgggattacaggcacccgccatcacacccagctaatttttttttttttttgtattattagtagaagccaggtttcaccatgttggccagggtggtctcgaactcctgacctcaagtgatccgtccacctcggccttgcaaattgctgggattacaggtgtgagccaccgtgccgagccagccccattttttaaatgatgttttggttaagagtggaccatgagaattagctgacagcatcccctttctctctccctgccttggtgggaccctccctgtgtgaccttggtcaagtcctcgaacttttgtcccgtatttaagatggagctgttttacctacttcataagacagttgcgaggtgccattgattcttgactgcaaaataccttgaaacccttatataaagactgaagtcaacggagcctagtgaaagacttactttgtggcttgtggttgaaagtcacatcaaaagacaaatgtggccacgttcaggaattggagacttactggcatggctctacagctgctcagttattaatcatgcagactaacctgtcaacactgggagatgcaacatagcaaaaggacagagaaattagaattttttgtgcagaaagccctaaattcccacctgaatgtaacttacagctcccttacctactctcacacatgccctcaaacatgctagattggcttatacataggccaacacaaaatacaaacgtgacgtgttcatgtagcctagtggctatatgcctattctccatgtaccctgcatggtagtgctgcaaactttaaagtacatttctttcacagcagtattttttttcataagtggcatataaatgtcattcaatgaaatggggaaatcacgttgagaagttggtctgtcatctcccattgagcaaagactggcaggagataataaaaataaatatgggcacacatgtattaatatacagcacgcatttacaagtttattttccagataaaattgtgctataagaacagctctaccaagacagtctgcaccatttccaagtctcagttaatttacagcaactgctgctttcggagatggctgtgaaaatatggaagttcctctcaagtaggccaagaaacagttctagattttactaagttttattttgtcaggttttttaaattttttcagtgagcgtggtgactgcagaggttagtgctgtgaaaagctgggctaaatattctttctgtaaagtcaaacaggattccatcccctgtgaaataacacaaaatttcactctctaaaagcaacagcatgtaaactagaatgaaagaaggaaattatgtacgtatgcctaatattctttgtgaatgtctttcatttaactaaaattatattagaaaccagattgataaataaaaaattcaaagtagttttaattatcctaaaa

SEQ ID NO: 122104 - DNA, 676 bp, Homo sapiens
  Payload ID: 3938
  Gene Symbol: CNTNAP2
  Gene Name: contactin associated protein-like 2
  ENST ID: ENST00000625365
  CDS Start-End: 318-676
gctgatggaccccggccggtcggctcagtctcccttttgctttcaaacgaggccagggcagggcagaagggttttgacagccagagggtgcaagaggcaatacccgcacggagggagaacgaaggctgagactcccctgccgctccaagcccggaagaactggagcctggaggggggtgaggggagaagaggaagcgggaggggcttggcttcctcgcgtatttgaggacagcccatctcccttcaagaaccctacggagagtcggactgcatctccgcagcgagctcttggagcgccgccggccgggaggcgaaggatgcaggcggctccgcgcgccggctgcggggcagcgctcctgctgtggattgtcagcagctgcctctgcagagcctggacggctccctccacgtcccaaaaatgtgatgagccacttgtctctggactcccccatgtggctttcagcagctcctcctccatctctggtagctattctcccggctatgccaagataaacaagagaggaggtgctgggggatggtctccatcagacagcgaccattatcaatggcttcaggttgactttggcaatcggaagcagatcagtgccattgcaacccaaggaaggtatagcagctcagattgggtgacccaataccggatgctctacagcgacac

SEQ ID NO: 122105 - DNA, 6076 bp, Homo sapiens
  Payload ID: 3938
  Gene Symbol: CNTNAP2
  Gene Name: contactin associated protein-like 2
  Uniprot ID: Q9UHC6
  ENST ID: ENST00000463592
  CDS Start-End: 368-694
agtggtgcggggtttgatcccgagagcggtggactcaaagctgcccgccgggactcgggctgccggccgacaaaggacggtcctcgggggttctgaagtctgacccggccagtgggaaagccacctgcatcacaaagcgaggggcacacctgaaccggggctggcgggaagagaaacagggaaaattgaccaagagattcacaaatacaacaccccaggattcactggttgcctctccagagtccagttcaaccagatcgcccctctcaaggccgccttgaggcagacaaacgcctcggctcacgtccacatccagggcgagctggtggagtccaactgcggggcctcgccgctgaccctctcccccatgtcgtccgccaccgacccctggcacctggatcacctggattcagccagtgcggattttccatataatccaggacaaggccaagctataagaaatggagtcaacagaaactcggctatcattggaggcgtcattgctgtggtgattttcaccatcctgtgcaccctggtcttcctgatccggtacatgttccgccacaagggcacctaccataccaacgaagcaaagggggcggagtcggcagagagcgcggacgccgccatcatgaacaacgaccccaacttcacagagaccattgatgaaagcaaaaaggaatggctcatttgaggggtggctacttggctatgggatagggaggagggaattactagggaggagagaaagggacaaaagcaccctgcttcatactcttgagcacatccttaaaatatcagcacaagttgggggaggcaggcaatggaatataatggaatattcttgagactgatcacaaaaaaaaaaacctttttaatatttctttatagctgagttttcccttctgtatcaaaacaaaataatacaaaaaatgcttttagagtttaagcaatggttgaaatttgtaggtactatctgtcttattttgtgtgtgtttagaggtgttctaaagacccgtggtaacagggcaagttttctacgtttttaagagcccttagaacgtgggtattttttttcttgagaaaagctaatgcacctacagatggcccccaacattctcttccttttgcttctagtcaaccttaatgggctgttacagaaactagttcgtgtttatatactatttcctttgatgtcctataagtcggaaaagaaaggggcaaagagaacctattatttgccagtttttaagcagagctcaatctatgccagctctctggcatctggggttcctgactgataccagcagttgaaggaagagagtgcatggcacctggtgtgtaacgacacaatcagcacaactggagagaggcattaaagaaccagggaaggtagtttgatttttcattgaattctacaagctaatattgttccacgtatgtagtcttagaccaatagctgtaactatcagctgcaataccatggtgaccagctgttacaaaagattttttcctgttttatctgaaacatactggatttatatatgtataagcgcctcaatggggaattagagccagatgttatgatttgtttgctctttttcttttatagtttagttatagcaaaaatatggataatttctagtgaatgcataaattaggttgcgtttcttattttgctttaaatctctggtagtttttccacccctgtgacacaatcctaatagacagtgtcctgtaaatggacacaacacaataaagtcaagttattattgctgttactctggatgatatggaaaacactgccatattttaaatcaactactccacgtgtttttccatccaatcacactgctgtgattcagggatctttcttctaagacggacacatttgaacctcaggttcatcacaaacctggtacctgttgcttcccagaggatggagaagtgtagttaatcacacctcttagtttaatctgaaatcttgacccagttatttaacaaataaatacctcattgattatatttaaaagtaatacacttcctgtaaacaaatggggacaatgcatccaaaaaatctttttaaacagattacacaaaaattatttccagaaaggctaccatttatcatcattatatttcaagcctcttatacttaataagcactttctaaaaagtcttgagatcccaccattctgaggaattcaatatgatcactttttccttctttgcctgggagaggttaagaggaggtttcgaaggtatagatgctattgttctgatggcccggctgaataaaatggaaattctagtttgttagaattatgcattctttttcaagattctcagtgtgcctaacttattggagcacatcagtttcttgggtaatggaaaacattacctagagttgccagtggcacattacaccagtacagagcacattccaaaggagacattggaccagttaattcccatacaagtcaaggtaacagaacaaaagggaatcctgatgcccttttaccattgctggttgagctcaggcactgtcatggacacccttaattttaaaaggttttaatcattcttctataaaatacatttaaaatggaaaaatacttaatatcactaaatatcagaacaatgtaacatttacaaatgacatattgaaagcaaaggctgttttatttagccaagatgattaccattaggagttactttatgtattgttgaaagcaaattttaaacatgatgttttagaagtgtttctgatttttaaacctggtttacaggtattacttctgcacttaccaaataatgccagatggaaatttattatttcttgcaattcccatgatagctctgttctttatgcattgtctcaacactttcccttttttcccaaaatgagtagagaattaaagccacccaaaacagcttctgctactaaaatgttctcatcctttctcctccctctccttttcctgccacaaaaggtgaaaaatgagatccaatcctctcaccaaaatttcaaacctaggacactggaatgactgcagggatcagtggttctcccatatcaccatcaattaagacatataggacactgtcttccttcaagagggttacaatgtggccatcagacaggaaaccaaacggtggataaagtattaagtaactaagtgccaaataaatgctggaaatcttgacctctccttgggattatgggtgtaacaaaaatccctacatctgtttatgaaggccatattcagtacattttaaatggtaaataatctgtttatgtgaagaaaaagaattaagtctttcttccaactctctccttggatagcctagcacagtgcagcctccataaccatgacattcccgcccaagctctcagtgcctaatcctgctttgtcattcacatctcacaaaatcttgacatcttacattccaatacattatcaagcaagcacaagtatgctggtagtagcctctttaaataatatgtatagacaacaacaacgacaaaaaatagactgttttaaagtttcagggaaagttggtggctgatttaaagttgtgcaggaaacatcttctgtgtatgaagcaaatgtcgatgttttgaaaaaagctaggagatgactttgaatgaatgcaaggttagtgagatcctaagctctcaaaatagcatattccctagagctcaagaaagctggtccaggaggttgaaaaagctattttgttgttaaattattttctggcccttcttaatatttaaaaatgtatttccccttgtggctttcaaccacctgctcaaaaaaagagacttgttacatgaaagttttcattaaagagctgaaaacaagaatttagagagccattcctagaaaatgtcctactgccctgcatttgacaaacaagcatcctttactaacaagagcaggaattcagaggcacaagaaaaagcattggcatgagccaaagagtctgtcttaatgttacttttgaaaatctgctgagcggccaccatatgcaggctgagagctgggcacaggcgaagccattggaagcacttcaggaacaagcacacagctgtgggacttgaacatgcaagtgttcaggttgtgtcaagaagcttttctttccttctatgatggaatctgttcttttctatcctacttttttctctcttcctctcctcaccacattataccctgctcttacgcagtaaacgttttaatggcccgtttatgtctcatgcctccaaacaacactgaatttgaaaccccccattttttcttttcaccaccctgttgagcaattttcccaaaaaaagggcagcaattattaaattgaattcaagtaagccagccaaagataggtcctaaattgctagtcccagtagaaccacctgatcctaaaccagtgcgaaacaaacagtaacaatgtccccagctgacttcagctaagaaccaatggctcctacccccgccccgcttttttttgttgttttttgttttgttttgagacggagtcttgctctgtcccccaggctggagtgcactggcgcaatctcgggctcactgcaacctcctcctcctcccacattgaggcgattctcctgcctcagcctcccaagtagctgggattacaggcacccgccatcacacccagctaatttttttttttttttgtattattagtagaagccaggtttcaccatgttggccagggtggtctcgaactcctgacctcaagtgatccgtccacctcggccttgcaaattgctgggattacaggtgtgagccaccgtgccgagccagccccattttttaaatgatgttttggttaagagtggaccatgagaattagctgacagcatcccctttctctctccctgccttggtgggaccctccctgtgtgaccttggtcaagtcctcgaacttttgtcccgtatttaagatggagctgttttacctacttcataagacagttgcgaggtgccattgattcttgactgcaaaataccttgaaacccttatataaagactgaagtcaacggagcctagtgaaagacttactttgtggcttgtggttgaaagtcacatcaaaagacaaatgtggccacgttcaggaattggagacttactggcatggctctacagctgctcagttattaatcatgcagactaacctgtcaacactgggagatgcaacatagcaaaaggacagagaaattagaattttttgtgcagaaagccctaaattcccacctgaatgtaacttacagctcccttacctactctcacacatgccctcaaacatgctagattggcttatacataggccaacacaaaatacaaacgtgacgtgttcatgtagcctagtggctatatgcctattctccatgtaccctgcatggtagtgctgcaaactttaaagtacatttctttcacagcagtattttttttcataagtggcatataaatgtcattcaatgaaatggggaaatcacgttgagaagttggtctgtcatctcccattgagcaaagactggcaggagataataaaaataaatatgggcacacatgtattaatatacagcacgcatttacaagtttattttccagataaaattgtgctataagaacagctctaccaagacagtctgcaccatttccaagtctcagttaatttacagcaactgctgctttcggagatggctgtgaaaatatggaagttcctctcaagtaggccaagaaacagttctagattttactaagttttattttgtcaggttttttaaattttttcagtgagcgtggtgactgcagaggttagtgctgtgaaaagctgggctaaatattctttctgtaaagtcaaacaggattccatcccctgtgaaataacacaaaatttcactctctaaaagcaacagcatgtaaactagaatgaaagaaggaaattatgtacgtatgcctaatattctttgtgaatgtctttcatttaactaaaattatattagaaaccagattgataaataaaaaattcaaagtagttttaattatcctaaaa

SEQ ID NO: 122106 - DNA, 1944 bp, Homo sapiens
  Payload ID: 3938
  Gene Symbol: CNTNAP2
  Gene Name: contactin associated protein-like 2
  ENST ID: ENST00000628930
  CDS Start-End: 448-1620
taagagctagtcacatgtctccacctggatgcacagggaccaggaaggcagttactggctgggtagcagctttgcgggagtgatgatgaaaaggggaaagaaaccttctgtgaatggttagtggtctcttttacaggtactatgacaccaaaaaggagtaaactttaaagacaccaagctgccacagaagtgtccttttcatttgatgtgggaaatgggccagtagagattgtagtgaggtcaccaacccctctcaacgatgaccagtggcaccgggtcactgcagagaggaatgtcaagcaggccagcctacaggtggaccggctaccgcagcagatccgcaaggccccaacagaaggccacacccgcctggagctctacagccagttatttgtgggtggtgctgggggccagcagggcttcctgggctgcatccgctccttgaggatgaatggggtgacacttgacctggaggaaagagcaaaggtcacatctgggttcatatccggatgctcgggccattgcaccagctatggaacaaactgtgaaaatggaggcaaatgcctagagagataccacggttactcctgcgattgctctaatactgcatatgatggaacattttgcaacaaagatgttggtgcattttttgaagaagggatgtggctacgatataactttcaggcaccagcaacaaatgccagagactccagcagcagagtagacaacgctcccgaccagcagaactcccacccggacctggcacaggaggagatccgcttcagcttcagcaccaccaaggcgccctgcattctcctctacatcagctccttcaccacagacttcttggcagtcctcgtcaaacccactggaagcttacagattcgatacaacctgggtggcacccgagagccatacaatattgacgtagaccacaggaacatggccaatggacagccccacagtgtcaacatcacccgccacgagaagaccatctttctcaagctcgatcattatccttctgtgagttaccatctgccaagttcatccgacaccctcttcaattctcccaagtcgctctttctgggaaaagttatagaaacagggaaaattgaccaagagattcacaaatacaacaccccaggattcactggttgcctctccagagtccagttcaaccagatcgcccctctcaaggccgccttgaggcagacaaacgcctcggctcacgtccacatccagggcgagctggtggagtccaactgcggggcctcgccgctgaccctctcccccatgtcgtccgccaccgacccctggcacctggatcacctggattcagccagtgcggattttccatataatccaggacaaggccaagctataagaaatggagtcaacagaaactcggctatcattggaggcgtcattgctgtggtgattttcaccatcctgtgcaccctggtcttcctgatccggtacatgttccgccacaagggcacctaccataccaacgaagcaaagggggcggagtcggcagagagcgcggacgccgccatcatgaacaacgaccccaacttcacagagaccattgatgaaagcaaaaaggaatggctcatttgaggggtggctacttggctatgggatagggaggagggaattactagggaggagagaaagggacaaaagcaccctgcttcatactcttgagcacatccttaaaatatcagcacaagttgggggaggcaggcaatggaatataatggaatattcttgagactgatcacaaaaaaaaaaacctttttaatatttctttatagctgagttttcccttctgtatcaaaacaaaataatacaaaaaatgcttttagagtttaagcaatggttgaaatttgtaggtactatctgtcttattttgtgtgtgtttagaggtgttctaaagacccg

SEQ ID NO: 122107 - DNA, 6368 bp, Homo sapiens
  Payload ID: 3938
  Gene Symbol: CNTNAP2
  Gene Name: contactin associated protein-like 2
  ENST ID: ENST00000633607
  CDS Start-End: 1-986
atgttggtgcattttttgaagaagggatgtggctacgatataactttcaggcaccagcaacaaatgccagagactccagcagcagagtagacaacgctcccgaccagcagaactcccacccggacctggcacaggaggagatccgcttcagcttcagcaccaccaaggcgccctgcattctcctctacatcagctccttcaccacagacttcttggcagtcctcgtcaaacccactggaagcttacagattcgatacaacctgggtggcacccgagagccatacaatattgacgtagaccacaggaacatggccaatggacagccccacagtgtcaacatcacccgccacgagaagaccatctttctcaagctcgatcattatccttctgtgagttaccatctgccaagttcatccgacaccctcttcaattctcccaagtcgctctttctgggaaaagttatagaaacagggaaaattgaccaagagattcacaaatacaacaccccaggattcactggttgcctctccagagtccagttcaaccagatcgcccctctcaaggccgccttgaggcagacaaacgcctcggctcacgtccacatccagggcgagctggtggagtccaactgcggggcctcgccgctgaccctctcccccatgtcgtccgccaccgacccctggcacctggatcacctggattcagccagtgcagattttccatataatccaggacaaggccaagctataagaaatggagtcaacagaaactcggctatcattggaggcgtcattgctgtggtgattttcaccatcctgtgcaccctggtcttcctgatccggtacatgttccgccacaagggcacctaccataccaacgaagcaaagggggcggagtcggcagagagcgcggacgccgccatcatgaacaacgaccccaacttcacagagaccattgatgaaagcaaaaaggaatggctcatttgaggggtggctacttggctatgggatagggaggagggaattactagggaggagagaaagggacaaaagcaccctgcttcatactcttgagcacatccttaaaatatcagcacaagttgggggaggcaggcaatggaatataatggaatattcttgagactgatcacaaaaaaaaaaacctttttaatatttctttatagctgagttttcccttctgtatcaaaacaaaataatacaaaaaatgcttttagagtttaagcaatggttgaaatttgtaggtaatatctgtcttattttgtgtgtgtttagaggtgttctaaagacccgtggtaacagggcaagttttctacgtttttaagagcccttagaacgtgggtattttttttcttgagaaaagctaatgcacctacagatggcccccaacattctcttccttttgcttctagtcaaccttaatgggctgttacagaaactagttcgtgtttatatactatttcctttgatgtcctataagtcggaaaagaaaggggcaaagagaacctattatttgccagtttttaagcagagctcaatctatgccagctctctggcatctggggttcctgactgataccagcagttgaaggaagagagtgcatggcacctggtgtgtaacgacacaatcagcacaactggagagaggcattaaagaaccagggaaggtagtttgatttttcattgaattctacaagctaatattgttccacgtatgtagtcttagaccaatagctgtaactatcagctgcaataccatggtgaccagctgttacaaaagattttttcctgttttatctgaaacatactggatttatatatgtataagcgcctcaatggggaattagagccagatgttatgatttgtttgctctttttcttttatagtttagttatagcaaaaatatggataatttctagtgaatgcataaattaggttgcgtttcttattttgctttaaatctctggtagtttttccacccctgtgacacaatcctaatagacagtgtcctgtaaatggacacaacacaataaagtcaagttattattgctgttactctggatgatatggaaaacactgccatattttaaatcaactactccacgtgtttttccatccaatcacactgctgtgattcagggatctttcttctaagacggacacatttgaacctcaggttcatcacaaacctggtacctgttgcttcccagaggatggagaagtgtagttaatcacacctcttagtttaatctgaaatcttgacccagttatttaacaaataaatacctcattgattatatttaaaagtaatacacttcctgtaaacaaatggggacaatgcatccaaaaaatctttttaaacagattacacaaaaattatttccagaaaggctaccatttatcatcattatatttcaagcctcttatacttaataagcactttctaaaaagtcttgagatcccaccattctgaggaattcaatatgatcactttttccttctttgcctgggagaggttaagaggaggtttcgaaggtatagatgctattgttctgatggcccggctgaataaaatggaaattctagtttgttagaattatgcattctttttcaagattctcagtgtgcctaacttattggagcacatcagtttcttgggtaatggaaaacattacctagagttgccagtggcacattacaccagtacagagcacattccaaaggagacattggaccagttaattcccatacaagtcaaggtaacagaacaaaagggaatcctgatgcccttttaccattgctggttgagctcaggcactgtcatggacacccttaattttaaaaggttttaatcattcttctataaaatacatttaaaatggaaaaatacttaatatcactaaatatcagaacaatgtaacatttacaaatgacatattgaaagcaaaggctgttttatttagccaagatgattaccattaggagttactttatgtattgttgaaagcaaattttaaacatgatgttttagaagtgtttctgatttttaaacctggtttacaggtattacttctgcacttaccaaataatgccagatggaaatttattatttcttgcaattcccatgatagctctgttctttatgcattgtctcaacactttcccttttttcccaaaatgagtagagaattaaagccacccaaaacagcttctgctactaaaatgttctcatcctttctcctccctctccttttcctgccacaaaaggtgaaaaatgagatccaatcctctcaccaaaatttcaaacctaggacactggaatgactgcagggatcagtggttctcccatatcaccatcaattaagacatataggacactgtcttccttcaagagggttacaatgtggccatcagacaggaaaccaaacggtggataaagtattaagtaactaagtgccaaataaatgctggaaatcttgacctctccttgggattatgggtgtaacaaaaatccctacatctgtttatgaaggccatattcagtacattttaaatggtaaataatctgtttatgtgaagaaaaagaattaagtctttcttccaactctctccttggatagcctagcacagtgcagcctccataaccatgacattcccgcccaagctctcagtgcctaatcctgctttgtcattcacatctcacaaaatcttgacatcttacattccaatacattatcaagcaagcacaagtatgctggtagtagcctctttaaataatatgtatagacaacaacaacgacaaaaaatagactgttttaaagtttcagggaaagttggtggctgatttaaagttgtgcaggaaacatcttctgtgtatgaagcaaatgtcgatgttttgaaaaaagctaggagatgactttgaatgaatgcaaggttagtgagatcctaagctctcaaaatagcatattccctagagctcaagaaagctggtccaggaggttgaaaaagctattttgttgttaaattattttctggcccttcttaatatttaaaaatgtatttccccttgtggctttcaaccacctgctcaaaaaaagagacttgttacatgaaagttttcattaaagagctgaaaacaagaatttagagagccattcctagaaaatgtcctactgccctgcatttgacaaacaagcatcctttactaacaagagcaggaattcagaggcacaagaaaaagcattggcatgagccaaagagtctgtcttaatgttacttttgaaaatctgctgagcggccaccatatgcaggctgagagctgggcacaggcgaagccattggaagcacttcaggaacaagcacacagctgtgggacttgaacatgcaagtgttcaggttgtgtcaagaagcttttctttccttctatgatggaatctgttcttttctatcctacttttttctctcttcctctcctcaccacattataccctgctcttacgcagtaaacgttttaatggcccgtttatgtctcatgcctccaaacaacactgaatttgaaaccccccattttttcttttcaccaccctgttgagcaattttcccaaaaaaagggcagcaattattaaattgaattcaagtaagccagccaaagataggtcctaaattgctagtcccagtagaaccacctgatcctaaaccagtgcgaaacaaacagtaacaatgtccccagctgacttcagctaagaaccaatggctcctacccccgccccgcttttttttgttgttttttgttttgttttgagacggagtcttgctctgtcccccaggctggagtgcactggcgcaatctcgggctcactgcaacctcctcctcctcccacattgaggcgattctcctgcctcagcctcccaagtagctgggattacaggcacccgccatcacacccagctaatttttttttttttttgtattattagtagaagccaggtttcaccatgttggccagggtggtctcgaactcctgacctcaagtgatccgtccacctcggccttgcaaattgctgggattacaggtgtgagccaccgtgccgagccagccccattttttaaatgatgttttggttaagagtggaccatgagaattagctgacagcatcccctttctctctccctgccttggtgggaccctccctgtgtgaccttggtcaagtcctcgaacttttgtcccgtatttaagatggagctgttttacctacttcataagacagttgcgaggtgccattgattcttgactgcaaaataccttgaaacccttatataaagactgaagtcaacggagcctagtgaaagacttactttgtggcttgtggttgaaagtcacatcaaaagacaaatgtggccacgttcaggaattggagacttactggcatggctctacagctgctcagttattaatcatgcagactaacctgtcaacactgggagatgcaacatagcaaaaggacagagaaattagaattttttgtgcagaaagccctaaattcccacctgaatgtaacttacagctcccttacctactctcacacatgccctcaaacatgctagattggcttatacataggccaacacaaaatacaaacgtgacgtgttcatgtagcctagtggctatatgcctattctccatgtaccctgcatggtagtgctgcaaactttaaagtacatttctttcacagcagtattttttttcataagtggcatataaatgtcattcaatgaaatggggaaatcacgttgagaagttggtctgtcatctcccattgagcaaagactggcaggagataataaaaataaatatgggcacacatgtattaatatacagcacgcatttacaagtttattttccagataaaattgtgctataagaacagctctaccaagacagtctgcaccatttccaagtctcagttaatttacagcaactgctgctttcggagatggctgtgaaaatatggaagttcctctcaagtaggccaagaaacagttctagattttactaagttttattttgtcaggttttttaaattttttcagtgagcgtggtgactgcagaggttagtgctgtgaaaagctgggctaaatattctttctgtaaagtcaaacaggattccatcccctgtgaaataacacaaaatttcactctctaaaagcaacagcatgtaaactagaatgaaagaaggaaattatgtacgtatgcctaatattctttgtgaatgtctttcatttaactaaaattatattagaaaccagattgataaataaaaaattcaaagtagttttaattatcctaaaa

SEQ ID NO: 122108 - DNA, 1310 bp, Homo sapiens
  Payload ID: 3938
  Gene Symbol: CNTNAP2
  Gene Name: contactin associated protein-like 2
  ENST ID: ENST00000633544
  CDS Start-End: 1-986
atgttggtgcattttttgaagaagggatgtggctacgatataactttcaggcaccagcaacaaatgccagagactccagcagcagagtagacaacgctcccgaccagcagaactcccacccggacctggcacaggaggagatccgcttcagcttcagcaccaccaaggcgccctgcattctcctctacatcagctccttcaccacagacttcttggcagtcctcgtcaaacccactggaagcttacagattcgatacaacctgggtggcacccgagagccatacaatattgacgtagaccacaggaacatggccaatggacagccccacagtgtcaacatcacccgccacgagaagaccatctttctcaagctcgatcattatccttctgtgagttaccatctgccaagttcatccgacaccctcttcaattctcccaagtcgctctttctgggaaaagttatagaaacagggaaaattgaccaagagattcacaaatacaacaccccaggattcactggttgcctctccagagtccagttcaaccagatcgcccctctcaaggccgccttgaggcagacaaacgcctcggctcacgtccacatccagggcgagctggtggagtccaactgcggggcctcgccgctgaccctctcccccatgtcgtccgccaccgacccctggcacctggatcacctggattcagccagtgcagattttccatataatccaggacaaggccaagctataagaaatggagtcaacagaaactcggctatcattggaggcgtcattgctgtggtgattttcaccatcctgtgcaccctggtcttcctgatccggtacatgttccgccacaagggcacctaccataccaacgaagcaaagggggcggagtcggcagagagcgcggacgccgccatcatgaacaacgaccccaacttcacagagaccattgatgaaagcaaaaaggaatggctcatttgaggggtggctacttggctatgggatagggaggagggaattactagggaggagagaaagggacaaaagcaccctgcttcatactcttgagcacatccttaaaatatcagcacaagttgggggaggcaggcaatggaatataatggaatattcttgagactgatcacaaaaaaaaaaacctttttaatatttctttatagctgagttttcccttctgtatcaaaacaaaataatacaaaaaatgcttttagagtttaagcaatggttgaaatttgtaggtaatatctgtcttattttgtgtgtgtttagaggtgttctaaagacccg

SEQ ID NO: 122109 - DNA, 5064 bp, Homo sapiens
  Payload ID: 3939
  Gene Symbol: CNTNAP3
  Gene Name: contactin associated protein-like 3
  Uniprot ID: Q9BZ76
  ENST ID: ENST00000297668
  CDS Start-End: 75-3941
cgggagtgagagcaggagcgacgcagagcggccgtcgccgtgcccgggtctcagggcgcctggctgaagtgagcatggcttcagtggcctgggccgtcctcaaggtgctgctgcttctccccactcagacttggagccccgtgggagcaggaaatccacctgactgtgatgccccactggcctctgccttgcctaggtcatccttcagcagctcctcagagctgtccagcagccacggcccggggttttcaaggcttaatcgaagagatggagctggtggctggactccacttgtgtcaaataaataccaatggctgcaaattgaccttggagagagaatggaggtcactgctgtcgccacccaaggaggatatgggagctctgactgggtgaccagctacctcctgatgttcagtgatggtgggagaaactggaagcagtatcgccgagaagaaagcatctggggttttccaggaaacacaaacgcagacagtgtggtgcactacagactccagcctccctttgaagccaggttcctgcgctttctccctttagcctggaaccctaggggcaggattgggatgcggatcgaagtgtacggatgtgcatataaatctgaggtggtttattttgatggacaaagtgctctgctgtatagacttgataaaaaacctttaaaaccaataagagacgttatttctttgaaatttaaagccatgcagagcaatggaattctacttcacagagaaggacaacatggaaatcacattactctggaattaattaaaggaaagcttgtcttttttcttaattcaggcaatgctaagctgccttccactattgctcctgtgaccctcaccctgggcagcctgctggacgaccagcactggcattccgtcctcatcgagctcctcgacacgcaggtcaacttcaccgtggacaaacacactcatcatttccaagcaaagggagattccagttacttggatcttaattttgagatcagctttgggggaattccgacacccggaagatcgcgggcattcagacgtaaaagctttcatgggtgtttagaaaatctttattataatggagtggatgttaccgaattagccaagaaacacaaaccacagatcctcatgatgggaaatgtgtccttctcatgtccacagccacagactgtccctgtgacttttctgagctccaggagttatctggctctgccaggcaactctggggaggacaaagtgtctgtcacttttcaatttcgaacgtggaacagagcaggacatttgcttttcggcgaacttcgacgtggttcagggagtttcgtcctctttcttaaggatggcaagctcaaactgagtctcttccagccgggacagtcaccaaggaatgtcacagcaggtgctggattaaacgatgggcagtggcactctgtgtccttctctgccaagtggagccatatgaatgtggtggtggacgatgacacagctgttcagcccctggtggctgtgctcattgattcaggtgacacctattattttggaggctgcctggacaacagctctggctctggatgtaaaagccccctgggagggtttcagggctgcctaaggctcatcaccattggtgacaaagcggtggatcccatcttagtacagcagggggcgctggggagtttcagggacctccagatagactcctgcggcatcacagacaggtgcttgcccagctactgtgagcatgggggcgagtgttcccagtcgtgggacaccttctcctgtgactgtctaggcacaggctatacgggcgagacctgccattcctctctctacgagcagtcttgtgaagcccacaagcaccgagggaacccgtctgggctttactatattgatgcagatggaagtggccccctgggaccatttcttgtgtactgcaatatgacagcagacgccgcgtggacggtggtgcagcacggtggccccgacgcggtgaccctccgaggtgcccccagcgggcacccgcgctcggctgtgtccttcgcgtacgcagcgggcgcggggcagctgcggtccgcggtgaacctggcggagcgctgcgagcagcggctggctctgcgctgcgggacggcgcggcgcccggactcacgagatggaaccccactgagctggtgggttggaagaaccaatgaaacacacacttcctggggaggttctctgcctgatgctcaaaagtgtacttgtggattagaggggaactgcattgattctcagtattactgcaactgtgatgctggccggaatgaatggactagtgacacaatagtcctttcccaaaaggagcacctgccagtcactcagattgtgatgacagacgcaggccgaccacattccgaagcagcttatacactggggccactgctctgccgcggagatcagtcattctggaattcagcttccttcaacactgagacttcataccttcatttccctgctttccacggagaactcactgctgacgtgtgcttcttttttaagaccacagtttcctccggggtgtttatggagaacctggggatcacagatttcatcaggattgagctgcgtgctcccacagaagtgaccttttccttcgatgtggggaatggaccttgtgaggtcacggtgcagtcacccactccctttaatgacaatcagtggcaccacgtgagggcagagagaaatgttaaaggagcgtctcttcaagttgatcagcttcctcagaagatgcagcctgcccctgctgatgggcacgttcgtttacagctcaacagccagctcttcattggtggaacggccaccagacagagaggctttctaggatgcattcggtctctgcagttgaacggggtggccctggatctggaagaaagagccacagtgacgccaggagtggagccagggtgtgcaggacactgcagcacctatggacacttgtgtcgcaatggagggagatgcagagagaaacgcaggggggtcacctgtgactgtgccttctcagcctatgatgggccgttctgctccaatgagatttccgcatattttgcaactggctcctcaatgacataccattttcaagaacattacactttaagtgaaaactccagctctctcgtttcttcattacacagagatgtaacattgaccagagaaatgatcacactgagcttccgaaccacacgaactccgagcttattgctgtatgtgagctctttctatgaggaatacctttcagttatcctcgccaacaatggaagtttgcagattaggtacaagctagatagacatcaaaatcctgatgcatttacctttgattttaaaaacatggctgatgggcaacttcaccaagtgaagattaacagagaagaagctgtggtcatggtagaggttaaccagagcacaaagaaacaagtcatcttgtcctcagggacagaattcaacgccgtcaaatctctcatattgggaaaggttttagaggctgccggcgcggacccggacacaaggcgggcggcgactagtggcttcactggctgcctctcggcggtgcgcttcggccgcgctgctcccctgaaggcggcgctgcgccccagcggcccctcccgggtcaccgtccgcggccacgtggcccctatggcccgctgcgcagcgggggcggcgtccggctccccggcgcgggaactggctccccgactcgcggggggcgcaggtcgttctggaccagcggatgagggagagcccttggttaatgcagacagaagagactctgctgtcatcggaggtgtgatagcagtggtgatatttattttgctttgcatcactgccatagccatacgcatctatcaacagagaaagttacgcaaagaaaatgagtcaaaagtctcaaaaaaagaagagtgctaggacagctctaaacagtgagctcgatgtgcaaaacgcagtccatgaaaaccagaaagagcgagtcttctgattggcagctgtggctgtctctatcatcgtgactgtggacttccctgctgttgccatcagggtgcacacaagcaggtgcagtgctgtcacctggctgaagacctgcagcctcggagcctctgggaggtccctttctccctcggtgaaacacagtcctccacatcaatttccaaacaatgaattaggtatggccattcatcactgttcagtagtttccccgtccaaaggctctcttccaaaactgcagtttgatctgtgttaataattgtggggttttagatgagaaaatggctataaagctgtggccctactttattttttaaaaatgacagaacttttgttcagatgtaaaagacaaaattgcactttaatgttttttgttacttgaaaacatatctgggatccctttttttggtcctctgctgatatttataaaacaagaaatgcttcttggactaccttcactggcatttccatagtcctggaatccagagccaagtggcctatctaaaattcacagcccttttattctcctgtgtgatggttaatacaacacagttgaagcctggaaacactaccattatttttggtgtattgctttttctaattgactgtttttaatgattttgatacattttaatgttgaaattaatattgaatgttagctatgaaattttagtattgaattttataatggaacagaacattggtaggtaacaagatgcaagaggatgtcaatacaagattgtctgcctgtttttctttgtaatttgtaattacagtttttgtaacttgtgattatgtttttaactaaatttaccaccagatacaaacaatacttcttacacagagttatcctttatttatatcattaagacgtgaatgaaacatcatcctaacttacttccccaagatattgagaggtcatatctgtttttctttatcattcatttctttttctaaaagttgttactgatatgcttttgatttcctatgactctattatgttgtacagaacatcttttcaatttattaaaaaaatagcttaactgaa

SEQ ID NO: 122110 - DNA, 4885 bp, Homo sapiens
  Payload ID: 3939
  Gene Symbol: CNTNAP3
  Gene Name: contactin associated protein-like 3
  ENST ID: ENST00000358144
  CDS Start-End: 57-3176
ggactccacttgtgtcaaataaataccaatggctgcaaattgaccttggagagagaatggaggtcactgctgtcgccacccaaggaggatatgggagctctgactgggtgaccagctacctcctgatgttcagtgatggtgggagaaactggaagcagtatcgccgagaagaaagcatctggggttttccaggaaacacaaacgcagacagtgtggtgcactacagactccagcctccctttgaagccaggttcctgcgctttctccctttagcctggaaccctaggggcaggattgggatgcggatcgaagtgtacggatgtgcatataaatctgaggtggtttattttgatggacaaagtgctctgctgtatagacttgataaaaaacctttaaaaccaataagagacgttatttctttgaaatttaaagccatgcagagcaatggaattctacttcacagagaaggacaacatggaaatcacattactctggaattaattaaaggaaagcttgtcttttttcttaattcaggcaatgctaagctgccttccactattgctcctgtgaccctcaccctgggcagcctgctggacgaccagcactggcattccgtcctcatcgagctcctcgacacgcaggtcaacttcaccgtggacaaacacactcatcatttccaagcaaagggagattccagttacttggatcttaattttgagatcagctttgggggaattccgacacccggaagatcgcgggcattcagacgtaaaagctttcatgggtgtttagaaaatctttattataatggagtggatgttaccgaattagccaagaaacacaaaccacagatcctcatgatgggaaatgtgtccttctcatgtccacagccacagactgtccctgtgacttttctgagctccaggagttatctggctctgccaggcaactctggggaggacaaagtgtctgtcacttttcaatttcgaacgtggaacagagcaggacatttgcttttcggcgaacttcgacgtggttcagggagtttcgtcctctttcttaaggatggcaagctcaaactgagtctcttccagccgggacagtcaccaaggaatgtcacagcaggtgctggattaaacgatgggcagtggcactctgtgtccttctctgccaagtggagccatatgaatgtggtggtggacgatgacacagctgttcagcccctggtggctgtgctcattgattcaggtgacacctattattttggaggctgcctggacaacagctctggctctggatgtaaaagccccctgggagggtttcagggctgcctaaggctcatcaccattggtgacaaagcggtggatcccatcttagtacagcagggggcgctggggagtttcagggacctccagatagactcctgcggcatcacagacaggtgcttgcccagctactgtgagcatgggggcgagtgttcccagtcgtgggacaccttctcctgtgactgtctaggcacaggctatacgggcgagacctgccattcctctctctacgagcagtcttgtgaagcccacaagcaccgagggaacccgtctgggctttactatattgatgcagatggaagtggccccctgggaccatttcttgtgtactgcaatatgacagcagacgccgcgtggacggtggtgcagcacggtggccccgacgcggtgaccctccgaggtgcccccagcgggcacccgcgctcggctgtgtccttcgcgtacgcagcgggcgcggggcagctgcggtccgcggtgaacctggcggagcgctgcgagcagcggctggctctgcgctgcgggacggcgcggcgcccggactcacgagatggaaccccactgagctggtgggttggaagaaccaatgaaacacacacttcctggggaggttctctgcctgatgctcaaaagtgtacttgtggattagaggggaactgcattgattctcagtattactgcaactgtgatgctggccggaatgaatggactagtgacacaatagtcctttcccaaaaggagcacctgccagtcactcagattgtgatgacagacgcaggccgaccacattccgaagcagcttatacactggggccactgctctgccgcggagatcagtcattctggaattcagcttccttcaacactgagacttcataccttcatttccctgctttccacggagaactcactgctgacgtgtgcttcttttttaagaccacagtttcctccggggtgtttatggagaacctggggatcacagatttcatcaggattgagctgcgtgctcccacagaagtgaccttttccttcgatgtggggaatggaccttgtgaggtcacggtgcagtcacccactccctttaatgacaatcagtggcaccacgtgagggcagagagaaatgttaaaggagcgtctcttcaagttgatcagcttcctcagaagatgcagcctgcccctgctgatgggcacgttcgtttacagctcaacagccagctcttcattggtggaacggccaccagacagagaggctttctaggatgcattcggtctctgcagttgaacggggtggccctggatctggaagaaagagccacagtgacgccaggagtggagccagggtgtgcaggacactgcagcacctatggacacttgtgtcgcaatggagggagatgcagagagaaacgcaggggggtcacctgtgactgtgccttctcagcctatgatgggccgttctgctccaatgagatttccgcatattttgcaactggctcctcaatgacataccattttcaagaacattacactttaagtgaaaactccagctctctcgtttcttcattacacagagatgtaacattgaccagagaaatgatcacactgagcttccgaaccacacgaactccgagcttattgctgtatgtgagctctttctatgaggaatacctttcagttatcctcgccaacaatggaagtttgcagattaggtacaagctagatagacatcaaaatcctgatgcatttacctttgattttaaaaacatggctgatgggcaacttcaccaagtgaagattaacagagaagaagctgtggtcatggtagaggtaatcccacaaatgcaaaagtcaaactaactaatattattattttaagaacaaataatctaatgaaaaaatttgataatattaatagaagagcaacccattcagtgctgctcttccataagtcaagaagaagccaaatatggccaggatctgggagagaggaggtggttgtttattctgtattgctttgttttgtttgtttagcaatgcaattctgtcaaaggtattattaatattttactatttaaaatatcaaaatatctatttgttttactttactcaataggggaatgttctctagtttatcatagtgactgctggtggaatctattcattgatactgcagtgggaacttgtcttattctgattataaaagaacaaatactttagcaacttaaaaacacggtttaaaagcacacaacatagttattaaaatgggaataagtaagaaaatagacctgagtcaccacagaggaagtaaattacacattgtcatcggcattggaaggaaaatatactgtatagagaacaacaatgcttggttttatgtttcagattttctccacagaatgagtacatatttaagtttaaaacaaccaattccatctttttcatggattctgccaattatagatccttccattatgaagaagagtaaagccagcaagtgggtacatcgtggatagagtggtagctgatggcatcataggaattgcttataaaatagcttctctttctaaatgattaattatttgaaggtggcttcttgagcttttgtaatggtacttaaaagtgatttattttcatctttcctttcctcatcttcctttgcttccttatcattaaaattgtactttctgttgatgtttgcttctcatgggacatctaataggttaaccagagcacaaagaaacaagtcatcttgtcctcagggacagaattcaacgccgtcaaatctctcatattgggaaaggttttaggtaagtaggagaaagagctttttcccaaataagtgtcatgtcacaaactctggaagcattcatcatgctgaaagaagctccttgtcttacttgaataataatttcacagtgagtgacaatcaaggtgcaaactgtactcttgcctgagtgtacatataatcatgactaagtgctacctgtgagatgtgcaagggcgttcctggaaaaatacctccacacttaacctctcacttggcaatcatgcataatgaatcacggtatttttctaatccttcttgaaaagtgaaatgttgtcaaagctgacacgaagttcacagattatgtatgtattaatcaacatcaactccggagaccatcattcaatgataaaactacgtttgagttgaacacaagagaaaaaactggtaatcttattacagcagatgaatacagttttatttttctctcaagccctgctttgcctgttgtttccatcctttttgactttagtatctaacaggaatggggaggcatattcataaatatctgttacgcaaggtagaaagttacagtaattgtctatcatattgtctatcataatctgttgtaaaagcacagttagctttacatttaataaaggaactgaggaaagtaatctttttttaaaaaaacccatcttatgtaactcaattaagaaaatgaactatactttaatattaggatcaaaaagttgaataatatttattatatacatctttgtttccttccaaataaaggaga

SEQ ID NO: 122111 - DNA, 4986 bp, Homo sapiens
  Payload ID: 3939
  Gene Symbol: CNTNAP3
  Gene Name: contactin associated protein-like 3
  ENST ID: ENST00000377656
  CDS Start-End: 240-3863
agaaagctgcggcgcgagtccgcggggccgacctcggagacgcagctggggccgggcgcggcttggcgggagggtctgcagcgccgagggaggctgctggtgcgtgaggaagagagctagagactggacaggggaggcagagcagcgtcagagccgcgcaggggacgggagtgagagcaggagcgacgcagagcggccgtcgccgtgcccgggtctcagggcgcctggctgaagtgagcatggcttcagtggcctgggccgtcctcaaggtgctgctgcttctccccactcagacttggagccccgtgggagcaggaaatccacctgactgtgatgccccactggcctctgccttgcctaggtcatccttcagcagctcctcagagctgtccagcagccacggcccggggttttcaaggcttaatcgaagagatggagctggtggctggactccacttgtgtcaaataaataccaatggctgcaaattgaccttggagagagaatggaggtcactgctgtcgccacccaaggaggatatgggagctctgactgggtgaccagctacctcctgatgttcagtgatggtgggagaaactggaagcagtatcgccgagaagaaagcatctggggttttccaggaaacacaaacgcagacagtgtggtgcactacagactccagcctccctttgaagccaggttcctgcgctttctccctttagcctggaaccctaggggcaggattgggatgcggatcgaagtgtacggatgtgcatataaatctgaggtggtttattttgatggacaaagtgctctgctgtatagacttgataaaaaacctttaaaaccaataagagacgttatttctttgaaatttaaagccatgcagagcaatggaattctacttcacagagaaggacaacatggaaatcacattactctggaattaattaaaggaaagcttgtcttttttcttaattcaggcaatgctaagctgccttccactattgctcctgtgaccctcaccctgggcagcctgctggacgaccagcactggcattccgtcctcatcgagctcctcgacacgcaggtcaacttcaccgtggacaaacacactcatcatttccaagcaaagggagattccagttacttggatcttaattttgagatcagctttgggggaattccgacacccggaagatcgcgggcattcagacgtaaaagctttcatgggtgtttagaaaatctttattataatggagtggatgttaccgaattagccaagaaacacaaaccacagatcctcatgatgggaaatgtgtccttctcatgtccacagccacagactgtccctgtgacttttctgagctccaggagttatctggctctgccaggcaactctggggaggacaaagtgtctgtcacttttcaatttcgaacgtggaacagagcaggacatttgcttttcggcgaacttcgacgtggttcagggagtttcgtcctctttcttaaggatggcaagctcaaactgagtctcttccagccgggacagtcaccaaggaatgtcacagcaggtgctggattaaacgatgggcagtggcactctgtgtccttctctgccaagtggagccatatgaatgtggtggtggacgatgacacagctgttcagcccctggtggctgtgctcattgattcaggtgacacctattattttggaggctgcctggacaacagctctggctctggatgtaaaagccccctgggagggtttcagggctgcctaaggctcatcaccattggtgacaaagcggtggatcccatcttagtacagcagggggcgctggggagtttcagggacctccagatagactcctgcggcatcacagacaggtgcttgcccagctactgtgagcatgggggcgagtgttcccagtcgtgggacaccttctcctgtgactgtctaggcacaggctatacgggcgagacctgccattcctctctctacgagcagtcttgtgaagcccacaagcaccgagggaacccgtctgggctttactatattgatgcagatggaagtggccccctgggaccatttcttgtgtactgcaatatgacagacgccgcgtggacggtggtgcagcacggtggccccgacgcggtgaccctccgaggtgcccccagcgggcacccgcgctcggctgtgtccttcgcgtacgcagcgggcgcggggcagctgcggtccgcggtgaacctggcggagcgctgcgagcagcggctggctctgcgctgcgggacggcgcggcgcccggactcacgagatggaaccccactgagctggtgggttggaagaaccaatgaaacacacacttcctggggaggttctctgcctgatgctcaaaagtgtacttgtggattagaggggaactgcattgattctcagtattactgcaactgtgatgctggccggaatgaatggactagtgacacaatagtcctttcccaaaaggagcacctgccagtcactcagattgtgatgacagacgcaggccgaccacattccgaagcagcttatacactggggccactgctctgccgcggagatcagtcattctggaattcagcttccttcaacactgagacttcataccttcatttccctgctttccacggagaactcactgctgacgtgtgcttcttttttaagaccacagtttcctccggggtgtttatggagaacctggggatcacagatttcatcaggattgagctgcgtgctcccacagaagtgaccttttccttcgatgtggggaatggaccttgtgaggtcacggtgcagtcacccactccctttaatgacaatcagtggcaccacgtgagggcagagagaaatgttaaaggagcgtctcttcaagttgatcagcttcctcagaagatgcagcctgcccctgctgatgggcacgttcgtttacagctcaacagccagctcttcattgagatttccgcatattttgcaactggctcctcaatgacataccattttcaagaacattacactttaagtgaaaactccagctctctcgtttcttcattacacagagatgtaacattgaccagagaaatgatcacactgagcttccgaaccacacgaactccgagcttattgctgtatgtgagctctttctatgaggaatacctttcagttatcctcgccaacaatggaagtttgcagattaggtacaagctagatagacatcaaaatcctgatgcatttacctttgattttaaaaacatggctgatgggcaacttcaccaagtgaagattaacagagaagaagctgtggtcatggtagaggttaaccagagcacaaagaaacaagtcatcttgtcctcagggacagaattcaacgccgtcaaatctctcatattgggaaaggttttagaggctgccggcgcggacccggacacaaggcgggcggcgactagtggcttcactggctgcctctcggcggtgcgcttcggccgcgctgctcccctgaaggcggcgctgcgccccagcggcccctcccgggtcaccgtccgcggccacgtggcccctatggcccgctgcgcagcgggggcggcgtccggctccccggcgcgggaactggctccccgactcgcggggggcgcaggtcgttctggaccagcggatgagggagagcccttggttaatgcagacagaagagactctgctgtcatcggaggtgtgatagcagtggtgatatttattttgctttgcatcactgccatagccatacgcatctatcaacagagaaagttacgcaaagaaaatgagtcaaaagtctcaaaaaaagaagagtgctaggacagctctaaacagtgagctcgatgtgcaaaacgcagtccatgaaaaccagaaagagcgagtcttctgattggcagctgtggctgtctctatcatcgtgactgtggacttccctgctgttgccatcagggtgcacacaagcaggtgcagtgctgtcacctggctgaagacctgcagcctcggagcctctgggaggtccctttctccctcggtgaaacacagtcctccacatcaatttccaaacaatgaattaggtatggccattcatcactgttcagtagtttccccgtccaaaggctctcttccaaaactgcagtttgatctgtgttaataattgtggggttttagatgagaaaatggctataaagctgtggccctactttattttttaaaaatgacagaacttttgttcagatgtaaaagacaaaattgcactttaatgttttttgttacttgaaaacatatctgggatccctttttttggtcctctgctgatatttataaaacaagaaatgcttcttggactaccttcactggcatttccatagtcctggaatccagagccaagtggcctatctaaaattcacagcccttttattctcctgtgtgatggttaatacaacacagttgaagcctggaaacactaccattatttttggtgtattgctttttctaattgactgtttttaatgattttgatacattttaatgttgaaattaatattgaatgttagctatgaaattttagtattgaattttataatggaacagaacattggtaggtaacaagatgcaagaggatgtcaatacaagattgtctgcctgtttttctttgtaatttgtaattacagtttttgtaacttgtgattatgtttttaactaaatttaccaccagatacaaacaatacttcttacacagagttatcctttatttatatcattaagacgtgaatgaaacatcatcctaacttacttccccaagatattgagaggtcatatctgtttttctttatcattcatttctttttctaaaagttgttactgatatgcttttgatttcctatgactctattatgttgtacagaacatcttttcaatttattaaaaaaatagcttaactgaa

SEQ ID NO: 122112 - DNA, 2649 bp, Homo sapiens
  Payload ID: 3939
  Gene Symbol: CNTNAP3
  Gene Name: contactin associated protein-like 3
  ENST ID: ENST00000377659
  CDS Start-End: 240-2477
agaaagctgcggcgcgagtccgcggggccgacctcggagacgcagctggggccgggcgcggcttggcgggagggtctgcagcgccgagggaggctgctggtgcgtgaggaagagagctagagactggacaggggaggcagagcagcgtcagagccgcgcaggggacgggagtgagagcaggagcgacgcagagcggccgtcgccgtgcccgggtctcagggcgcctggctgaagtgagcatggcttcagtggcctgggccgtcctcaaggtgctgctgcttctccccactcagacttggagccccgtgggagcaggaaatccacctgactgtgatgccccactggcctctgccttgcctaggtcatccttcagcagctcctcagagctgtccagcagccacggcccggggttttcaaggcttaatcgaagagatggagctggtggctggactccacttgtgtcaaataaataccaatggctgcaaattgaccttggagagagaatggaggtcactgctgtcgccacccaaggaggatatgggagctctgactgggtgaccagctacctcctgatgttcagtgatggtgggagaaactggaagcagtatcgccgagaagaaagcatctggggttttccaggaaacacaaacgcagacagtgtggtgcactacagactccagcctccctttgaagccaggttcctgcgctttctccctttagcctggaaccctaggggcaggattgggatgcggatcgaagtgtacggatgtgcatataaatctgaggtggtttattttgatggacaaagtgctctgctgtatagacttgataaaaaacctttaaaaccaataagagacgttatttctttgaaatttaaagccatgcagagcaatggaattctacttcacagagaaggacaacatggaaatcacattactctggaattaattaaaggaaagcttgtcttttttcttaattcaggcaatgctaagctgccttccactattgctcctgtgaccctcaccctgggcagcctgctggacgaccagcactggcattccgtcctcatcgagctcctcgacacgcaggtcaacttcaccgtggacaaacacactcatcatttccaagcaaagggagattccagttacttggatcttaattttgagatcagctttgggggaattccgacacccggaagatcgcgggcattcagacgtaaaagctttcatgggtgtttagaaaatctttattataatggagtggatgttaccgaattagccaagaaacacaaaccacagatcctcatgatgggaaatgtgtccttctcatgtccacagccacagactgtccctgtgacttttctgagctccaggagttatctggctctgccaggcaactctggggaggacaaagtgtctgtcacttttcaatttcgaacgtggaacagagcaggacatttgcttttcggcgaacttcgacgtggttcagggagtttcgtcctctttcttaaggatggcaagctcaaactgagtctcttccagccgggacagtcaccaaggaatgtcacagcaggtgctggattaaacgatgggcagtggcactctgtgtccttctctgccaagtggagccatatgaatgtggtggtggacgatgacacagctgttcagcccctggtggctgtgctcattgattcaggtgacacctattattttggaggctgcctggacaacagctctggctctggatgtaaaagccccctgggagggtttcagggctgcctaaggctcatcaccattggtgacaaagcggtggatcccatcttagtacagcagggggcgctggggagtttcagggacctccagatagactcctgcggcatcacagacaggtgcttgcccagctactgtgagcatgggggcgagtgttcccagtcgtgggacaccttctcctgtgactgtctaggcacaggctatacgggcgagacctgccattcctctctctacgagcagtcttgtgaagcccacaagcaccgagggaacccgtctgggctttactatattgatgcagatggaagtggccccctgggaccatttcttgtgtactgcaatatgacagacgccgcgtggacggtggtgcagcacggtggccccgacgcggtgaccctccgaggtgcccccagcgggcacccgcgctcggctgtgtccttcgcgtacgcagcgggcgcggggcagctgcggtccgcggtgaacctggcggagcgctgcgagcagcggctggctctgcgctgcgggacggcgcggcgcccggactcacgagatggaaccccactgagctggtgggttggaagaaccaatgaaacacacacttcctggggaggttctctgcctgatgctcaaaagtgtacttgtggattagaggggaactgcattgattctcagtattactgcaactgtgatgctggccggaatgaatggtgatttccacatgatttccctgcacaaaaatgtggtttttattctttaattatgcatagttaattaaatgtcagacaagctggtacaataaggtaactaaagtatgttcaagcaagctgaaatacaagttttgatgaaatatgatcagttaatctaaggattaaattttatgacc

SEQ ID NO: 122113 - DNA, 2411 bp, Homo sapiens
  Payload ID: 3939
  Gene Symbol: CNTNAP3
  Gene Name: contactin associated protein-like 3
  ENST ID: ENST00000443583
  CDS Start-End: 252-2066
cccgagcgctccagaaagctgcggcgcgagtccgcggggccgacctcggagacgcagctggggccgggcgcggcttggcgggagggtctgcagcgccgagggaggctgctggtgcgtgaggaagagagctagagactggacaggggaggcagagcagcgtcagagccgcgcaggggacgggagtgagagcaggagcgacgcagagcggccgtcgccgtgcccgggtctcagggcgcctggctgaagtgagcatggcttcagtggcctgggccgtcctcaaggtgctgctgcttctccccactcagacttggagccccgtgggagcaggaaatccacctgactgtgatgccccactggcctctgccttgcctaggtcatccttcagcagctcctcagagctgtccagcagccacggcccggggttttcaaggcttaatcgaagagatggagctggtggctggactccacttgtgtcaaataaataccaatggctgcaaattgaccttggagagagaatggaggtcactgctgtcgccacccaaggaggatatgggagctctgactgggtgaccagctacctcctgatgttcagtgatggtgggagaaactggaagcagtatcgccgagaagaaagcatctggggttttccaggaaacacaaacgcagacagtgtggtgcactacagactccagcctccctttgaagccaggttcctgcgctttctccctttagcctggaaccctaggggcaggattgggatgcggatcgaagtgtacggatgtgcatataaatctgaggtggtttattttgatggacaaagtgctctgctgtatagacttgataaaaaacctttaaaaccaataagagacgttatttctttgaaatttaaagccatgcagagcaatggaattctacttcacagagaaggacaacatggaaatcacattactctggaattaattaaaggaaagcttgtcttttttcttaattcaggcaatgctaagctgccttccactattgctcctgtgaccctcaccctgggcagcctgctggacgaccagcactggcattccgtcctcatcgagctcctcgacacgcaggtcaacttcaccgtggacaaacacactcatcatttccaagcaaagggagattccagttacttggatcttaattttgagatcagctttgggggaattccgacacccggaagatcgcgggcattcagacgtaaaagctttcatgggtgtttagaaaatctttattataatggagtggatgttaccgaattagccaagaaacacaaaccacagatcctcatgatgggaaatgtgtccttctcatgtccacagccacagactgtccctgtgacttttctgagctccaggagttatctggctctgccaggcaactctggggaggacaaagtgtctgtcacttttcaatttcgaacgtggaacagagcaggacatttgcttttcggcgaacttcgacgtggttcagggagtttcgtcctctttcttaaggatggcaagctcaaactgagtctcttccagccgggacagtcaccaaggaatgtcacagcaggtgctggattaaacgatgggcagtggcactctgtgtccttctctgccaagtggagccatatgaatgtggtggtggacgatgacacagctgttcagcccctggtggctgtgctcattgattcaggtgacacctattattttggagctctctacgagcagtcttgtgaagcccacaagcaccgagggaacccgtctgggctttactatattgatgcagatggaagtggccccctgggaccatttcttgtgtactgcaatatgacagacgccgcgtggacggtggtgcagcacggtggccccgacgcggtgaccctccgaggtgcccccagcgggcacccgcgctcggctgtgtccttcgcgtacgcagcgggcgcggggcagctgcggtccgcggtgaacctggcggagcgctgcgagcagcggctggctctgcgctgcgggacggcgcggcgcccggactcacgaggactagtgacacaatagtcctttcccaaaaggagcacctgccagtcactcagattgtgatgacagacgcaggccgaccacattccgaagcagcttatacactggggccactgctctgccgcggagatcagtcattctggaattcagcttccttcaacactgagacttcataccttcatttccctgctttccacggagaactcactgctgacgtgtgcttcttttttaagaccacagtttcctccggggtgtttatggagaacctggggatcacagatttcatcaggattgagctgcgtggtaagctcgccactctggacaagtcacagggtacccattatttagcaataaaagctttaactc

SEQ ID NO: 122114 - DNA, 3240 bp, Homo sapiens
  Payload ID: 3940
  Gene Symbol: CNTNAP3B
  Gene Name: contactin associated protein-like 3B
  Uniprot ID: Q96NU0
  ENST ID: ENST00000276974
  CDS Start-End: 417-1559
tgggagagagggacggaggaagctgccggtataacgggaggagagcgccaggcggagctggggcgtccctcccgctcgcttcttgactcgcgttggtgccggccgcctcccgcgcctagtgtccgggacgcgcctgaacctgccgcctccgtgcctggggcggcgccgcgcggcccccaggctcccgcggggccgacctcggagacgcagctggggccgggcgcggcttggcgggagggtctgcagcgccgagggaggctgccagtgcgtgaggaagagagctagagactggacaggggagacagagcagcgtcggagccgcgcaggggacgggagtgagagcgggagtgagagcaggaacgacgcagagcggccgtcgccgtgcccgggtctcagggcgcctggctgaagtgagcatggcttcagtggcctgggccgtcctcaaggtgctgctgcttctccccactcagacttggagccccgtaggagcaggaaatccacctgactgtgattccccactggcctctgccttgcctaggtcatccttcagcagctcctcagagctgtccagcagccacggcccggggttttcaaggcttaatcgaagagatggagctggtggctggaccccacttgtgtcaaataaataccaatggctgcaaattgaccttggagagagaatggaggtcactgctgtcgccacccaaggaggatatgggagctctgactgggtgaccagctacctcctgatgttcagtgatggtgggagaaactggaagcagtatcgccgagaagaaagcatctggggttttccaggaaacacaaacgcagacagtgtggtgcactacagactccagcctccctttgaagccaggttcctgcgctttctccctttagcctggaaccccaggggcaggattgggatgcggatcgaagtgtacggatgtgcatataaatctgaggtggtttattttgatggacaaagtgctctgctgtatacacttgataaaaaacctttaaaaccaataagagatgttatttctttgaaatttaaagccatgcagagcaatggaattctacttcacagagaaggacaacatggaaatcacattactctggaattaattaaaggaaagcttgtcttttttcttaattcaggcaatgctaagctgccttctactattgctcctgtgaccctcaccctgggcagcctgctggatgaccagcactggcattccgtcctcatcgagctcctcgacacgcaggtcaacttcaccgtggacaaacacactcatcatttccaagcaaagggagattccagtaacttggatcttaattttgagatcagctttgggggaattctgtcacccggaagatcacgggcattcacacgtaaaagctttcatgggtgtttagaaaatctttattataatggagtggatgttaccgaattagccaagaaacacaaaccacagatcctcatgatggagttggctcatgggttgcaggaccaaaacctgaaaatatctctgactgtgtgtcaccagaccacacaatgaatacatcacttaggttagcatgagaaaaggggaaaaacagctgtgaagcccatgaactttccaagaaggtaaaggagaaaaaaaaaaaaaagttgggtttgaagtctaagttttactatgaacagcaccctgctgagatcataaaaatgaaaaataccatcaagatacatgaaaaaggaaacaccaaagggaagagtgataacaaggctccacagagcgcagtttcctttgacaagatgaaaaagaaatgaaaagaggaaggagataaatggaacagccctctacctaaagtttctgtccatggagaaactgacatttaagtgctgctcaacaggaaaaagaaaaaagacctggttattgaagttggctttgttggagatgcgttactcagatacagatacaaagatgggtttggccaatgggcatccgtgtcaagaagcctgacctaacacgttctgaatattaagctaccttttatctgccagtccttggtgttcagaagaatccctcctcctcaccctaacttctatggggctatttccaaagacactgtcattgaagtgaggaagagtgagttgggccttatgacacaaagagacaagactatttgaggacaatagacacaggttttcatatacattccatgttattctgaattactgatgggttcgctgatggaattattgagtatagccaataaggagaaccacagttaagctggtgtctctgggttctggatatcatcctcaagaaaactatttactaattacattgaatgaggttattaaaatgtgtaagtttcacacaaaaacaaaaagacaattcattccaaattgtgcatatggatatataatgttaattatgggaattccattttaagaattactacaattctatgtgttctgtataaaaacaggaaaatagttgttccaatatataaaaggaaaacatttaaaaatgtattttcttgggaaaatcagctgccagaattcattagtcaactaacaagcactcctctgtggcaagaagccctgcttctctgttgtagcaggcagctacccacctaaatgatgaggtcaagaaatatacagctgataaaaagataaaaaatatgtaatagtccagtgattacatgtgtactacggatcagcgccaattagttgtaagcttttggtatttagttcgttacagcaaatgttttcttttttaaattttcttctgcaaatgttttcttgtcatgaaaagtgttttccgtttagcagaattacaaaaatagtcaagaagaaatgttctgattgatgtatacagttagaatgtgtattaaagattattataaaatgataactgaattatatccatttctaaagtatgttgggacaaaattttttaaaaatgtgattctgttttgaaaattgttttaccactggatcagtgtggttcttaaacttggctttatcttggagtcaccagaggagattcaaaagatacctttacctggctccacctccagagatcgggattttaaatggtctgtatctggattttaagagcccttctggtgattcgactgtttagctaggtttgagagccactaccctagatgagctgtcctgctccagtaacattctttttctaaaatcttttatagtatattagaaataaatccatggaaattccaagt

SEQ ID NO: 122115 - DNA, 2426 bp, Homo sapiens
  Payload ID: 3940
  Gene Symbol: CNTNAP3B
  Gene Name: contactin associated protein-like 3B
  ENST ID: ENST00000479351
  CDS Start-End: 264-2081
cctggggcggcgccgcgcggcccccaggctcccgcggggccgacctcggagacgcagctggggccgggcgcggcttggcgggagggtctgcagcgccgagggaggctgccagtgcgtgaggaagagagctagagactggacaggggagacagagcagcgtcggagccgcgcaggggacgggagtgagagcgggagtgagagcaggaacgacgcagagcggccgtcgccgtgcccgggtctcagggcgcctggctgaagtgagcatggcttcagtggcctgggccgtcctcaaggtgctgctgcttctccccactcagacttggagccccgtaggagcaggaaatccacctgactgtgattccccactggcctctgccttgcctaggtcatccttcagcagctcctcagagctgtccagcagccacggcccggggttttcaaggcttaatcgaagagatggagctggtggctggaccccacttgtgtcaaataaataccaatggctgcaaattgaccttggagagagaatggaggtcactgctgtcgccacccaaggaggatatgggagctctgactgggtgaccagctacctcctgatgttcagtgatggtgggagaaactggaagcagtatcgccgagaagaaagcatctggggttttccaggaaacacaaacgcagacagtgtggtgcactacagactccagcctccctttgaagccaggttcctgcgctttctccctttagcctggaaccccaggggcaggattgggatgcggatcgaagtgtacggatgtgcatataaatctgaggtggtttattttgatggacaaagtgctctgctgtatacacttgataaaaaacctttaaaaccaataagagatgttatttctttgaaatttaaagccatgcagagcaatggaattctacttcacagagaaggacaacatggaaatcacattactctggaattaattaaaggaaagcttgtcttttttcttaattcaggcaatgctaagctgccttctactattgctcctgtgaccctcaccctgggcagcctgctggatgaccagcactggcattccgtcctcatcgagctcctcgacacgcaggtcaacttcaccgtggacaaacacactcatcatttccaagcaaagggagattccagtaacttggatcttaattttgagatcagctttgggggaattctgtcacccggaagatcacgggcattcacacgtaaaagctttcatgggtgtttagaaaatctttattataatggagtggatgttaccgaattagccaagaaacacaaaccacagatcctcatgatgggaaatgtgtccttctcatgtccacagccacagactgtccctgtgacttttctgagctccaggagttatctggctctgccaggcaactctggggaggacaaagtgtctgtcacttttcaatttcgaacgtggaacagagcaggacatttgcttttcggcgaacttcaacgtggttcagggagtttcgtcctctttcttaaggatggcaagctcaaactgagtctcttccaggcgggacagtcaccaaggaatgtcacagcaggtgctggattaaacgatgggcagtggcactctgtatccttctctgccaagtggagccatatgaatgtggtggtggatgatgacacagctgttcagcccctggtggctgtgctcattgattcaggtgacacctattattttggagctctctacgagcagtcttgtgaagcccacaagcaccgagggaacccatccgggctttactatattgatgcagatggaagtggccccctgggaccatttcttgtgtactgcaatatgacagcagactccgcgtggacggtggtgcggcacggtggccccgacgcggtgaccctccgaggtgcccccagcgggcacccgctctcggctgtgtccttcgcgtacgcagcgggcgcggggcagctgcgggccgcggtgaacctggcggagcgctgcgagcagcggctggctctgcgctgcgggacagcgcggcgcccggactcacgaggactagtgacacaatagtcctttcccaaaaggagcacctcccagtcactcagattgtgatgacagacacaggccaaccacattccgaagcagattatacactggggccactgctctgccgcggagataagtcattttggaattcagcttccttcaacactgagacttcataccttcatttccctgctttccacggagaactcactgctgacgtgtgcttcttttttaagaccacagtttcctctggggtgtttatggagaacctggggatcacagacttcatcaggattgagctgcggggtaggctggccactctggacaagtcacagggtacccattatttagcaataaaagctttaactc

SEQ ID NO: 122116 - DNA, 2170 bp, Homo sapiens
  Payload ID: 3940
  Gene Symbol: CNTNAP3B
  Gene Name: contactin associated protein-like 3B
  ENST ID: ENST00000617422
  CDS Start-End: 32-1990
ccgggtctcagggcgcctggctgaagtgagcatggcttcagtggcctgggccgtcctcaaggtgctgctgcttctccccactcagacttggagccccgtaggagcaggaaatccacctgactgtgattccccactggcctctgccttgcctaggtcatccttcagcagctcctcagagctgtccagcagccacggcccggggttttcaaggcttaatcgaagagatggagctggtggctggaccccacttgtgtcaaataaataccaatggctgcaaattgaccttggagagagaatggaggtcactgctgtcgccacccaaggaggatatgggagctctgactgggtgaccagctacctcctgatgttcagtgatggtgggagaaactggaagcagtatcgccgagaagaaagcatctggggttttccaggaaacacaaacgcagacagtgtggtgcactacagactccagcctccctttgaagccaggttcctgcgctttctccctttagcctggaaccccaggggcaggattgggatgcggatcgaagtgtacggatgtgcatataaatctgaggtggtttattttgatggacaaagtgctctgctgtatacacttgataaaaaacctttaaaaccaataagagatgttatttctttgaaatttaaagccatgcagagcaatggaattctacttcacagagaaggacaacatggaaatcacattactctggaattaattaaaggaaagcttgtcttttttcttaattcaggcaatgctaagctgccttctactattgctcctgtgaccctcaccctgggcagcctgctggatgaccagcactggcattccgtcctcatcgagctcctcgacacgcaggtcaacttcaccgtggacaaacacactcatcatttccaagcaaagggagattccagtaacttggatcttaattttgagatcagctttgggggaattctgtcacccggaagatcacgggcattcacacgtaaaagctttcatgggtgtttagaaaatctttattataatggagtggatgttaccgaattagccaagaaacacaaaccacagatcctcatgatgggaaatgtgtccttctcatgtccacagccacagactgtccctgtgacttttctgagctccaggagttatctggctctgccaggcaactctggggaggacaaagtgtctgtcacttttcaatttcgaacgtggaacagagcaggacatttgcttttcggcgaacttcaacgtggttcagggagtttcgtcctctttcttaaggatggcaagctcaaactgagtctcttccaggcgggacagtcaccaaggaatgtcacagcaggtgctggattaaacgatgggcagtggcactctgtatccttctctgccaagtggagccatatgaatgtggtggtggatgatgacacagctgttcagcccctggtggctgtgctcattgattcaggtgacacctattattttggagctctctacgagcagtcttgtgaagcccacaagcaccgagggaacccatccgggctttactatattgatgcagatggaagtggccccctgggaccatttcttgtgtactgcaatatgacagactccgcgtggacggtggtgcggcacggtggccccgacgcggtgaccctccgaggtgcccccagcgggcacccgctctcggctgtgtccttcgcgtacgcagcgggcgcggggcagctgcgggccgcggtgaacctggcggagcgctgcgagcagcggctggctctgcgctgcgggacagcgcggcgcccggactcacgagatggaaccccactgagctggtgggttggaagaaccaatgaaacacacacttcctggggaggttctctgcctgatgctcaaaagtgtacttgtggattagaggggaactgcattgattctcagtattactgcaactgtgatgctggccagaatgaatggtgatttccacatgatttccctgcacaaaaatgtggtttttattctttaattatgcatagttaattaaatgtcagacaagctggtacaataaggtaactagattaaagtatgttcaagcaagctgaaatacaagttttgatgaaatatgatcagttaatctaaggattaaattttatgaccaaa

SEQ ID NO: 122117 - DNA, 5379 bp, Homo sapiens
  Payload ID: 3940
  Gene Symbol: CNTNAP3B
  Gene Name: contactin associated protein-like 3B
  ENST ID: ENST00000377561
  CDS Start-End: 394-4260
tgccggtataacgggaggagagcgccaggcggagctggggcgtccctcccgctcgcttcttgactcgcgttggtgccggccgcctcccgcgcctagtgtccgggacgcgcctgaacctgccgcctccgtgcctggggcggcgccgcgcggcccccaggctcccgcggggccgacctcggagacgcagctggggccgggcgcggcttggcgggagggtctgcagcgccgagggaggctgccagtgcgtgaggaagagagctagagactggacaggggagacagagcagcgtcggagccgcgcaggggacgggagtgagagcgggagtgagagcaggaacgacgcagagcggccgtcgccgtgcccgggtctcagggcgcctggctgaagtgagcatggcttcagtggcctgggccgtcctcaaggtgctgctgcttctccccactcagacttggagccccgtaggagcaggaaatccacctgactgtgattccccactggcctctgccttgcctaggtcatccttcagcagctcctcagagctgtccagcagccacggcccggggttttcaaggcttaatcgaagagatggagctggtggctggaccccacttgtgtcaaataaataccaatggctgcaaattgaccttggagagagaatggaggtcactgctgtcgccacccaaggaggatatgggagctctgactgggtgaccagctacctcctgatgttcagtgatggtgggagaaactggaagcagtatcgccgagaagaaagcatctggggttttccaggaaacacaaacgcagacagtgtggtgcactacagactccagcctccctttgaagccaggttcctgcgctttctccctttagcctggaaccccaggggcaggattgggatgcggatcgaagtgtacggatgtgcatataaatctgaggtggtttattttgatggacaaagtgctctgctgtatacacttgataaaaaacctttaaaaccaataagagatgttatttctttgaaatttaaagccatgcagagcaatggaattctacttcacagagaaggacaacatggaaatcacattactctggaattaattaaaggaaagcttgtcttttttcttaattcaggcaatgctaagctgccttctactattgctcctgtgaccctcaccctgggcagcctgctggatgaccagcactggcattccgtcctcatcgagctcctcgacacgcaggtcaacttcaccgtggacaaacacactcatcatttccaagcaaagggagattccagtaacttggatcttaattttgagatcagctttgggggaattctgtcacccggaagatcacgggcattcacacgtaaaagctttcatgggtgtttagaaaatctttattataatggagtggatgttaccgaattagccaagaaacacaaaccacagatcctcatgatgggaaatgtgtccttctcatgtccacagccacagactgtccctgtgacttttctgagctccaggagttatctggctctgccaggcaactctggggaggacaaagtgtctgtcacttttcaatttcgaacgtggaacagagcaggacatttgcttttcggcgaacttcaacgtggttcagggagtttcgtcctctttcttaaggatggcaagctcaaactgagtctcttccaggcgggacagtcaccaaggaatgtcacagcaggtgctggattaaacgatgggcagtggcactctgtatccttctctgccaagtggagccatatgaatgtggtggtggatgatgacacagctgttcagcccctggtggctgtgctcattgattcaggtgacacctattattttggaggctgcctgggcaacagctctggctctggatgtaaaagccccctgggagggtttcagggctgcctaaggctcatcaccattggtgacaaagcggtggatcccatcttagtacagcagggggcgctggggagtttcagggacctccagatagactcctgcggcatcacagacaggtgcttgcccagctactgtgagcatgggggcgagtgttcccagtcgtgggacaccttctcctgtgactgtctaggcacaggctatacgggcgagacctgccattcctctctctacgagcagtcttgtgaagcccacaagcaccgagggaacccatccgggctttactatattgatgcagatggaagtggccccctgggaccatttcttgtgtactgcaatatgacagcagactccgcgtggacggtggtgcggcacggtggccccgacgcggtgaccctccgaggtgcccccagcgggcacccgctctcggctgtgtccttcgcgtacgcagcgggcgcggggcagctgcgggccgcggtgaacctggcggagcgctgcgagcagcggctggctctgcgctgcgggacagcgcggcgcccggactcacgagatggaaccccactgagctggtgggttggaagaaccaatgaaacacacacttcctggggaggttctctgcctgatgctcaaaagtgtacttgtggattagaggggaactgcattgattctcagtattactgcaactgtgatgctggccagaatgaatggactagtgacacaatagtcctttcccaaaaggagcacctcccagtcactcagattgtgatgacagacacaggccaaccacattccgaagcagattatacactggggccactgctctgccgcggagataagtcattttggaattcagcttccttcaacactgagacttcataccttcatttccctgctttccacggagaactcactgctgacgtgtgcttcttttttaagaccacagtttcctctggggtgtttatggagaacctggggatcacagacttcatcaggattgagctgcgggctcccacagaagtgacattttccttcgatgtggggaatggaccttgtgaggtcacggtgcagtcacccactccctttaatgacaatcagtggcaccacgtgagggcagagagaaatgttaaaggagcgtctcttcaagttgatcagcttcctcagaagatgcagcctgcccctgctgatgggcacgttcgtttacagctcaacagccagctcttcattggtggaacggccaccagacagagaggctttctaggatgcattcggtctctgcagttgaacggggtggccctggatctggaagaaagagccacagtgacgccaggagtggagccagggtgtgcaggacactgcagcacctatggacacttgtgtcgcaatggagggagatgcagagagaaacgcaggggggtcacctgtgactgtgccttctcagcctatgatggaccgttctgctccaatgagatttccgcatatttcgcaactggctcctcaatgacataccattttcaagaacattacactttaagtgaaaactccagctctctcgtttcttcattacacagagatgtaacattgaccagagaaatgatcacactgagcttccgaaccacacgaactccgagcttattgctgtatgtgagctctttctatgaggaatacctttcagttatcctcgccaacaatggaagtttgcagattaggtacaagctagatagacatcaaaatcctgatgcatttacctttgattttaaaaacatggctgatgggcaacttcaccaagtgaagattaacagagaagaagccgtggtcatggtagaggttaaccagagcgcaaagaaacaagtcatcttgtcctcagggacagaattcaacgccgtcaaatctctcatattgggaaaggttttagaggctgccggcgcggacccggacacaaggcgggcggcgactagtggcttcactggctgcctctcggcggtgcgcttcggctgcgctgctcccctgaaggcggcgctgcgccccagcggcccctcccgggtcaccgtccgcggccacgtggcccctatggcccgctgcgcggcgggggcggcgtccggctccccggcgcgggaactggctccccgactcgcggggggcgcaggtcgttctggaccagtggatgagggagagcccttggttaatgcagacagaagagactctgctgtcatcggaggtgtgatagcagtggagatatttattttgctttgcatcactgccatagccatacgcatctatcaacagagaaagttacgcaaagaaaatgagtcaaaagtctcaaaaaaagaagagtgctaggacagctctaaacagtgagctcgatgtgcaaaacgcagtccatgaaaaccagaaagagtgagtcttctgattggcagctgtggctgtctctatcatcgtgactgtggacttccctgctgttgccatcagggtgcacacagcaggtgcagtgctgtcacctggctgaagatctgcagcctcagagcctctgggaggtccctttctccctcggtgaaacacagtcctccacatcaatttccaaacaatgaattaggtatggccattcatcactgttcagtagtttccccgtccaaaggctctcttccaaaactgcagtttgatctgtgttaataattgtggggttttagatgagaaaatgactataaagctgtggccctactttattttttaaaaatgacagaacttttgttcagatgtaaaagacaaaattgcactttaatgttttttgttacttgaaaacatatctgggatccctttttttggtcctctgctgatattataaaacaagaaatgcttcttggactaccttcactggcatttccatagtcctggaatccagagccaagtggcctatctaaaattcacagcccttttattctcctgtgtgatggttaatacaacacagttgaagcctggaaacactaccattatttttggtgtattgctttttctaattgactgtttttaatgattttgatacattttaatgttgaaattaatattgaatgttagctatgaaattttagtattgaattttataatggaacagaacattggtaggtaacaagatgcaagaggatgtcaatacaagattgtctgcctgtttttctttgtaatttgtaattacagtttttgtaacttgtgattatgtttttaactaaatttaccaccagatacaaacactacttcttacacagagttatcctttatttatatcattaagacgtgaatgaaacatcatcctaacttacttccccaagatattgagaggtcatatctgtttttcatcattcatttctttttctaaaagttgttactgatatgcttttgatttcctatgactctattatgttgtacagaacatcttttcaatttattaaaaaaaatagcttaactgaa

SEQ ID NO: 122118 - DNA, 2666 bp, Homo sapiens
  Payload ID: 3940
  Gene Symbol: CNTNAP3B
  Gene Name: contactin associated protein-like 3B
  ENST ID: ENST00000341990
  CDS Start-End: 252-2489
ccgcgcggcccccaggctcccgcggggccgacctcggagacgcagctggggccgggcgcggcttggcgggagggtctgcagcgccgagggaggctgccagtgcgtgaggaagagagctagagactggacaggggagacagagcagcgtcggagccgcgcaggggacgggagtgagagcgggagtgagagcaggaacgacgcagagcggccgtcgccgtgcccgggtctcagggcgcctggctgaagtgagcatggcttcagtggcctgggccgtcctcaaggtgctgctgcttctccccactcagacttggagccccgtaggagcaggaaatccacctgactgtgattccccactggcctctgccttgcctaggtcatccttcagcagctcctcagagctgtccagcagccacggcccggggttttcaaggcttaatcgaagagatggagctggtggctggaccccacttgtgtcaaataaataccaatggctgcaaattgaccttggagagagaatggaggtcactgctgtcgccacccaaggaggatatgggagctctgactgggtgaccagctacctcctgatgttcagtgatggtgggagaaactggaagcagtatcgccgagaagaaagcatctggggttttccaggaaacacaaacgcagacagtgtggtgcactacagactccagcctccctttgaagccaggttcctgcgctttctccctttagcctggaaccccaggggcaggattgggatgcggatcgaagtgtacggatgtgcatataaatctgaggtggtttattttgatggacaaagtgctctgctgtatacacttgataaaaaacctttaaaaccaataagagatgttatttctttgaaatttaaagccatgcagagcaatggaattctacttcacagagaaggacaacatggaaatcacattactctggaattaattaaaggaaagcttgtcttttttcttaattcaggcaatgctaagctgccttctactattgctcctgtgaccctcaccctgggcagcctgctggatgaccagcactggcattccgtcctcatcgagctcctcgacacgcaggtcaacttcaccgtggacaaacacactcatcatttccaagcaaagggagattccagtaacttggatcttaattttgagatcagctttgggggaattctgtcacccggaagatcacgggcattcacacgtaaaagctttcatgggtgtttagaaaatctttattataatggagtggatgttaccgaattagccaagaaacacaaaccacagatcctcatgatgggaaatgtgtccttctcatgtccacagccacagactgtccctgtgacttttctgagctccaggagttatctggctctgccaggcaactctggggaggacaaagtgtctgtcacttttcaatttcgaacgtggaacagagcaggacatttgcttttcggcgaacttcaacgtggttcagggagtttcgtcctctttcttaaggatggcaagctcaaactgagtctcttccaggcgggacagtcaccaaggaatgtcacagcaggtgctggattaaacgatgggcagtggcactctgtatccttctctgccaagtggagccatatgaatgtggtggtggatgatgacacagctgttcagcccctggtggctgtgctcattgattcaggtgacacctattattttggaggctgcctgggcaacagctctggctctggatgtaaaagccccctgggagggtttcagggctgcctaaggctcatcaccattggtgacaaagcggtggatcccatcttagtacagcagggggcgctggggagtttcagggacctccagatagactcctgcggcatcacagacaggtgcttgcccagctactgtgagcatgggggcgagtgttcccagtcgtgggacaccttctcctgtgactgtctaggcacaggctatacgggcgagacctgccattcctctctctacgagcagtcttgtgaagcccacaagcaccgagggaacccatccgggctttactatattgatgcagatggaagtggccccctgggaccatttcttgtgtactgcaatatgacagactccgcgtggacggtggtgcggcacggtggccccgacgcggtgaccctccgaggtgcccccagcgggcacccgctctcggctgtgtccttcgcgtacgcagcgggcgcggggcagctgcgggccgcggtgaacctggcggagcgctgcgagcagcggctggctctgcgctgcgggacagcgcggcgcccggactcacgagatggaaccccactgagctggtgggttggaagaaccaatgaaacacacacttcctggggaggttctctgcctgatgctcaaaagtgtacttgtggattagaggggaactgcattgattctcagtattactgcaactgtgatgctggccagaatgaatggtgatttccacatgatttccctgcacaaaaatgtggtttttattctttaattatgcatagttaattaaatgtcagacaagctggtacaataaggtaactagattaaagtatgttcaagcaagctgaaatacaagttttgatgaaatatgatcagttaatctaaggattaaattttatgacc

SEQ ID NO: 122119 - DNA, 3840 bp, Homo sapiens
  Payload ID: 3940
  Gene Symbol: CNTNAP3B
  Gene Name: contactin associated protein-like 3B
  ENST ID: ENST00000619138
  CDS Start-End: 157-3057
gccagtgcgtgaggaagagagctagagactggacaggggagacagagcagcgtcggagccgcgcaggggacgggagtgagagcgggagtgagagcaggaacgacgcagagcggccgtcgccgtgcccgggtctcagggcgcctggctgaagtgagcatggcttcagtggcctgggccgtcctcaaggtgctgctgcttctccccactcagacttggagccccgtaggagcaggaaatccacctgactgtgattccccactggcctctgccttgcctaggtcatccttcagcagctcctcagagctgtccagcagccacggcccggggttttcaaggcttaatcgaagagatggagctggtggctggaccccacttgtgtcaaataaataccaatggctgcaaattgaccttggagagagaatggaggtcactgctgtcgccacccaaggaggatatgggagctctgactgggtgaccagctacctcctgatgttcagtgatggtgggagaaactggaagcagtatcgccgagaagaaagcatctggggttttccaggaaacacaaacgcagacagtgtggtgcactacagactccagcctccctttgaagccaggttcctgcgctttctccctttagcctggaaccccaggggcaggattgggatgcggatcgaagtgtacggatgtgcatataaatctgaggtggtttattttgatggacaaagtgctctgctgtatacacttgataaaaaacctttaaaaccaataagagatgttatttctttgaaatttaaagccatgcagagcaatggaattctacttcacagagaaggacaacatggaaatcacattactctggaattaattaaaggaaagcttgtcttttttcttaattcaggcaatgctaagctgccttctactattgctcctgtgaccctcaccctgggcagcctgctggatgaccagcactggcattccgtcctcatcgagctcctcgacacgcaggtcaacttcaccgtggacaaacacactcatcatttccaagcaaagggagattccagtaacttggatcttaattttgagatcagctttgggggaattctgtcacccggaagatcacgggcattcacacgtaaaagctttcatgggtgtttagaaaatctttattataatggagtggatgttaccgaattagccaagaaacacaaaccacagatcctcatgatgggaaatgtgtccttctcatgtccacagccacagactgtccctgtgacttttctgagctccaggagttatctggctctgccaggcaactctggggaggacaaagtgtctgtcacttttcaatttcgaacgtggaacagagcaggacatttgcttttcggcgaacttcaacgtggttcagggagtttcgtcctctttcttaaggatggcaagctcaaactgagtctcttccaggcgggacagtcaccaaggaatgtcacagcaggtgctggattaaacgatgggcagtggcactctgtatccttctctgccaagtggagccatatgaatgtggtggtggatgatgacacagctgttcagcccctggtggctgtgctcattgattcaggtgacacctattattttggagctctctacgagcagtcttgtgaagcccacaagcaccgagggaacccatccgggctttactatattgatgcagatggaagtggccccctgggaccatttcttgtgtactgcaatatgacagactccgcgtggacggtggtgcggcacggtggccccgacgcggtgaccctccgaggtgcccccagcgggcacccgctctcggctgtgtccttcgcgtacgcagcgggcgcggggcagctgcgggccgcggtgaacctggcggagcgctgcgagcagcggctggctctgcgctgcgggacagcgcggcgcccggactcacgagatggaaccccactgagctggtgggttggaagaaccaatgaaacacacacttcctggggaggttctctgcctgatgctcaaaagtgtacttgtggattagaggggaactgcattgattctcagtattactgcaactgtgatgctggccagaatgaatggactagtgacacaatagtcctttcccaaaaggagcacctcccagtcactcagattgtgatgacagacacaggccaaccacattccgaagcagattatacactggggccactgctctgccgcggagataagtcattttggaattcagcttccttcaacactgagacttcataccttcatttccctgctttccacggagaactcactgctgacgtgtgcttcttttttaagaccacagtttcctctggggtgtttatggagaacctggggatcacagacttcatcaggattgagctgcgggctcccacagaagtgacattttccttcgatgtggggaatggaccttgtgaggtcacggtgcagtcacccactccctttaatgacaatcagtggcaccacgtgagggcagagagaaatgttaaaggagcgtctcttcaagttgatcagcttcctcagaagatgcagcctgcccctgctgatgggcacgttcgtttacagctcaacagccagctcttcattggtggaacggccaccagacagagaggctttctaggatgcattcggtctctgcagttgaacggggtggccctggatctggaagaaagagccacagtgacgccaggagtggagccagggtgtgcaggacactgcagcacctatggacacttgtgtcgcaatggagggagatgcagagagaaacgcaggggggtcacctgtgactgtgccttctcagcctatgatggaccgttctgctccaatgagatttccgcatatttcgcaactggctcctcaatgacataccattttcaagaacattacactttaagtgaaaactccagctctctcgtttcttcattacacagagatgtaacattgaccagagaaatgatcacactgagcttccgaaccacacgaactccgagcttattgctgaagtttgcagattaggtacaagctagatagacatcaaaatcctgatgcatttacctttgattttaaaaacatggctgatgggcaacttcaccaagtgaagattaacagagaagaagccgtggtcatggtagaggttaaccagagcgcaaagaaacaagtcatcttgtcctcagggacagaattcaacgccgtcaaatctctcatattgggaaaggttttagaggctgccggcgcggacccggacacaaggcgggcggcgactagtggcttcactggctgcctctcggcggtgcgcttcggctgcgctgctcccctgaaggcggcgctgcgccccagcggcccctcccgggtcaccgtccgcggccacgtggcccctatggcccgctgcgcggcgggggcggcgtccggctccccggcgcgggaactggctccccgactcgcggggggcgcaggtcgttctggaccagtggatgagggagagcccttggttaatgcagacagaagagactctgctgtcatcggaggtgtgatagcagtggagatatttattttgctttgcatcactgccatagccatacgcatctatcaacagagaaagttacgcaaagaaaatgagtcaaaagtctcaaaaaaagaagagtgctaggacagctctaaacagtgagctcgatgtgcaaaacgcagtccatgaaaaccagaaagagtgagtcttctgattggcagctgtggctgtctctatcatcgtgactgtggacttccctgctgttgccatcagggtgcacacagcaggtgcagtgc

SEQ ID NO: 122120 - DNA, 2643 bp, Homo sapiens
  Payload ID: 3940
  Gene Symbol: CNTNAP3B
  Gene Name: contactin associated protein-like 3B
  ENST ID: ENST00000476961
  CDS Start-End: 1-541
cagagatgtaacattgaccagagaaatgatcacactgagcttccgaaccacacgaactccgagcttattgctgtatgtgagctctttctatgaggaatacctttcagttatcctcgccaacaatggaagtttgcagattaggtacaagctagatagacatcaaaatcctgatgcatttacctttgattttaaaaacatggctgatgggcaacttcaccaagtgaagattaacagagaagaagccgtggtcatggtagaggttaaccagagcgcaaagaaacaagtcatcttgtcctcagggacagaattcaacgccgtcaaatctctcatattgggaaaggttttaggtcgttctggaccagtggatgagggagagcccttggttaatgcagacagaagagactctgctgtcatcggaggtgtgatagcagtggagatatttattttgctttgcatcactgccatagccatacgcatctatcaacagagaaagttacgcaaagaaaatgagtcaaaagtctcaaaaaaagaagagtgctaggacagctctaaacagtgagctcgatgtgcaaaacgcagtccatgaaaaccagaaagagtgagtcttctgattggcagctgtggctgtctctatcatcgtgactgtggacttccctgctgttgccatcagggtgcacacagcaggtgcagtgctgtcacctggctgaagatctgcagcctcagagcctctgggaggtccctttctccctcggtgaaacacagtcctccacatcaatttccaaacaatgaattaggtatggccattcatcactgttcagtagtttccccgtccaaaggctctcttccaaaactgcagtttgatctgtgttaataattgtggggttttagatgagaaaatgactataaagctgtggccctactttattttttaaaaatgacagaacttttgttcagatgtaaaagacaaaattgcactttaatgttttttgttacttgaaaacatatctgggatccctttttttggtcctctgctgatattataaaacaagaaatgcttcttggactaccttcactggcatttccatagtcctggaatccagagccaagtggcctatctaaaattcacagcccttttattctcctgtgtgatggttaatacaacacagttgaagcctggaaacactaccattatttttggtgtattgctttttctaattgactgtttttaatgattttgatacattttaatgttgaaattaatattgaatgttagctatgaaattttagtattgaattttataatggaacagaacattggtaggtaacaagatgcaagaggatgtcaatacaagattgtctgcctgtttttctttgtaatttgtaattacagtttttgtaacttgtgattatgtttttaactaaatttaccaccagatacaaacactacttcttacacagagttatcctttatttatatcattaagacgtgaatgaaacatcatcctaacttacttccccaagatattgagaggtcatatctgtttttcatcattcatttctttttctaaaagttgttactgatatgcttttgatttcctatgactctattatgttgtacagaacatcttttcaatttattaaaaaaaatagcttaactgaagatcactaattccttttctaaattttgaactgctctaggcataaatatcattgtgtattatcctttcatctaatcacttttggaatgtaaactgaaggctgttcactccaagttaagttaacatttacatgatgtttattaaatctgccagtctgatcaaaggtttatgaccatggggccaaattcccatagattacccaaaattgaatatgtgcagttaactggaacatgtctcattaaggtttacatacacactaagacagcaaaggattggaattaactttatggagacagttccagggactaatattgaagcagtggttatttgataatgcatggaaccaccatttggattcaataaaccaattacataaaagcaatgatgctacgctcttcatattccagataccaactgcctaccaaggactaatgagatggtatatttcttccacatcagggcaagctgaaaatatattgattcagcgttactgttatgtaaatgaatttccatcttctcatatgtgttatttttgaaagaatgaatacactctctgtcttaaatccgctcttaacaaatgatctcttctcagaatactacatctgtattgagagtacagacagcccattggtcactgcaccttttgcaagacagcgaaacggatgcatcaaattgcattgatacatcatcaccatcaatcttttgcactgatttttagacttaatcttcttatttgaaaataaactcatttttaaataaaataaaaaatattttagggaaagctctataaaattaaaattacagaattatatgctttttaaaatttatgcaaaaatgtgcagacaaatgtattctgtattggtttatgtatcactttgcccttgtatattttgagattattaagatttgttgacttttttggtttgatatttatcatctgttaaatttttccttttaaattattaaatgcaaagtgcaagaaaaa

SEQ ID NO: 122121 - DNA, 7455 bp, Homo sapiens
  Payload ID: 3940
  Gene Symbol: CNTNAP3B
  Gene Name: contactin associated protein-like 3B
  ENST ID: ENST00000612828
  CDS Start-End: 157-3780
gccagtgcgtgaggaagagagctagagactggacaggggagacagagcagcgtcggagccgcgcaggggacgggagtgagagcgggagtgagagcaggaacgacgcagagcggccgtcgccgtgcccgggtctcagggcgcctggctgaagtgagcatggcttcagtggcctgggccgtcctcaaggtgctgctgcttctccccactcagacttggagccccgtaggagcaggaaatccacctgactgtgattccccactggcctctgccttgcctaggtcatccttcagcagctcctcagagctgtccagcagccacggcccggggttttcaaggcttaatcgaagagatggagctggtggctggaccccacttgtgtcaaataaataccaatggctgcaaattgaccttggagagagaatggaggtcactgctgtcgccacccaaggaggatatgggagctctgactgggtgaccagctacctcctgatgttcagtgatggtgggagaaactggaagcagtatcgccgagaagaaagcatctggggttttccaggaaacacaaacgcagacagtgtggtgcactacagactccagcctccctttgaagccaggttcctgcgctttctccctttagcctggaaccccaggggcaggattgggatgcggatcgaagtgtacggatgtgcatataaatctgaggtggtttattttgatggacaaagtgctctgctgtatacacttgataaaaaacctttaaaaccaataagagatgttatttctttgaaatttaaagccatgcagagcaatggaattctacttcacagagaaggacaacatggaaatcacattactctggaattaattaaaggaaagcttgtcttttttcttaattcaggcaatgctaagctgccttctactattgctcctgtgaccctcaccctgggcagcctgctggatgaccagcactggcattccgtcctcatcgagctcctcgacacgcaggtcaacttcaccgtggacaaacacactcatcatttccaagcaaagggagattccagtaacttggatcttaattttgagatcagctttgggggaattctgtcacccggaagatcacgggcattcacacgtaaaagctttcatgggtgtttagaaaatctttattataatggagtggatgttaccgaattagccaagaaacacaaaccacagatcctcatgatgggaaatgtgtccttctcatgtccacagccacagactgtccctgtgacttttctgagctccaggagttatctggctctgccaggcaactctggggaggacaaagtgtctgtcacttttcaatttcgaacgtggaacagagcaggacatttgcttttcggcgaacttcaacgtggttcagggagtttcgtcctctttcttaaggatggcaagctcaaactgagtctcttccaggcgggacagtcaccaaggaatgtcacagcaggtgctggattaaacgatgggcagtggcactctgtatccttctctgccaagtggagccatatgaatgtggtggtggatgatgacacagctgttcagcccctggtggctgtgctcattgattcaggtgacacctattattttggaggctgcctgggcaacagctctggctctggatgtaaaagccccctgggagggtttcagggctgcctaaggctcatcaccattggtgacaaagcggtggatcccatcttagtacagcagggggcgctggggagtttcagggacctccagatagactcctgcggcatcacagacaggtgcttgcccagctactgtgagcatgggggcgagtgttcccagtcgtgggacaccttctcctgtgactgtctaggcacaggctatacgggcgagacctgccattcctctctctacgagcagtcttgtgaagcccacaagcaccgagggaacccatccgggctttactatattgatgcagatggaagtggccccctgggaccatttcttgtgtactgcaatatgacagactccgcgtggacggtggtgcggcacggtggccccgacgcggtgaccctccgaggtgcccccagcgggcacccgctctcggctgtgtccttcgcgtacgcagcgggcgcggggcagctgcgggccgcggtgaacctggcggagcgctgcgagcagcggctggctctgcgctgcgggacagcgcggcgcccggactcacgagatggaaccccactgagctggtgggttggaagaaccaatgaaacacacacttcctggggaggttctctgcctgatgctcaaaagtgtacttgtggattagaggggaactgcattgattctcagtattactgcaactgtgatgctggccagaatgaatggactagtgacacaatagtcctttcccaaaaggagcacctcccagtcactcagattgtgatgacagacacaggccaaccacattccgaagcagattatacactggggccactgctctgccgcggagataagtcattttggaattcagcttccttcaacactgagacttcataccttcatttccctgctttccacggagaactcactgctgacgtgtgcttcttttttaagaccacagtttcctctggggtgtttatggagaacctggggatcacagacttcatcaggattgagctgcgggctcccacagaagtgacattttccttcgatgtggggaatggaccttgtgaggtcacggtgcagtcacccactccctttaatgacaatcagtggcaccacgtgagggcagagagaaatgttaaaggagcgtctcttcaagttgatcagcttcctcagaagatgcagcctgcccctgctgatgggcacgttcgtttacagctcaacagccagctcttcattgagatttccgcatatttcgcaactggctcctcaatgacataccattttcaagaacattacactttaagtgaaaactccagctctctcgtttcttcattacacagagatgtaacattgaccagagaaatgatcacactgagcttccgaaccacacgaactccgagcttattgctgtatgtgagctctttctatgaggaatacctttcagttatcctcgccaacaatggaagtttgcagattaggtacaagctagatagacatcaaaatcctgatgcatttacctttgattttaaaaacatggctgatgggcaacttcaccaagtgaagattaacagagaagaagccgtggtcatggtagaggttaaccagagcgcaaagaaacaagtcatcttgtcctcagggacagaattcaacgccgtcaaatctctcatattgggaaaggttttagaggctgccggcgcggacccggacacaaggcgggcggcgactagtggcttcactggctgcctctcggcggtgcgcttcggctgcgctgctcccctgaaggcggcgctgcgccccagcggcccctcccgggtcaccgtccgcggccacgtggcccctatggcccgctgcgcggcgggggcggcgtccggctccccggcgcgggaactggctccccgactcgcggggggcgcaggtcgttctggaccagtggatgagggagagcccttggttaatgcagacagaagagactctgctgtcatcggaggtgtgatagcagtggagatatttattttgctttgcatcactgccatagccatacgcatctatcaacagagaaagttacgcaaagaaaatgagtcaaaagtctcaaaaaaagaagagtgctaggacagctctaaacagtgagctcgatgtgcaaaacgcagtccatgaaaaccagaaagagtgagtcttctgattggcagctgtggctgtctctatcatcgtgactgtggacttccctgctgttgccatcagggtgcacacagcaggtgcagtgctgtcacctggctgaagatctgcagcctcagagcctctgggaggtccctttctccctcggtgaaacacagtcctccacatcaatttccaaacaatgaattaggtatggccattcatcactgttcagtagtttccccgtccaaaggctctcttccaaaactgcagtttgatctgtgttaataattgtggggttttagatgagaaaatgactataaagctgtggccctactttattttttaaaaatgacagaacttttgttcagatgtaaaagacaaaattgcactttaatgttttttgttacttgaaaacatatctgggatccctttttttggtcctctgctgatattataaaacaagaaatgcttcttggactaccttcactggcatttccatagtcctggaatccagagccaagtggcctatctaaaattcacagcccttttattctcctgtgtgatggttaatacaacacagttgaagcctggaaacactaccattatttttggtgtattgctttttctaattgactgtttttaatgattttgatacattttaatgttgaaattaatattgaatgttagctatgaaattttagtattgaattttataatggaacagaacattggtaggtaacaagatgcaagaggatgtcaatacaagattgtctgcctgtttttctttgtaatttgtaattacagtttttgtaacttgtgattatgtttttaactaaatttaccaccagatacaaacactacttcttacacagagttatcctttatttatatcattaagacgtgaatgaaacatcatcctaacttacttccccaagatattgagaggtcatatctgtttttcatcattcatttctttttctaaaagttgttactgatatgcttttgatttcctatgactctattatgttgtacagaacatcttttcaatttattaaaaaaaatagcttaactgaagatcactaattccttttctaaattttgaactgctctaggcataaatatcattgtgtattatcctttcatctaatcacttttggaatgtaaactgaaggctgttcactccaagttaagttaacatttacatgatgtttattaaatctgccagtctgatcaaaggtttatgaccatggggccaaattcccatagattacccaaaattgaatatgtgcagttaactggaacatgtctcattaaggtttacatacacactaagacagcaaaggattggaattaactttatggagacagttccagggactaatattgaagcagtggttatttgataatgcatggaaccaccatttggattcaataaaccaattacataaaagcaatgatgctacgctcttcatattccagataccaactgcctaccaaggactaatgagatggtatatttcttccacatcagggcaagctgaaaatatattgattcagcgttactgttatgtaaatgaatttccatcttctcatatgtgttatttttgaaagaatgaatacactctctgtcttaaatccgctcttaacaaatgatctcttctcagaatactacatctgtattgagagtacagacagcccattggtcactgcaccttttgcaagacagcgaaacggatgcatcaaattgcattgatacatcatcaccatcaatcttttgcactgatttttagacttaatcttcttatttgaaaataaactcatttttaaataaaataaaaaatattttagggaaagctctataaaattaaaattacagaattatatgctttttaaaatttatgcaaaaatgtgcagacaaatgtattctgtattggtttatgtatcactttgcccttgtatattttgagattattaagatttgttgacttttttggtttgatatttatcatctgttaaatttttccttttaaattattaaatgcaaagtgcaagaaaaagagataaatatttactgattgctagatgtaaaaatatctatgaatatatatatttaaacttctgccagagagcaaccatctgacagtcaacttactaaaatctaaattgagtactttttactgttgcagagaattaagtcactaaacgttatttagatatatagatgctagttgcaagtaacacccttttgtaatataaaagtaaaagcataataatttcccaacttttgtcttcaaattaaaaaagaaaatagcatataattaccattcttcatttgagaaagctgaagattctgatgcttaaaaacttcagaattctaatattaaaaatagagtggttcatgtgacattgaaggcttatctctgtaaaatagtgacactggtgagtggtattatctcaatatttttgtccaaattcaccttaggaagtcactgtaaatcttcattgtttcctaaaagtcattattacggcataaacttaacatactttgatagtagttagtactgatacgtgacatattctaccccgtgtctctgttactctgtctctattactgtgaaaagtcacagtaaatttaacattttcttccagactgtgtatgatctttcattgtaatagagacatggagtaggataagtcatgtattaacatataagatttttttaacctgctccctcagttttatagatgagacaaagataaggttgtaagagctaatctcttcaagtaggcagtactagtaagttgtcatgcgtggactgaactcctggcacttctttctcttaacttcaatccatagagaagcccaccttcctgccttcccagtattatttagcagaggagaaaatcatattaggctgtttgatactctgtttgcctagactgatcaataattctggatctttgttcacatcttctctgaaagaatatttgatgggaaatcttttttattttttaatttttgtgtacatactaggtgcatatatttatggagtacatgaaatgttttgatacaggcatgcactgtgaaataagcacatcatggagaatggggtatccatcccctcaacatttatcctttgtgttacaaacaacctgattacactctgtattttaaaatatgcagttaagtttttattgactatagtcaccctattgtgctatcatatagtaagttttactcattctttctactttttttgtacccattaacctatccccacctctgccccaccattatctcagctgtctactacttttttcagcctttactaaccatccttctactctatatccatgagttccgttgttttggtttttagatcccacaaataaatgagaacatggcaatgtttgtctttctatgcctggcctatttcacttaacataatgacctccagttccatccatgctgtcgcaagtgacaggatctcattctcttttatggctgaagagtactccattttgtatgtgaaccacattttcttcattcatctgttgatgaacacttagggtgtttccaaatcttagctgttataaacagtattgcaacaaataaaagagtgcagatgg

SEQ ID NO: 122122 - DNA, 501 bp, Homo sapiens
  Payload ID: 3940
  Gene Symbol: CNTNAP3B
  Gene Name: contactin associated protein-like 3B
  ENST ID: ENST00000489789
  CDS Start-End: 1-501
acagcgcggcgcccggactcacgaggactagtgacacaatagtcctttcccaaaaggagcacctcccagtcactcagattgtgatgacagacacaggccaaccacattccgaagcagattatacactggggccactgctctgccgcggagatacaagacttctgaaagtatggagaagagaaagtgtgatatttgaaatattcccttctctttttgggagactgagatgggaggatggcttgagccaaggagttcaacacaagcccggacaagatgagtcattttggaattcagcttccttcaacactgagacttcataccttcatttccctgctttccacggagaactcactgctgacgtgtgcttcttttttaagaccacagtttcctctggggtgtttatggagaacctggggatcacagacttcatcaggattgagctgcggggtaggctggccactctggacaagtcacagggtacccattatttagcaataaaag

SEQ ID NO: 122123 - DNA, 4867 bp, Homo sapiens
  Payload ID: 3941
  Gene Symbol: CNTNAP4
  Gene Name: contactin associated protein-like 4
  ENST ID: ENST00000307431
  CDS Start-End: 386-4312
gcggagctcgagcgctgttgtgtgtttggaaggaaggatgctgctgccaatttgtgggaccgctgctgcgaggagtgggcgtggcctcggcggtgtggatgcttgttaggaaagatgctgagtgcttttcagtgaggagtcagggaggtgtgtgtgagagagagagagaaaagagagagacagagacggggagagagagagggagagagaagagagggaggagggaagaagaaaagacggagggaggtgaggaggaagggagggggagagacagagacctagaggggctgaagacccagacagagctggcagagctactgagaagaggactggagcgctctgagagcctctcaagatcttttgggggagcccaataaatgtgaacatgggatctgtcacgggagctgtcctcaagacgctacttctgttatctactcaaaattggaacagagtcgaagctgggaattcctatgactgtgatgatcctcttgtgtctgccttgcctcaggcatccttcagcagttcttccgagctctccagcagtcatggtcctggatttgcaaggctgaatagaagagatggagctggtggctggtctccacttgtgtctaacaaataccagtggttgcagattgaccttggagagagaatggaggtcaccgctgtggccactcaagggggatatggtagctccaactgggtgaccagctacctcctgatgttcagtgatagtggctggaactggaaacaatatcgccaagaggacagcatctggggtttttcaggaaatgcaaatgcagacagtgttgtgtactatagactccagccttctatcaaagccagatttctgcgcttcatccctttggaatggaaccccaagggcagaattggaatgcgaatcgaagtgttcggatgtgcatacagatcagaagtggttgatcttgatggaaaaagttcccttctctacagatttgatcaaaaatccctgagcccaataaaagacattatttctttgaaattcaaaaccatgcagagtgatgggattctactccacagggaagggccaaatggagatcacatcacactgcaattaagaagagcaagactctttttacttattaattcaggtgaagctaaactgccttccacttccaccctggtcaatctcaccctgggcagcctgctagatgatcagcattggcattcagtgctcatccagcgtttgggcaaacaagtcaacttcacagtggacgaacacaggcatcatttccatgcacggggagaattcaatctcatgaatcttgattatgagatcagctttggagggattccagcacctggaaaatcagtgtcattcccacatagaaattttcatggatgtttagaaaatctctattataatggagtggatatcattgatttggccaagcagcaaaaaccacagatcattgctatgggaaatgtgtcattttcttgttcacaaccacaatctatgcccgtgacttttctgagctccaggagttatttagcactgccagacttctctggagaggaggaggtttctgccacttttcaatttcgaacttggaataaggcagggcttctgctgttcagtgaacttcagctgatttcagggggtatcctcctctttctgagtgatggaaaacttaagtcgaatctctaccagccaggaaaattacccagtgacatcacagcaggtgtcgaattaaatgatgggcagtggcattctgtctctttatctgctaaaaagaatcacttgagtgtggcggtggacggccagatggcttctgctgctcctctgctggggcctgagcagatttattcgggtggcacctattattttggaggttgtcctgacaaaagctttggatccaaatgtaaaagtccacttggtggatttcagggatgtatgaggctcatttctatcagcggcaaagtggtagatctgatttcagttcagcaggggtcccttgggaacttcagtgaccttcagatagactcatgtggcatctcagacaggtgtttgcccaactattgtgaacacggtggggagtgttcccagtcctggagcacctttcattgtaactgtaccaacactggttacagaggagctacttgccataactctatctatgagcagtcatgtgaagcctataagcacagaggaaatacttcagggttttactatatagattcagatggaagtggtcccctggaaccatttcttctatattgcaatatgaccgaaactgcatggaccatcatacagcacaacggctctgacttaacaagagtcagaaatactaatccagagaacccatatgctgggtttttcgagtatgtggccagcatggagcaacttcaggccactattaaccgtgcagagcactgtgaacaggagtttacttattactgcaagaagtcacggctggtcaataagcaagatggaacccctctgagttggtgggtaggaagaaccaatgaaacgcaaacctactggggaggttcttcgcctgatcttcaaaaatgtacttgtggattagagggaaactgcattgattctcagtattactgcaattgtgatgctgaccggaatgaatggaccaatgacactggattgcttgcttataaagaacatcttccagtaactaagatcgtgattacagacacaggccgactgcattcagaagcagcttataaactggggcctctgctctgccagggagacagatcattttggaattcagcttcctttgataccgaggcttcatatcttcattttcctaccttccacggagaacttagcgcggatgtatctttcttttttaagacaacagcttcatctggggtatttttagagaacttggggattgctgattttatacggatagagcttcgctctccgacagtagtgactttttcatttgatgtggggaatgggccttttgaaatctcagtgcagtcacccacccacttcaacgacaaccagtggcaccatgtgagggttgaaaggaacatgaaggaggcctcccttcaagtggatcagctgacaccaaagacacagcccgcccccgctgatgggcatgtcctgttacagctcaacagtcagctcttcgtgggtggaacggccaccagacagagaggctttctgggctgcattcggtctctgcagttgaatgggatgaccctggatttggaagaaagagcccaggtgactccagaagtgcagccaggttgtaggggacattgcagcagctatgggaagttatgccgcaatggagggaaatgcagagaaagacccattgggttcttttgtgactgcactttctctgcatacacagggccattctgctcaaatgagatttctgcatattttggatctggctcatccgtgatatacaattttcaagaaaattatcttttaagtaaaaactccagctcccacgctgcttcatttcatggtgatatgaagctgagcagagaaatgatcaaatttagtttccgaacaacacgaacaccaagcttgctgctttttgtgagctccttttacaaagaatacctttctgtgatcattgccaaaaatggtgatttgcagatcaggtacaagttaaataaatatcaagagcctgatgttgttaactttgattttaaaaacatggctgatggacaacttcaccacataatgattaacagagaagaaggagtggtctttatagagattgacgataatagaaggagacaagttcacctgtcatcaggcacagaattcagtgcagtcaaatctctggtattgggcaggattttagaacacagtgatgtggaccaggatactgcactggcaggtgcgcagggcttcacaggctgcctctctgcagtgcagctcagccacgtggcccctctgaaggcagctctgcaccccagccacccagaccctgtcactgttacaggacacgtgactgagtccagctgtatggcccagcctggcactgatgccacatcaagggaaaggacacactcgtttgcagatcattctggaacaatagatgacagagagccccttgctaatgcaatcaaaagtgactctgcagtaattggaggtctgatagctgttgtgatttttatcttgctttgcatcactgccatagctgttcgcatttatcagcagaaaaggttatataaaagaagtgaggcaaaaaggtcagagaatgtagacagtgctgaggctgttctgaaaagtgagcttaatatacaaaatgcagtcaatgaaaatcagaaagagtacttcttctgattggcagctatgatttaacataaaattatgatagtttgttttaatagccaggggttctcaatggaaaaacgaatgctcttacactgaatgtacaggcagtgggcttgcagcactgccatcttgccatgtacaggcttggggtggctccaggaagcctcgtccagtgatatatttctcatagcattcattctatggaacaagaaattagatattgctgttaattttcaactgttctggtatgatctaaaacaagtttaacctgcttaatggctacagtttttacatgtgaaaactgtagccttggtctcttaaccatgtaatacataagttttgttagaggtaaaaattaaatttggactataatgtccttgctttatttgagaacatttgctgtgtttgcttttgtctcctcgtggtgttattcatagacctggaaatgcttctcagatcctgtgtggccggtgtttgcatcttcagtggccacaagcataataaagcccctttgcctttctctgtattatattcaatacaatacatcaatagtcttgaaaaatg

SEQ ID NO: 122124 - DNA, 4355 bp, Homo sapiens
  Payload ID: 3941
  Gene Symbol: CNTNAP4
  Gene Name: contactin associated protein-like 4
  ENST ID: ENST00000476707
  CDS Start-End: 140-4075
tatataattttatgatttttaaagtattttcatattctcctgtctttaagttttttcttttctcattgaacttactagacttctagtaagccctggaagtagtaggcatatttttagagatcttagatcctagtttttgatgttgttgttttacttgttggttgttttgtctattgattccacgaaagcctcagcactaactaaccctaacgtggcattgttcctcctggcagatgactgtgatgatcctcttgtgtctgccttgcctcaggcatccttcagcagttcttccgagctctccagcagtcatggtcctggatttgcaaggctgaatagaagagatggagctggtggctggtctccacttgtgtctaacaaataccagtggttgcagattgaccttggagagagaatggaggtcaccgctgtggccactcaagggggatatggtagctccaactgggtgaccagctacctcctgatgttcagtgatagtggctggaactggaaacaatatcgccaagaggacagcatctggggtttttcaggaaatgcaaatgcagacagtgttgtgtactatagactccagccttctatcaaagccagatttctgcgcttcatccctttggaatggaaccccaagggcagaattggaatgcgaatcgaagtgttcggatgtgcatacagatcagaagtggttgatcttgatggaaaaagttcccttctctacagatttgatcaaaaatccctgagcccaataaaagacattatttctttgaaattcaaaaccatgcagagtgatgggattctactccacagggaagggccaaatggagatcacatcacactgcaattaagaagagcaagactctttttacttattaattcaggtgaagctaaactgccttccacttccaccctggtcaatctcaccctgggcagcctgctagatgatcagcattggcattcagtgctcatccagcgtttgggcaaacaagtcaacttcacagtggacgaacacaggcatcatttccatgcacggggagaattcaatctcatgaatcttgattatgagatcagctttggagggattccagcacctggaaaatcagtgtcattcccacatagaaattttcatggatgtttagaaaatctctattataatggagtggatatcattgatttggccaagcagcaaaaaccacagatcattgctatgggaaatgtgtcattttcttgttcacaaccacaatctatgcccgtgacttttctgagctccaggagttatttagcactgccagacttctctggagaggaggaggtttctgccacttttcaatttcgaacttggaataaggcagggcttctgctgttcagtgaacttcagctgatttcagggggtatcctcctctttctgagtgatggaaaacttaagtcgaatctctaccagccaggaaaattacccagtgacatcacagcaggtgtcgaattaaatgatgggcagtggcattctgtctctttatctgctaaaaagaatcacttgagtgtggcggtggacggccagatggcttctgctgctcctctgctggggcctgagcagatttattcgggtggcacctattattttggaggttgtcctgacaaaagctttggatccaaatgtaaaagtccacttggtggatttcagggatgtatgaggctcatttctatcagcggcaaagtggtagatctgatttcagttcagcaggggtcccttgggaacttcagtgaccttcagatagactcatgtggcatctcagacaggtgtttgcccaactattgtgaacacggtggggagtgttcccagtcctggagcacctttcattgtaactgtaccaacactggttacagaggagctacttgccataactctatctatgagcagtcatgtgaagcctataagcacagaggaaatacttcagggttttactatatagattcagatggaagtggtcccctggaaccatttcttctatattgcaatatgaccgaaactgcatggaccatcatacagcacaacggctctgacttaacaagagtcagaaatactaatccagagaacccatatgctgggtttttcgagtatgtggccagcatggagcaacttcaggccactattaaccgtgcagagcactgtgaacaggagtttacttattactgcaagaagtcacggctggtcaataagcaagatggaacccctctgagttggtgggtaggaagaaccaatgaaacgcaaacctactggggaggttcttcgcctgatcttcaaaaatgtacttgtggattagagggaaactgcattgattctcagtattactgcaattgtgatgctgaccggaatgaatggaccaatgacactggattgcttgcttataaagaacatcttccagtaactaagatcgtgattacagacacaggccgactgcattcagaagcagcttataaactggggcctctgctctgccagggagacagatcattttggaattcagcttcctttgataccgaggcttcatatcttcattttcctaccttccacggagaacttagcgcggatgtatctttcttttttaagacaacagcttcatctggggtatttttagagaacttggggattgctgattttatacggatagagcttcgctctccgacagtagtgactttttcatttgatgtggggaatgggccttttgaaatctcagtgcagtcacccacccacttcaacgacaaccagtggcaccatgtgagggttgaaaggaacatgaaggaggcctcccttcaagtggatcagctgacaccaaagacacagcccgcccccgctgatgggcatgtcctgttacagctcaacagtcagctcttcgtgggtggaacggccaccagacagagaggctttctgggctgcattcggtctctgcagttgaatgggatgaccctggatttggaagaaagagcccaggtgactccagaagtgcagccaggttgtaggggacattgcagcagctatgggaagttatgccgcaatggagggaaatgcagagaaagacccattgggttcttttgtgactgcactttctctgcatacacagggccattctgctcaaatgagatttctgcatattttggatctggctcatccgtgatatacaattttcaagaaaattatcttttaagtaaaaactccagctcccacgctgcttcatttcatggtgatatgaagctgagcagagaaatgatcaaatttagtttccgaacaacacgaacaccaagcttgctgctttttgtgagctccttttacaaagaatacctttctgtgatcattgccaaaaatggaagtttgcagatcaggtacaagttaaataaatatcaagagcctgatgttgttaactttgattttaaaaacatggctgatggacaacttcaccacataatgattaacagagaagaaggagtggtctttatagagattgacgataatagaaggagacaagttcacctgtcatcaggcacagaattcagtgcagtcaaatctctggtattgggcaggattttagaacacagtgatgtggaccaggatactgcactggcaggtgcgcagggcttcacaggctgcctctctgcagtgcagctcagccacgtggcccctctgaaggcagctctgcaccccagccacccagaccctgtcactgttacaggacacgtgactgagtccagctgtatggcccagcctggcactgatgccacatcaagggaaaggacacactcgtttgcagatcattctggaacaatagatgacagagagccccttgctaatgcaatcaaaagtgactctgcagtaattggaggtctgatagctgttgtgatttttatcttgctttgcatcactgccatagctgttcgcatttatcagcagaaaaggttatataaaagaagtgaggcaaaaaggtcagagaatgtagacagtgctgaggctgttctgaaaagtgagcttaatatacaaaatgcagtcaatgaaaatcagaaagagtacttcttctgattggcagctatgatttaacataaaattatgatagtttgttttaatagccaggggttctcaatggaaaaacgaatgctcttacactgaatgtacaggcagtgggcttgcagcactgccatcttgccatgtacaggcttggggtggctccaggaagcctcgtccagtgatatatttctcatagcattcattctatggaacaagaaattagatattgctgttaattttcaactgttctggtatgatctaaaacaagtttaacctgcttaatggctacagtttt

SEQ ID NO: 122125 - DNA, 3708 bp, Homo sapiens
  Payload ID: 3941
  Gene Symbol: CNTNAP4
  Gene Name: contactin associated protein-like 4
  Uniprot ID: Q9C0A0
  ENST ID: ENST00000478060
  CDS Start-End: 1-3708
atgtggaactatgactgtgatgatcctcttgtgtctgccttgcctcaggcatccttcagcagttcttccgagctctccagcagtcatggtcctggatttgcaaggctgaatagaagagatggagctggtggctggtctccacttgtgtctaacaaataccagtggttgcagattgaccttggagagagaatggaggtcaccgctgtggccactcaagggggatatggtagctccaactgggtgaccagctacctcctgatgttcagtgatagtggctggaactggaaacaatatcgccaagaggacagcatctggggtttttcaggaaatgcaaatgcagacagtgttgtgtactatagactccagccttctatcaaagccagatttctgcgcttcatccctttggaatggaaccccaagggcagaattggaatgcgaatcgaagtgttcggatgtgcatacagatcagaagtggttgatcttgatggaaaaagttcccttctctacagatttgatcaaaaatccctgagcccaataaaagacattatttctttgaaattcaaaaccatgcagagtgatgggattctactccacagggaagggccaaatggagatcacatcacactgcaattaagaagagcaagactctttttacttattaattcaggtgaagctaaactgccttccacttccaccctggtcaatctcaccctgggcagcctgctagatgatcagcattggcattcagtgctcatccagcgtttgggcaaacaagtcaacttcacagtggacgaacacaggcatcatttccatgcacggggagaattcaatctcatgaatcttgattatgagggaaatgtgtcattttcttgttcacaaccacaatctatgcccgtgacttttctgagctccaggagttatttagcactgccagacttctctggagaggaggaggtttctgccacttttcaatttcgaacttggaataaggcagggcttctgctgttcagtgaacttcagctgatttcagggggtatcctcctctttctgagtgatggaaaacttaagtcgaatctctaccagccaggaaaattacccagtgacatcacagcaggtgtcgaattaaatgatgggcagtggcattctgtctctttatctgctaaaaagaatcacttgagtgtggcggtggacggccagatggcttctgctgctcctctgctggggcctgagcagatttattcgggtggcacctattattttggaggttgtcctgacaaaagctttggatccaaatgtaaaagtccacttggtggatttcagggatgtatgaggctcatttctatcagcggcaaagtggtagatctgatttcagttcagcaggggtcccttgggaacttcagtgaccttcagatagactcatgtggcatctcagacaggtgtttgcccaactattgtgaacacggtggggagtgttcccagtcctggagcacctttcattgtaactgtaccaacactggttacagaggagctacttgccataactctatctatgagcagtcatgtgaagcctataagcacagaggaaatacttcagggttttactatatagattcagatggaagtggtcccctggaaccatttcttctatattgcaatatgaccgaaactgcatggaccatcatacagcacaacggctctgacttaacaagagtcagaaatactaatccagagaacccatatgctgggtttttcgagtatgtggccagcatggagcaacttcaggccactattaaccgtgcagagcactgtgaacaggagtttacttattactgcaagaagtcacggctggtcaataagcaagatggaacccctctgagttggtgggtaggaagaaccaatgaaacgcaaacctactggggaggttcttcgcctgatcttcaaaaatgtacttgtggattagagggaaactgcattgattctcagtattactgcaattgtgatgctgaccggaatgaatggaccaatgacactggattgcttgcttataaagaacatcttccagtaactaagatcgtgattacagacacaggccgactgcattcagaagcagcttataaactggggcctctgctctgccagggagacagatcattttggaattcagcttcctttgataccgaggcttcatatcttcattttcctaccttccacggagaacttagcgcggatgtatctttcttttttaagacaacagcttcatctggggtatttttagagaacttggggattgctgattttatacggatagagcttcgctctccgacagtagtgactttttcatttgatgtggggaatgggccttttgaaatctcagtgcagtcacccacccacttcaacgacaaccagtggcaccatgtgagggttgaaaggaacatgaaggaggcctcccttcaagtggatcagctgacaccaaagacacagcccgcccccgctgatgggcatgtcctgttacagctcaacagtcagctcttcgtgggtggaacggccaccagacagagaggctttctgggctgcattcggtctctgcagttgaatgggatgaccctggatttggaagaaagagcccaggtgactccagaagtgcagccaggttgtaggggacattgcagcagctatgggaagttatgccgcaatggagggaaatgcagagaaagacccattgggttcttttgtgactgcactttctctgcatacacagggccattctgctcaaatgagatttctgcatattttggatctggctcatccgtgatatacaattttcaagaaaattatcttttaagtaaaaactccagctcccacgctgcttcatttcatggtgatatgaagctgagcagagaaatgatcaaatttagtttccgaacaacacgaacaccaagcttgctgctttttgtgagctccttttacaaagaatacctttctgtgatcattgccaaaaatggaagtttgcagatcaggtacaagttaaataaatatcaagagcctgatgttgttaactttgattttaaaaacatggctgatggacaacttcaccacataatgattaacagagaagaaggagtggtctttatagagattgacgataatagaaggagacaagttcacctgtcatcaggcacagaattcagtgcagtcaaatctctggtattgggcaggattttagaacacagtgatgtggaccaggatactgcactggcaggtgcgcagggcttcacaggctgcctctctgcagtgcagctcagccacgtggcccctctgaaggcagctctgcaccccagccacccagaccctgtcactgttacaggacacgtgactgagtccagctgtatggcccagcctggcactgatgccacatcaagggaaaggacacactcgtttgcagatcattctggaacaatagatgacagagagccccttgctaatgcaatcaaaagtgactctgcagtaattggaggtctgatagctgttgtgatttttatcttgctttgcatcactgccatagctgttcgcatttatcagcagaaaaggttatataaaagaagtgaggcaaaaaggtcagagaatgtagacagtgctgaggctgttctgaaaagtgagcttaatatacaaaatgcagtcaatgaaaatcagaaagagtacttcttctga

SEQ ID NO: 122126 - DNA, 4723 bp, Homo sapiens
  Payload ID: 3941
  Gene Symbol: CNTNAP4
  Gene Name: contactin associated protein-like 4
  ENST ID: ENST00000377504
  CDS Start-End: 386-4168
gcggagctcgagcgctgttgtgtgtttggaaggaaggatgctgctgccaatttgtgggaccgctgctgcgaggagtgggcgtggcctcggcggtgtggatgcttgttaggaaagatgctgagtgcttttcagtgaggagtcagggaggtgtgtgtgagagagagagagaaaagagagagacagagacggggagagagagagggagagagaagagagggaggagggaagaagaaaagacggagggaggtgaggaggaagggagggggagagacagagacctagaggggctgaagacccagacagagctggcagagctactgagaagaggactggagcgctctgagagcctctcaagatcttttgggggagcccaataaatgtgaacatgggatctgtcacgggagctgtcctcaagacgctacttctgttatctactcaaaattggaacagagtcgaagctgggaattcctatgactgtgatgatcctcttgtgtctgccttgcctcaggcatccttcagcagttcttccgagctctccagcagtcatggtcctggatttgcaaggctgaatagaagagatggagctggtggctggtctccacttgtgtctaacaaataccagtggttgcagattgaccttggagagagaatggaggtcaccgctgtggccactcaagggggatatggtagctccaactgggtgaccagctacctcctgatgttcagtgatagtggctggaactggaaacaatatcgccaagaggacagcatctggggtttttcaggaaatgcaaatgcagacagtgttgtgtactatagactccagccttctatcaaagccagatttctgcgcttcatccctttggaatggaaccccaagggcagaattggaatgcgaatcgaagtgttcggatgtgcatacagatcagaagtggttgatcttgatggaaaaagttcccttctctacagatttgatcaaaaatccctgagcccaataaaagacattatttctttgaaattcaaaaccatgcagagtgatgggattctactccacagggaagggccaaatggagatcacatcacactgcaattaagaagagcaagactctttttacttattaattcaggtgaagctaaactgccttccacttccaccctggtcaatctcaccctgggcagcctgctagatgatcagcattggcattcagtgctcatccagcgtttgggcaaacaagtcaacttcacagtggacgaacacaggcatcatttccatgcacggggagaattcaatctcatgaatcttgattatgagggaaatgtgtcattttcttgttcacaaccacaatctatgcccgtgacttttctgagctccaggagttatttagcactgccagacttctctggagaggaggaggtttctgccacttttcaatttcgaacttggaataaggcagggcttctgctgttcagtgaacttcagctgatttcagggggtatcctcctctttctgagtgatggaaaacttaagtcgaatctctaccagccaggaaaattacccagtgacatcacagcaggtgtcgaattaaatgatgggcagtggcattctgtctctttatctgctaaaaagaatcacttgagtgtggcggtggacggccagatggcttctgctgctcctctgctggggcctgagcagatttattcgggtggcacctattattttggaggttgtcctgacaaaagctttggatccaaatgtaaaagtccacttggtggatttcagggatgtatgaggctcatttctatcagcggcaaagtggtagatctgatttcagttcagcaggggtcccttgggaacttcagtgaccttcagatagactcatgtggcatctcagacaggtgtttgcccaactattgtgaacacggtggggagtgttcccagtcctggagcacctttcattgtaactgtaccaacactggttacagaggagctacttgccataactctatctatgagcagtcatgtgaagcctataagcacagaggaaatacttcagggttttactatatagattcagatggaagtggtcccctggaaccatttcttctatattgcaatatgaccgaaactgcatggaccatcatacagcacaacggctctgacttaacaagagtcagaaatactaatccagagaacccatatgctgggtttttcgagtatgtggccagcatggagcaacttcaggccactattaaccgtgcagagcactgtgaacaggagtttacttattactgcaagaagtcacggctggtcaataagcaagatggaacccctctgagttggtgggtaggaagaaccaatgaaacgcaaacctactggggaggttcttcgcctgatcttcaaaaatgtacttgtggattagagggaaactgcattgattctcagtattactgcaattgtgatgctgaccggaatgaatggaccaatgacactggattgcttgcttataaagaacatcttccagtaactaagatcgtgattacagacacaggccgactgcattcagaagcagcttataaactggggcctctgctctgccagggagacagatcattttggaattcagcttcctttgataccgaggcttcatatcttcattttcctaccttccacggagaacttagcgcggatgtatctttcttttttaagacaacagcttcatctggggtatttttagagaacttggggattgctgattttatacggatagagcttcgctctccgacagtagtgactttttcatttgatgtggggaatgggccttttgaaatctcagtgcagtcacccacccacttcaacgacaaccagtggcaccatgtgagggttgaaaggaacatgaaggaggcctcccttcaagtggatcagctgacaccaaagacacagcccgcccccgctgatgggcatgtcctgttacagctcaacagtcagctcttcgtgggtggaacggccaccagacagagaggctttctgggctgcattcggtctctgcagttgaatgggatgaccctggatttggaagaaagagcccaggtgactccagaagtgcagccaggttgtaggggacattgcagcagctatgggaagttatgccgcaatggagggaaatgcagagaaagacccattgggttcttttgtgactgcactttctctgcatacacagggccattctgctcaaatgagatttctgcatattttggatctggctcatccgtgatatacaattttcaagaaaattatcttttaagtaaaaactccagctcccacgctgcttcatttcatggtgatatgaagctgagcagagaaatgatcaaatttagtttccgaacaacacgaacaccaagcttgctgctttttgtgagctccttttacaaagaatacctttctgtgatcattgccaaaaatggtgatttgcagatcaggtacaagttaaataaatatcaagagcctgatgttgttaactttgattttaaaaacatggctgatggacaacttcaccacataatgattaacagagaagaaggagtggtctttatagagattgacgataatagaaggagacaagttcacctgtcatcaggcacagaattcagtgcagtcaaatctctggtattgggcaggattttagaacacagtgatgtggaccaggatactgcactggcaggtgcgcagggcttcacaggctgcctctctgcagtgcagctcagccacgtggcccctctgaaggcagctctgcaccccagccacccagaccctgtcactgttacaggacacgtgactgagtccagctgtatggcccagcctggcactgatgccacatcaagggaaaggacacactcgtttgcagatcattctggaacaatagatgacagagagccccttgctaatgcaatcaaaagtgactctgcagtaattggaggtctgatagctgttgtgatttttatcttgctttgcatcactgccatagctgttcgcatttatcagcagaaaaggttatataaaagaagtgaggcaaaaaggtcagagaatgtagacagtgctgaggctgttctgaaaagtgagcttaatatacaaaatgcagtcaatgaaaatcagaaagagtacttcttctgattggcagctatgatttaacataaaattatgatagtttgttttaatagccaggggttctcaatggaaaaacgaatgctcttacactgaatgtacaggcagtgggcttgcagcactgccatcttgccatgtacaggcttggggtggctccaggaagcctcgtccagtgatatatttctcatagcattcattctatggaacaagaaattagatattgctgttaattttcaactgttctggtatgatctaaaacaagtttaacctgcttaatggctacagtttttacatgtgaaaactgtagccttggtctcttaaccatgtaatacataagttttgttagaggtaaaaattaaatttggactataatgtccttgctttatttgagaacatttgctgtgtttgcttttgtctcctcgtggtgttattcatagacctggaaatgcttctcagatcctgtgtggccggtgtttgcatcttcagtggccacaagcataataaagcccctttgcctttctctgtattatattcaatacaatacatcaatagtcttgaaaaatg

SEQ ID NO: 122127 - DNA, 3783 bp, Homo sapiens
  Payload ID: 3941
  Gene Symbol: CNTNAP4
  Gene Name: contactin associated protein-like 4
  ENST ID: ENST00000622250
  CDS Start-End: 1-3783
atgggatctgtcacgggagctgtcctcaagacgctacttctgttatctactcaaaattggaacagagtcgaagctgggaattcctatgactgtgatgatcctcttgtgtctgccttgcctcaggcatccttcagcagttcttccgagctctccagcagtcatggtcctggatttgcaaggctgaatagaagagatggagctggtggctggtctccacttgtgtctaacaaataccagtggttgcagattgaccttggagagagaatggaggtcaccgctgtggccactcaagggggatatggtagctccaactgggtgaccagctacctcctgatgttcagtgatagtggctggaactggaaacaatatcgccaagaggacagcatctggggtttttcaggaaatgcaaatgcagacagtgttgtgtactatagactccagccttctatcaaagccagatttctgcgcttcatccctttggaatggaaccccaagggcagaattggaatgcgaatcgaagtgttcggatgtgcatacagatcagaagtggttgatcttgatggaaaaagttcccttctctacagatttgatcaaaaatccctgagcccaataaaagacattatttctttgaaattcaaaaccatgcagagtgatgggattctactccacagggaagggccaaatggagatcacatcacactgcaattaagaagagcaagactctttttacttattaattcaggtgaagctaaactgccttccacttccaccctggtcaatctcaccctgggcagcctgctagatgatcagcattggcattcagtgctcatccagcgtttgggcaaacaagtcaacttcacagtggacgaacacaggcatcatttccatgcacggggagaattcaatctcatgaatcttgattatgagggaaatgtgtcattttcttgttcacaaccacaatctatgcccgtgacttttctgagctccaggagttatttagcactgccagacttctctggagaggaggaggtttctgccacttttcaatttcgaacttggaataaggcagggcttctgctgttcagtgaacttcagctgatttcagggggtatcctcctctttctgagtgatggaaaacttaagtcgaatctctaccagccaggaaaattacccagtgacatcacagcaggtgtcgaattaaatgatgggcagtggcattctgtctctttatctgctaaaaagaatcacttgagtgtggcggtggacggccagatggcttctgctgctcctctgctggggcctgagcagatttattcgggtggcacctattattttggaggttgtcctgacaaaagctttggatccaaatgtaaaagtccacttggtggatttcagggatgtatgaggctcatttctatcagcggcaaagtggtagatctgatttcagttcagcaggggtcccttgggaacttcagtgaccttcagatagactcatgtggcatctcagacaggtgtttgcccaactattgtgaacacggtggggagtgttcccagtcctggagcacctttcattgtaactgtaccaacactggttacagaggagctacttgccataactctatctatgagcagtcatgtgaagcctataagcacagaggaaatacttcagggttttactatatagattcagatggaagtggtcccctggaaccatttcttctatattgcaatatgaccgaaactgcatggaccatcatacagcacaacggctctgacttaacaagagtcagaaatactaatccagagaacccatatgctgggtttttcgagtatgtggccagcatggagcaacttcaggccactattaaccgtgcagagcactgtgaacaggagtttacttattactgcaagaagtcacggctggtcaataagcaagatggaacccctctgagttggtgggtaggaagaaccaatgaaacgcaaacctactggggaggttcttcgcctgatcttcaaaaatgtacttgtggattagagggaaactgcattgattctcagtattactgcaattgtgatgctgaccggaatgaatggaccaatgacactggattgcttgcttataaagaacatcttccagtaactaagatcgtgattacagacacaggccgactgcattcagaagcagcttataaactggggcctctgctctgccagggagacagatcattttggaattcagcttcctttgataccgaggcttcatatcttcattttcctaccttccacggagaacttagcgcggatgtatctttcttttttaagacaacagcttcatctggggtatttttagagaacttggggattgctgattttatacggatagagcttcgctctccgacagtagtgactttttcatttgatgtggggaatgggccttttgaaatctcagtgcagtcacccacccacttcaacgacaaccagtggcaccatgtgagggttgaaaggaacatgaaggaggcctcccttcaagtggatcagctgacaccaaagacacagcccgcccccgctgatgggcatgtcctgttacagctcaacagtcagctcttcgtgggtggaacggccaccagacagagaggctttctgggctgcattcggtctctgcagttgaatgggatgaccctggatttggaagaaagagcccaggtgactccagaagtgcagccaggttgtaggggacattgcagcagctatgggaagttatgccgcaatggagggaaatgcagagaaagacccattgggttcttttgtgactgcactttctctgcatacacagggccattctgctcaaatgagatttctgcatattttggatctggctcatccgtgatatacaattttcaagaaaattatcttttaagtaaaaactccagctcccacgctgcttcatttcatggtgatatgaagctgagcagagaaatgatcaaatttagtttccgaacaacacgaacaccaagcttgctgctttttgtgagctccttttacaaagaatacctttctgtgatcattgccaaaaatggaagtttgcagatcaggtacaagttaaataaatatcaagagcctgatgttgttaactttgattttaaaaacatggctgatggacaacttcaccacataatgattaacagagaagaaggagtggtctttatagagattgacgataatagaaggagacaagttcacctgtcatcaggcacagaattcagtgcagtcaaatctctggtattgggcaggattttagaacacagtgatgtggaccaggatactgcactggcaggtgcgcagggcttcacaggctgcctctctgcagtgcagctcagccacgtggcccctctgaaggcagctctgcaccccagccacccagaccctgtcactgttacaggacacgtgactgagtccagctgtatggcccagcctggcactgatgccacatcaagggaaaggacacactcgtttgcagatcattctggaacaatagatgacagagagccccttgctaatgcaatcaaaagtgactctgcagtaattggaggtctgatagctgttgtgatttttatcttgctttgcatcactgccatagctgttcgcatttatcagcagaaaaggttatataaaagaagtgaggcaaaaaggtcagagaatgtagacagtgctgaggctgttctgaaaagtgagcttaatatacaaaatgcagtcaatgaaaatcagaaagagtacttcttctga

SEQ ID NO: 122128 - DNA, 4867 bp, Homo sapiens
  Payload ID: 3941
  Gene Symbol: CNTNAP4
  Gene Name: contactin associated protein-like 4
  Uniprot ID: Q9C0A0
  ENST ID: ENST00000611870
  CDS Start-End: 386-4312
gcggagctcgagcgctgttgtgtgtttggaaggaaggatgctgctgccaatttgtgggaccgctgctgcgaggagtgggcgtggcctcggcggtgtggatgcttgttaggaaagatgctgagtgcttttcagtgaggagtcagggaggtgtgtgtgagagagagagagaaaagagagagacagagacggggagagagagagggagagagaagagagggaggagggaagaagaaaagacggagggaggtgaggaggaagggagggggagagacagagacctagaggggctgaagacccagacagagctggcagagctactgagaagaggactggagcgctctgagagcctctcaagatcttttgggggagcccaataaatgtgaacatgggatctgtcacgggagctgtcctcaagacgctacttctgttatctactcaaaattggaacagagtcgaagctgggaattcctatgactgtgatgatcctcttgtgtctgccttgcctcaggcatccttcagcagttcttccgagctctccagcagtcatggtcctggatttgcaaggctgaatagaagagatggagctggtggctggtctccacttgtgtctaacaaataccagtggttgcagattgaccttggagagagaatggaggtcaccgctgtggccactcaagggggatatggtagctccaactgggtgaccagctacctcctgatgttcagtgatagtggctggaactggaaacaatatcgccaagaggacagcatctggggtttttcaggaaatgcaaatgcagacagtgttgtgtactatagactccagccttctatcaaagccagatttctgcgcttcatccctttggaatggaaccccaagggcagaattggaatgcgaatcgaagtgttcggatgtgcatacagatcagaagtggttgatcttgatggaaaaagttcccttctctacagatttgatcaaaaatccctgagcccaataaaagacattatttctttgaaattcaaaaccatgcagagtgatgggattctactccacagggaagggccaaatggagatcacatcacactgcaattaagaagagcaagactctttttacttattaattcaggtgaagctaaactgccttccacttccaccctggtcaatctcaccctgggcagcctgctagatgatcagcattggcattcagtgctcatccagcgtttgggcaaacaagtcaacttcacagtggacgaacacaggcatcatttccatgcacggggagaattcaatctcatgaatcttgattatgagatcagctttggagggattccagcacctggaaaatcagtgtcattcccacatagaaattttcatggatgtttagaaaatctctattataatggagtggatatcattgatttggccaagcagcaaaaaccacagatcattgctatgggaaatgtgtcattttcttgttcacaaccacaatctatgcccgtgacttttctgagctccaggagttatttagcactgccagacttctctggagaggaggaggtttctgccacttttcaatttcgaacttggaataaggcagggcttctgctgttcagtgaacttcagctgatttcagggggtatcctcctctttctgagtgatggaaaacttaagtcgaatctctaccagccaggaaaattacccagtgacatcacagcaggtgtcgaattaaatgatgggcagtggcattctgtctctttatctgctaaaaagaatcacttgagtgtggcggtggacggccagatggcttctgctgctcctctgctggggcctgagcagatttattcgggtggcacctattattttggaggttgtcctgacaaaagctttggatccaaatgtaaaagtccacttggtggatttcagggatgtatgaggctcatttctatcagcggcaaagtggtagatctgatttcagttcagcaggggtcccttgggaacttcagtgaccttcagatagactcatgtggcatctcagacaggtgtttgcccaactattgtgaacacggtggggagtgttcccagtcctggagcacctttcattgtaactgtaccaacactggttacagaggagctacttgccataactctatctatgagcagtcatgtgaagcctataagcacagaggaaatacttcagggttttactatatagattcagatggaagtggtcccctggaaccatttcttctatattgcaatatgaccgaaactgcatggaccatcatacagcacaacggctctgacttaacaagagtcagaaatactaatccagagaacccatatgctgggtttttcgagtatgtggccagcatggagcaacttcaggccactattaaccgtgcagagcactgtgaacaggagtttacttattactgcaagaagtcacggctggtcaataagcaagatggaacccctctgagttggtgggtaggaagaaccaatgaaacgcaaacctactggggaggttcttcgcctgatcttcaaaaatgtacttgtggattagagggaaactgcattgattctcagtattactgcaattgtgatgctgaccggaatgaatggaccaatgacactggattgcttgcttataaagaacatcttccagtaactaagatcgtgattacagacacaggccgactgcattcagaagcagcttataaactggggcctctgctctgccagggagacagatcattttggaattcagcttcctttgataccgaggcttcatatcttcattttcctaccttccacggagaacttagcgcggatgtatctttcttttttaagacaacagcttcatctggggtatttttagagaacttggggattgctgattttatacggatagagcttcgctctccgacagtagtgactttttcatttgatgtggggaatgggccttttgaaatctcagtgcagtcacccacccacttcaacgacaaccagtggcaccatgtgagggttgaaaggaacatgaaggaggcctcccttcaagtggatcagctgacaccaaagacacagcccgcccccgctgatgggcatgtcctgttacagctcaacagtcagctcttcgtgggtggaacggccaccagacagagaggctttctgggctgcattcggtctctgcagttgaatgggatgaccctggatttggaagaaagagcccaggtgactccagaagtgcagccaggttgtaggggacattgcagcagctatgggaagttatgccgcaatggagggaaatgcagagaaagacccattgggttcttttgtgactgcactttctctgcatacacagggccattctgctcaaatgagatttctgcatattttggatctggctcatccgtgatatacaattttcaagaaaattatcttttaagtaaaaactccagctcccacgctgcttcatttcatggtgatatgaagctgagcagagaaatgatcaaatttagtttccgaacaacacgaacaccaagcttgctgctttttgtgagctccttttacaaagaatacctttctgtgatcattgccaaaaatggaagtttgcagatcaggtacaagttaaataaatatcaagagcctgatgttgttaactttgattttaaaaacatggctgatggacaacttcaccacataatgattaacagagaagaaggagtggtctttatagagattgacgataatagaaggagacaagttcacctgtcatcaggcacagaattcagtgcagtcaaatctctggtattgggcaggattttagaacacagtgatgtggaccaggatactgcactggcaggtgcgcagggcttcacaggctgcctctctgcagtgcagctcagccacgtggcccctctgaaggcagctctgcaccccagccacccagaccctgtcactgttacaggacacgtgactgagtccagctgtatggcccagcctggcactgatgccacatcaagggaaaggacacactcgtttgcagatcattctggaacaatagatgacagagagccccttgctaatgcaatcaaaagtgactctgcagtaattggaggtctgatagctgttgtgatttttatcttgctttgcatcactgccatagctgttcgcatttatcagcagaaaaggttatataaaagaagtgaggcaaaaaggtcagagaatgtagacagtgctgaggctgttctgaaaagtgagcttaatatacaaaatgcagtcaatgaaaatcagaaagagtacttcttctgattggcagctatgatttaacataaaattatgatagtttgttttaatagccaggggttctcaatggaaaaacgaatgctcttacactgaatgtacaggcagtgggcttgcagcactgccatcttgccatgtacaggcttggggtggctccaggaagcctcgtccagtgatatatttctcatagcattcattctatggaacaagaaattagatattgctgttaattttcaactgttctggtatgatctaaaacaagtttaacctgcttaatggctacagtttttacatgtgaaaactgtagccttggtctcttaaccatgtaatacataagttttgttagaggtaaaaattaaatttggactataatgtccttgctttatttgagaacatttgctgtgtttgcttttgtctcctcgtggtgttattcatagacctggaaatgcttctcagatcctgtgtggccggtgtttgcatcttcagtggccacaagcataataaagcccctttgcctttctctgtattatattcaatacaatacatcaatagtcttgaaaaatg

SEQ ID NO: 122129 - DNA, 5284 bp, Homo sapiens
  Payload ID: 3942
  Gene Symbol: CNTNAP5
  Gene Name: contactin associated protein-like 5
  Uniprot ID: Q8WYK1
  ENST ID: ENST00000431078
  CDS Start-End: 365-4285
gattccagctctcgcgcccgacgaggtggatttggctgtccaccgagctccggcgcctgtcgttctaattgggtttggatttgcaccgttaaggaggggggaagagaaggaagaggcgggcgaggaaggcgagtccagctagcggctgttgcggggaccgtagccccagctgcagctccgaagaatcccccgccacggtttcggtggagcgtctgggcacgggatggagtgaaagagcgagtgcctctccaagcgggggtgggagggggtcaggctgtgcagaggagagagacagcgagaagaagccgcggctggctactgcgaatttgggattcgattgggagggaccgctcactcgggggaaatggattctttaccacggctgaccagcgttttgactttgctgttctctggcttgtggcatttaggattaacagcgacaaactacaactgtgatgatccactagcatccctgctctctccaatggctttttccagttcctcagacctcactggcactcacagcccagctcaactcaactggagagttggaactggcggttggtccccagcagattccaatgctcaacagtggctccagatggacctgggaaacagagtagagattacagcagtggccacgcagggaagatacggaagctctgactgggtgacgagttacagcctgatgttcagtgacacaggacgcaactggaaacagtacaaacaagaagacagcatctggacctttgcaggaaacatgaatgctgacagcgtggtgcaccacaagctattgcactcagtgagagcccgatttgttcgctttgtgcccctggaatggaatcccagtgggaagattggcatgagagtcgaggtctacggatgttcctataaatcagatgttgctgactttgatggccgaagctcacttctgtacaggttcaatcagaagttgatgagtactctcaaagatgtgatctccctgaagttcaagagcatgcaaggagatggggtcctgttccatggagaaggtcagcgtggagaccacatcaccttggaactccagaaggggaggctcgccctacacctcaatttgggtgacagcaaagcgcggctcagcagcagcttgccctctgccaccctgggcagcctcctggatgaccagcactggcactcggtcctcattgagcgggtgggcaagcaggtgaacttcacggtggacaagcacacacagcacttccgcaccaagggcgagacggatgccttagacattgactatgagcttagttttggaggaattccagtaccaggaaaacctgggacctttttaaagaaaaacttccatggatgcatcgaaaacctttactacaatggagtaaacataattgacctggctaagagacgaaagcatcagatctatactggcaatgtcactttttcctgctccgaaccacagattgtgcccatcacatttgtcaactccagcggcagctatttgctgctgcccggcaccccccaaattgatgggctctcagtgagtttccagtttcgaacatggaacaaggatggtctgcttctgtccacagagctgtctgagggctcgggaaccctgctgctgagcctggagggtggaatcctgagactcgtgattcagaaaatgacagaacgcgtagctgaaatcctcacaggcagcaacttgaatgatggcctgtggcactcggttagcatcaacgccaggaggaaccgcatcacgctcactctggatgatgaagcagcacccccggctccagacagcacttgggtgcagatttattctggaaatagctactattttggagggtgccccgacaatctcaccgattcccaatgtttaaatcccattaaggctttccaaggctgcatgaggctcatctttattgataaccagcccaaggacctcatttcagttcagcaaggttccctggggaattttagtgatttacacattgatctgtgtagcatcaaagacaggtgtttgccaaactactgtgaacatggaggaagctgctcccagtcctggactaccttctattgtaactgcagtgacacaagttacactggtgccacctgccacaactccatctacgagcaatcctgcgaggtgtacaggcaccaggggaatacagccggcttcttctacatcgactcagatggcagcggcccactgggacctctccaggtgtactgcaatatcactgaggacaagatctggacatcagtgcagcacaacaatacagagctgacccgagtgcggggcgctaaccctgagaagccctatgccatggccttggactacgggggcagcatggaacagctggaggccgtgatcgacggctctgagcactgtgagcaggaggtggcctaccactgcaggaggtcccgcctgctcaacacgccggatggaacaccatttacctggtggattgggcggtccaatgaaaggcacccttactggggaggttcccctcctggggtccagcagtgtgagtgtggcctagacgagagctgcctggacattcagcacttttgcaattgcgacgctgacaaggatgaatggacaaatgatactggctttctttccttcaaagaccacttgcctgtcactcagatagttatcactgataccgacagatcaaactcagaagccgcttggagaattggtcccttgcgttgctatggtgaccgacgcttctggaacgccgtctcattttatacagaagcctcttacctccactttcctaccttccatgcggaattcagtgccgatatttccttcttttttaaaaccacagcattatccggagttttcctagaaaatcttggcattaaagacttcattcgactcgaaataagctctccttcagagatcacctttgccatcgatgttgggaatggtcctgtggagcttgtagtccagtctccttctcttctgaatgacaaccaatggcactatgtccgggctgagaggaacctcaaggagacctccctgcaggtggacaaccttccaaggagcaccagggagacgtcggaggagggccattttcgactgcagctgaacagccagttgtttgtagggggaacgtcatccagacagaaaggcttcctaggatgcattcgctccttacacttgaatggacagaaaatggacctggaagagagggcaaaggtcacatctggagtcaggccaggctgccccggccactgcagcagctacggcagcatctgccacaacgggggcaagtgtgtggagaagcacaatggctacctgtgtgattgcaccaattcaccttatgaagggcccttttgcaaaaaagaggtttctgctgtttttgaggctggcacgtcggttacttacatgtttcaagaaccctatcctgtgaccaagaatataagcctctcatcctcagctatttacacagattcagctccatccaaggaaaacattgcacttagctttgtgacaacccaggcacccagtcttttgctctttatcaattcttcttctcaggacttcgtggttgttctgctctgcaagaatggaagcttacaggttcgctatcacctaaacaaggaagaaacccatgtattcaccattgatgcagataactttgctaacagaaggatgcaccacttgaagattaaccgagagggaagagagcttaccattcagatggaccagcaacttcgactcagttataacttctctccggaagtagagttcagggttataaggtcactcaccttgggcaaagtcacagagaatcttggtttggattctgaagttgctaaagcaaatgccatgggttttgctggatgcatgtcttccgtccagtacaaccacatagcaccactgaaggctgccctgcgccatgccactgtcgcgcctgtgactgtccatgggaccttgacggaatccagctgtggcttcatggtggactcagatgtgaatgcagtgaccacggtgcattcttcatcagatccttttgggaagacagatgagcgggaaccactcacaaatgctgttcgaagtgattcggcagtcatcggaggggtgatagcagtggtgatattcatcatcttctgtatcatcggcatcatgacccggttcctctaccagcacaagcagtcacatcgtacgagccagatgaaggagaaggaatatccagaaaatttggacagttccttcagaaatgaaattgacttgcaaaacacagtgagcgagtgtaaacgggaatatttcatctgagaaactgcagggttcctactactcttttttcttgttgttcaattatctcctccccctcttctctcctgtcttttgatttggtcattctctttattttctgcttgccatgtcttttctggaacatacttgcatccaccacagcatcaattcccttgatccagcccaagagaccaggcagccatggccactgccttcctctctgatgaacctatcgggtgaaaacgaccactcaagagactgacttcgccattcaagacaaggaagagacacatgtgtgcactcctgcatgttcagttctgtacttccagtttctaaaatgcactgttcagttttccaaccacttggtggttcaggcttgctttgaacctgagctcttaggcacatgacggtcattcctgacatcctccccagctcaagtctattcttaccatagaacccagggcagggagagaagaacctagaggcctggtttgctttggtggcattgtaaaaagagtaagagaggtttggtttgtggtggtttgctttctttaccataagcaatcccttgccttaactcatcaccctttttcactatgacccttagaccctgagtattttcaaatatatgattgctgatagtagtgaccaaaactactttgttcctttcttaccactctctcctggggccgacacgttgggacagcacaccatagcataaagctaggggatgcatggaaatagcagcttgaaactaggaggtaacaagaaagcttctaggaagtagatgttccatatcttcaaaatgcctcctccaattttgtaagaatgctagctaggtattcctgggattattatactgagatatatatatatacacacacacacacatatgtgtatatatgtatatatatatgtgagtatatatacacacacacacacacacacacatatatatatatacacacacgcacacatatatgttgctgcagcataaagaaattgaaataaaagtttaaa

SEQ ID NO: 122130 - DNA, 968 bp, Homo sapiens
  Payload ID: 3943
  Gene Symbol: COPRS
  Gene Name: coordinator of PRMT5, differentiation stimulator
  Uniprot ID: Q9NQ92
  ENST ID: ENST00000302362
  CDS Start-End: 139-693
gcgccccgccctcttggccggtacccaccccctccccaggctgattggcgcttctgcggcggatcctcgggcgggcagccgggccggcgcgtcacgtggcccacggcgtccagggcgaccagccgcgggccgcagggcatggaccttcaggccgccggggcccaggcgcagggggccgcggagccgtctcggggcccgccgctgcctagcgcgcggggggcgccccccagcccggaggctggctttgctacagctgaccactccagtcaggagagagagactgagaaggctatggatcgactagcccgtggaacacagagcattcctaatgacagtcctgcccggggtgagggcacccattctgaagaggaaggctttgccatggatgaggaggactctgatggagaactgaatacctgggagctgtcagaagggacaaactgtccacccaaggaacagcctggcgatctttttaatgaggactgggactcggagttgaaagcagatcaagggaatccatatgatgctgacgacatccaggagagcatttctcaagagcttaaaccttgggtgtgctgtgccccacaaggagacatgatctatgaccccagctggcaccatccgcctccactgataccctattattccaagatggtctttgaaacaggacagtttgacgatgctgaagattgagtgtggagctttctgccttgtaggtgggcgggcctccacgtcaagatctcttttcctgtcttggaggtgaaaagtcatatctgagaaaatgtttgcagtgacccctagtctggggtacacagaccagtgttccttattgacagtgttcaataaggccccgtcattctcgccagtctgttgttgttcttaatgggctcctccttgaaatgtgtgtgtgtttgtgtcaagaggagttgtgttctttgtaaataaaggttaaaaagagaaaccagtat

SEQ ID NO: 122131 - DNA, 1041 bp, Homo sapiens
  Payload ID: 3943
  Gene Symbol: COPRS
  Gene Name: coordinator of PRMT5, differentiation stimulator
  ENST ID: ENST00000378634
  CDS Start-End: 255-773
aacagccagccgcagcctggggcgggaagtcgcggggccgggctgggcgggggccgcggggccggggaagcgcctctggccggcctcgggccgccccgcgacacggagcgctgtttgggctcgcgctcgagctgaaaacggccaggccgcggggccgcggggctgcggggcggggaaagccgagggcgtgggtgggcgctctgggtcagcagagacggctgtccgcccgctgggcgccgctgcggatttggtaaatgggaggtgacgctggtgaccgagagccggggcccgctgccaggagcctgggcgagggccaggctggctttgctacagctgaccactccagtcaggagagagagactgagaaggctatggatcgactagcccgtggaacacagagcattcctaatgacagtcctgcccggggtgagggcacccattctgaagaggaaggctttgccatggatgaggaggactctgatggagaactgaatacctgggagctgtcagaagggacaaactgtccacccaaggaacagcctggcgatctttttaatgaggactgggactcggagttgaaagcagatcaagggaatccatatgatgctgacgacatccaggagagcatttctcaagagcttaaaccttgggtgtgctgtgccccacaaggagacatgatctatgaccccagctggcaccatccgcctccactgataccctattattccaagatggtctttgaaacaggacagtttgacgatgctgaagattgagtgtggagctttctgccttgtaggtgggcgggcctccacgtcaagatctcttttcctgtcttggaggtgaaaagtcatatctgagaaaatgtttgcagtgacccctagtctggggtacacagaccagtgttccttattgacagtgttcaataaggccccgtcattctcgccagtctgttgttgttcttaatgggctcctccttgaaatgtgtgtgtgtttgtgtcaagaggagttgtgttctttgtaaataaaggttaaaaagagaaa

SEQ ID NO: 122132 - DNA, 1062 bp, Homo sapiens
  Payload ID: 3943
  Gene Symbol: COPRS
  Gene Name: coordinator of PRMT5, differentiation stimulator
  ENST ID: ENST00000496655
  CDS Start-End: 93-341
ggcgcttctgcggcggatcctcgggcgggcagccgggccggcgcgtcacgtggcccacggcgtccagggcgaccagccgcgggccgcagggcatggaccttcaggccgccggggcccaggcgcagggggccgcggagccgtctcggggcccgccgctgcctagcgcgcggggggcgccccccagcccggaggctggctttgctacagctgaccactccagtcaggagagagagactgagaaggctatggatcgactagccagtcctctctgctgcttagtggccttctctgcccagttgaacagtaacctcctttggaagccttgcttggagcttccttaagggaagtcctgaacttttcttatgttcaaatccatccttctaccgagagaaacagcttgaaacgcccgtggaacacagagcattcctaatgacagtcctgcccggggtgagggcacccattctgaagaggaaggctttgccatggatgaggaggactctgatggagaactgaatacctgggagctgtcagaagggacaaactgtccacccaaggaacagcctggcgatctttttaatgaggactgggactcggagttgaaagcagatcaagggaatccatatgatgctgacgacatccaggagagcatttctcaagagcttaaaccttgggtgtgctgtgccccacaaggagacatgatctatgaccccagctggcaccatccgcctccactgataccctattattccaagatggtctttgaaacaggacagtttgacgatgctgaagattgagtgtggagctttctgccttgtaggtgggcgggcctccacgtcaagatctcttttcctgtcttggaggtgaaaagtcatatctgagaaaatgtttgcagtgacccctagtctggggtacacagaccagtgttccttattgacagtgttcaataaggccccgtcattctcgccagtctgttgttgttcttaatgggctcctccttgaaatgtgtgtgtgtttgtgtcaagaggagttgtgttctttgtaaataaaggttaaaaagagaaa

SEQ ID NO: 122133 - DNA, 471 bp, Homo sapiens
  Payload ID: 3943
  Gene Symbol: COPRS
  Gene Name: coordinator of PRMT5, differentiation stimulator
  ENST ID: ENST00000579741
  CDS Start-End: 162-471
aggccgcggggccgcggggctgcggggcggggaaagccgagggcgtgggtgggcgctctgggtcagcagagacggctgtccgcccgctgggcgccgctgcggatttggctggctttgctacagctgaccactccagtcaggagagagagactgagaaggctatggatcgactagcccgtggaacacagagcattcctaatgacagtcctgcccggggtgagggcacccattctgaagaggaaggctttgccatggatgaggaggactctgatggagaactgaatacctgggagctgtcagaagggacaaactgtccacccaaggaacagcctggcgatctttttaatgaggactgggactcggagttgaaagcagatcaagggaatccatatgatgctgacgacatccaggagagcatttctcaagagcttaaaccttgggtgtgctgtgccccacaaggagacatgatct

SEQ ID NO: 122134 - DNA, 422 bp, Homo sapiens
  Payload ID: 3943
  Gene Symbol: COPRS
  Gene Name: coordinator of PRMT5, differentiation stimulator
  ENST ID: ENST00000579984
  CDS Start-End: 15-221
gcgggccgcagggcatggaccttcaggccgccggggcccaggcgcagggggccgcggagccgtctcggggcccgccgctgcctagcgcgcggggggcgccccccagcccggagcccgtggaacacagagcattcctaatgacagtcctgcccggggtgagggcacccattctgaagaggaaggctttgccatggatgaggaggactctgatggagaactgaatacctgggagctgtcagaagggacaaactgtccacccaaggaacagcctggcgatctttttaatgaggactgggactcggagttgaaagcagatcaagggaatccatatgatgctgacgacatccaggagagcatttctcaagagcttaaaccttgggtgtgctgtgccccacaaggagacatgatctatgaccccagct

SEQ ID NO: 122135 - DNA, 2036 bp, Homo sapiens
  Payload ID: 3944
  Gene Symbol: COPS2
  Gene Name: COP9 signalosome subunit 2
  Uniprot ID: P61201
  ENST ID: ENST00000299259
  CDS Start-End: 84-1436
aagaagctgagagtgacgcctctgagccgcggaggattgtgggaggaggttgtctccaatttctcctccccctcccggccaagatgtctgacatggaggatgatttcatgtgcgatgatgaggaggactacgacctggaatactctgaagatagtaactccgagccaaatgtggatttggaaaatcagtactataattccaaagcattaaaagaagatgacccaaaagcggcattaagcagtttccaaaaggttttggaacttgaaggtgaaaaaggagaatggggatttaaagcactgaaacaaatgattaagattaacttcaagttgacaaactttccagaaatgatgaatagatataagcagctattgacctatattcggagtgcagtcacaagaaattattctgaaaaatccattaattctattcttgattatatctctacttctaaacagaattctgattttttatgtcagatggatttactgcaggaattctatgaaacaacactggaagctttgaaagatgctaagaatgatagactgtggtttaagacaaacacaaagcttggaaaattatatttagaacgagaggaatatggaaagcttcaaaaaattttacgccagttacatcagtcgtgccagactgatgatggagaagatgatctgaaaaaaggtacacagttattagaaatatatgctttggaaattcaaatgtacacagcacagaaaaataacaaaaaacttaaagcactctatgaacagtcacttcacatcaagtctgccatccctcatccactgattatgggagttatcagagaatgtggtggtaaaatgcacttgagggaaggtgaatttgaaaaggcacacactgatttttttgaagccttcaagaattatgatgaatctggaagtccaagacgaaccacttgcttaaaatatttggtcttagcaaatatgcttatgaaatcgggaataaatccatttgactcacaggaggccaagccgtacaaaaatgatccagaaattttagcaatgacgaatttagtaagtgcctatcagaataatgacatcactgaatttgaaaagattctaaaaacaaatcacagcaacatcatggatgatcctttcataagagaacacattgaagagcttttgcgaaacatcagaacacaagtgcttataaaattaattaagccttacacaagaatacatattccttttatttctaaggagttaaacatagatgtagctgatgtggagagcttgctggtgcagtgcatattggataacactattcatggccgaattgatcaagtcaaccaactccttgaactggatcatcagaagaggggtggtgcacgatatactgcactagataaatggaccaaccaactaaattctctcaaccaggctgtagtcagtaaactggcttaacagagaacaagcttttacagacgtccttaaggcaacagtgcagagatgtaatccttaaaagaactgggaatggcaaaactactgtcggttgatgtgtcctgaaaattattggagttatggcagaagtgcttttttgatcaactggtttgtgttttgctgctgcatttatcccaagaaaaacagctttaatctccagaagaaaaccaaaataccatgggatttatgctgtattgacatcttgccctaaacgtacaacatcatagtaatttgtcatgggcaacatgaccagagagaagatttttgtcatgattttaaatacactgacacgctactgttggttaaatttaaacatgttttacctgcagaaattctctcacaaataacctgcaataacttgaaatgcatacccttttgaacacttccttttctcatgtataaattaaaatgtttgctgcattttgcaaaatgtcaattctctaaaaatgtgtccgtatatttctgtacctgcagtgtagtaaaggtttagacgaaaccccataattatagtggcatactgtcacttaggtttcaagcagcaaaataaacagtgcagctcagaaa

SEQ ID NO: 122136 - DNA, 6628 bp, Homo sapiens
  Payload ID: 3944
  Gene Symbol: COPS2
  Gene Name: COP9 signalosome subunit 2
  Uniprot ID: P61201
  ENST ID: ENST00000388901
  CDS Start-End: 75-1406
agagtgacgcctctgagccgcggaggattgtgggaggaggttgtctccaatttctcctccccctcccggccaagatgtctgacatggaggatgatttcatgtgcgatgatgaggaggactacgacctggaatactctgaagatagtaactccgagccaaatgtggatttggaaaatcagtactataattccaaagcattaaaagaagatgacccaaaagcggcattaagcagtttccaaaaggttttggaacttgaaggtgaaaaaggagaatggggatttaaagcactgaaacaaatgattaagattaacttcaagttgacaaactttccagaaatgatgaatagatataagcagctattgacctatattcggagtgcagtcacaagaaattattctgaaaaatccattaattctattcttgattatatctctacttctaaacagatggatttactgcaggaattctatgaaacaacactggaagctttgaaagatgctaagaatgatagactgtggtttaagacaaacacaaagcttggaaaattatatttagaacgagaggaatatggaaagcttcaaaaaattttacgccagttacatcagtcgtgccagactgatgatggagaagatgatctgaaaaaaggtacacagttattagaaatatatgctttggaaattcaaatgtacacagcacagaaaaataacaaaaaacttaaagcactctatgaacagtcacttcacatcaagtctgccatccctcatccactgattatgggagttatcagagaatgtggtggtaaaatgcacttgagggaaggtgaatttgaaaaggcacacactgatttttttgaagccttcaagaattatgatgaatctggaagtccaagacgaaccacttgcttaaaatatttggtcttagcaaatatgcttatgaaatcgggaataaatccatttgactcacaggaggccaagccgtacaaaaatgatccagaaattttagcaatgacgaatttagtaagtgcctatcagaataatgacatcactgaatttgaaaagattctaaaaacaaatcacagcaacatcatggatgatcctttcataagagaacacattgaagagcttttgcgaaacatcagaacacaagtgcttataaaattaattaagccttacacaagaatacatattccttttatttctaaggagttaaacatagatgtagctgatgtggagagcttgctggtgcagtgcatattggataacactattcatggccgaattgatcaagtcaaccaactccttgaactggatcatcagaagaggggtggtgcacgatatactgcactagataaatggaccaaccaactaaattctctcaaccaggctgtagtcagtaaactggcttaacagagaacaagcttttacagacgtccttaaggcaacagtgcagagatgtaatccttaaaagaactgggaatggcaaaactactgtcggttgatgtgtcctgaaaattattggagttatggcagaagtgcttttttgatcaactggtttgtgttttgctgctgcatttatcccaagaaaaacagctttaatctccagaagaaaaccaaaataccatgggatttatgctgtattgacatcttgccctaaacgtacaacatcatagtaatttgtcatgggcaacatgaccagagagaagatttttgtcatgattttaaatacactgacacgctactgttggttaaatttaaacatgttttacctgcagaaattctctcacaaataacctgcaataacttgaaatgcatacccttttgaacacttccttttctcatgtataaattaaaatgtttgctgcattttgcaaaatgtcaattctctaaaaatgtgtccgtatatttctgtacctgcagtgtagtaaaggtttagacgaaaccccataattatagtggcatactgtcacttaggtttcaagcagcaaaataaacagtgcagctcagaaattgtagtttggttcttgatgtgtttttattacatttggagttgttttgttttttagtaccttcgaaatttcaaattattttatcttcagttaatgattttaaaaagcctgggggcaaataagttggttatttgctttcaagtttttaaaagtagtctttattgatagagtaaggagaactactttctaacaaaacacgtgcatagttatgacagtgatgctttaaaggaataaaattctttttttttaaagagtgatattccttttcaaaagaatactaactctcagaatgttcactttaaacgaatatgccagaacatagacagctaaatgaatgttactctgcatagtgatcatgctggaaggttatttcctaatgccagcaatctaccattgcccaaaacctgctgagtttactcttttagaattgcattcaaagttaatttgtcacacacactaaactttatgattatacattgttttaaaaaatatagtattaggaagcttgattatttttagttaccattacttggcaccaaatgaaagtttccaaaacttccacctaactttgaggtaatgcagaaagtatataactggctttgaaggcaatcccaaaagagttttaaaggttttttgagcagtggcagtatacttaggagaatgaactgtggccttccaaggtaactaccttaaaggaactcagctcatttgaatgtattgagttttggatgtatttgtttcattttttaaaaagttcacattattttatagtgtcgaaaggaagaactaggattaacataatttctttggtttttctattgcttgttattattatgtaaaaactgggtggcagttcagaaggaagattgtggttacagaagagtgacaaccaagaattttttgatcattaaatcagattttataaacagtggaaggagcatggacttaaaacaaggcatgcttattcggttttgtcaaaattttacgaaaatatgtgatatatatttatactaaaaatatataatccttagatttagaaaagcaatcagttaatgtctttagcagactaaagcagtattaaacacaggtacaagttggaaattgtagaaaacggaaagaaaacaaaagacaaaatgtctatggtagggaataaaagtttaagatattataaaattatgtgtattttctcttttacataaatcatttgtgaaaagtgtgctaaactttttttacaagagtgatattaattaggatttatttttcaatataatttggagaccctttgttatccaaataaaaatgatgagtttttgtgcctgtattcaaatatgtatgcatgtgataacccttgaaagctaaagcccttcttaacttttgagttgatggaattagaattcaaagatttgaatgaaatgatttaacctttatcctccaattcttacagtgcccagttctcctgtgctatctttgctttgtacaatagtgcatcttccactttctagagagaaagcatgcacttgttatttggaaaactgggctaaatatataacagtatccaaagttataccataataatttattgtaattgtgtattacatagctttgtttacccagatataggtgcgttcttttttttctgttagtcatctgtgacttttgttctggaatacaggtttttaaatatatcttaacagtctgactaacttaaaataatttattcttcccttaaaacatttttctgtgtttttgtgcatcaaatattgtagagttgaaatcttagagattgcttatcgaaatataaatttaggggaagttaaaaatcgattggcaaatttgtagcatttattcactgattaaatcttttccacttttgtgaaaaccataccagtggtttacatcatattgtaatgtgttcatctcattcttctttttatccctaaacctagctaaaagttactgcaaagaaatctttggctgccacaagtagatgctctctactacaagagctggatttccattactcactcttgctcttacattaaagttgttgattaaatactttttctctacatcttaatgtaacataactgatttctttttaaagatgagtatatatgtactaagtaatgctctcattacatgagtcccttctaactacaggctgatacatctttcaggaaaactgagaacctaatatttaagtgaggcctattttaaatgagctatactgtgggtggtagtgtttgttaccttatgtaagacttaggtttgtcttagactgaaaaactcttattcttaatatttaaaatatccatgatggtagaaattttgtgggaaattttcttttttaatcaatagttacagttcttcagtaaacacaggtatgtatgcttttgtggtgtcagtgtcagtctaaatctatgggtgaagcagttagtccataagacaaaaaattatttgcctagtggattccctttacctctttttaagaagctcagagatctgtaatcattaatttactaaggattttttaaaatattattttagtcacttttaaacctgaaaatttctcttttgatttagatttttgaagtgaggcttgagcatacacaagtaaagctgggagtttcattcttcatatgggatttatgactaaatatttctagcattttgaagaagataaacattttgaactgaagtatataacaaaaaaaggaatttgacatttaactattttgtatcaaagtgtttaagaacactatccagaacaagagatggagtatcaggtttcagaatgtgacgcaaaaggcatttggtcttcatttatgtgaccacaattaaaattttcctctttttttctttttctggaggttttcttttagttttcattgttttaggtttttttttcccccaaatcagcatcctatttatatttgtttgatacggtttttttgtttttgtttttgttttgctttttttggaaacagtttcgctcttgtcacccaggctggagtgcagtggcgcaatctcagttcactgccacctccacctcccgggttcaagcgattctcctgcctcaatctccggagtagctgggattacagacacccgccaccacgcccagctaatttttgtgtttttagtagagacaagatttcaccatgttggccaggctggtctcaaactcctgacctcaggcgatccaccgctttggcctcccatagtgctgggattacaggcgtgagccaccacgcccagcctgatacagttttaagcaggaatttggcagaaatttcgtaacgaagacaaattggaggttctctttaactcgagattattaaatttatagtaacttcttgggccattaaaatgtgagtttaaatgccatttggaggatttgtgttatattaagcaccacaaatttaaactgtcaactagtgattctacatgtttctcaaaatgctaaagtttagcatcacttacttgcttttgaattttaaggagattcgtcttaggtaatgtctcagaagaaaccagtgtgtggttctctaaaattttacttttttactgtcacgtataataatatctaaactacctgtagtagttaaaaatattacggcatcaaaggtatatgccaagtgtaccttaaaaccctgtgacaggaaaaaagaaaaaattatttcttaagtacttactattcgggggcaactttgttccgtgttggcaaaattatgaactttgctcagaatttccacatgaatagctgaccaaaacttttttgtgtgcatatgtatacatatgtaataagtgaaacatacttgtgggagtacaaaattcatcaccagtttatcacagtaattttccagttttctattttacttaatatcacttatttctgacacaggcaaatgtcatatgccatgaaaagaattaccagtgtaccagtaacttgcgtgttatgactaggtttcatgtggaagactgtccaaatttacataatctagagtaattttttaattctgaagtaagggcattttaaaattaattgctaaaggttgttttattgtacatccattttatgggagtttagagtttagaaaaagtaatctctagcgtcatcccatgaagttgtcaaaagttttggcatgcttattagcaacatattaatgccaagtgttgagtatctaatttctgttcaaatgtttgcctatcccttactgtttacgacagtaataaatttttatgcatctattttaaataacactgaagaaaattaaaatatatttcaagaaatggagcaatgacatggaaaatagaaagttgtttggttttgcaatgtgttacataattggttgcattataaattttctccattttgtttatgataagctaatataaaaggtatcaaattccttgagctaacactaggtgggaaggaagtagtaggtgattaggaatgtaacaggatgtctgcctgaaatggtcagttccaccaattaataattgagaactgattatatgtgcaggatgtgtcataagatgctgtaaggcttaaatactcaagggtttttttatttatctggaagtgcacattccttattggtaataaaaaatacgtaatct

SEQ ID NO: 122137 - DNA, 1580 bp, Homo sapiens
  Payload ID: 3944
  Gene Symbol: COPS2
  Gene Name: COP9 signalosome subunit 2
  ENST ID: ENST00000542928
  CDS Start-End: 27-1166
aatttctcctccccctcccggccaagatgtctgacatggaggatgatttcatgtgcgatgatgaggaggactacgacctgacaaactttccagaaatgatgaatagatataagcagctattgacctatattcggagtgcagtcacaagaaattattctgaaaaatccattaattctattcttgattatatctctacttctaaacagatggatttactgcaggaattctatgaaacaacactggaagctttgaaagatgctaagaatgatagactgtggtttaagacaaacacaaagcttggaaaattatatttagaacgagaggaatatggaaagcttcaaaaaattttacgccagttacatcagtcgtgccagactgatgatggagaagatgatctgaaaaaaggtacacagttattagaaatatatgctttggaaattcaaatgtacacagcacagaaaaataacaaaaaacttaaagcactctatgaacagtcacttcacatcaagtctgccatccctcatccactgattatgggagttatcagagaatgtggtggtaaaatgcacttgagggaaggtgaatttgaaaaggcacacactgatttttttgaagccttcaagaattatgatgaatctggaagtccaagacgaaccacttgcttaaaatatttggtcttagcaaatatgcttatgaaatcgggaataaatccatttgactcacaggaggccaagccgtacaaaaatgatccagaaattttagcaatgacgaatttagtaagtgcctatcagaataatgacatcactgaatttgaaaagattctaaaaacaaatcacagcaacatcatggatgatcctttcataagagaacacattgaagagcttttgcgaaacatcagaacacaagtgcttataaaattaattaagccttacacaagaatacatattccttttatttctaaggagttaaacatagatgtagctgatgtggagagcttgctggtgcagtgcatattggataacactattcatggccgaattgatcaagtcaaccaactccttgaactggatcatcagaagaggggtggtgcacgatatactgcactagataaatggaccaaccaactaaattctctcaaccaggctgtagtcagtaaactggcttaacagagaacaagcttttacagacgtccttaaggcaacagtgcagagatgtaatccttaaaagaactgggaatggcaaaactactgtcggttgatgtgtcctgaaaattattggagttatggcagaagtgcttttttgatcaactggtttgtgttttgctgctgcatttatcccaagaaaaacagctttaatctccagaagaaaaccaaaataccatgggatttatgctgtattgacatcttgccctaaacgtacaacatcatagtaatttgtcatgggcaacatgaccagagagaagatttttgtcatgattttaaatacactgacacgctactgttggttaaatttaaacatgttttacctgcagaaattctctcacaaataacctgcaataacttgaaatgcatacccttttg

SEQ ID NO: 122138 - DNA, 803 bp, Homo sapiens
  Payload ID: 3944
  Gene Symbol: COPS2
  Gene Name: COP9 signalosome subunit 2
  ENST ID: ENST00000558843
  CDS Start-End: 13-803
ctcccggccaagatgtctgacatggaggatgatttcatgtgcgatgatgaggaggactacgacctggaatactctgaagatagtaactccgagccaaatgtggatttggaaaatcagtactataattccaaagcattaaaagaagatgacccaaaagcggcattaagcagtttccaaaaggttttggaacttgaaggtgaaaaaggagaatggggatttaaagcactgaaacaaatgattaagattaacttcaagttgacaaactttccagaaatgatgaatagatataagcagctattgacctatattcggagtgcagtcacaagaaattattctgaaaaatccattaattctattcttgattatatctctacttctaaacagatggatttactgcaggaattctatgaaacaacactggaagctttgaaagatgctaagaatgatagactgtggtttaagacaaacacaaagcttggaaaattatatttagaacgagaggaatatggaaagcttcaaaaaattttacgccagttacatcagtcgtgccagactgatgatggagaagatgatctgaaaaaaggtacacagttattagaaatatatgctttggaaattcaaatgtacacagcacagaaaaataacaaaaaacttaaagcactctatgaacagtcacttcacatcaagtctgccatccctcatccactgattatgggagttatcagagaatgtggtggtaaaatgcacttgagggaaggtgaatttgaaaaggcacacactgatttttttgaagccttcaagaa

SEQ ID NO: 122139 - DNA, 575 bp, Homo sapiens
  Payload ID: 3944
  Gene Symbol: COPS2
  Gene Name: COP9 signalosome subunit 2
  ENST ID: ENST00000561248
  CDS Start-End: 27-575
aatttctcctccccctcccggccaagatgtctgacatggaggatgatttcatgtgcgatgatgaggaggactacgacctgacaaactttccagaaatgatgaatagatataagcagctattgacctatattcggagtgcagtcacaagaaattattctgaaaaatccattaattctattcttgattatatctctacttctaaacagatggatttactgcaggaattctatgaaacaacactggaagctttgaaagatgctaagaatgatagactgtggtttaagacaaacacaaagcttggaaaattatatttagaacgagaggaatatggaaagcttcaaaaaattttacgccagttacatcagtcgtgccagactgatgatggagaagatgatctgaaaaaaggtacacagttattagaaatatatgctttggaaattcaaatgtacacagcacagaaaaataacaaaaaacttaaagcactctatgaacagtcacttcacatcaagtctgccatccctcatccactgattatgggagttatcagagaatgtggtggtaaaatgcacttgagg

SEQ ID NO: 122140 - DNA, 514 bp, Homo sapiens
  Payload ID: 3944
  Gene Symbol: COPS2
  Gene Name: COP9 signalosome subunit 2
  ENST ID: ENST00000560240
  CDS Start-End: 1-168
aaaacaaatcacagcaacatcatggatgatcctttcataagagaacacattgaagagcttttgcgaaacatcagaacacaagtgcttataaaattaattaagccttacacaagaatacatattccttttatttctaagatggagtctcgctcttgttgcctaggctgaagtgcagtggcacgatctcggctcactgcagcctccgcctcccgggttcaagcgattctcctgcctcagcctcccaagtggctggaattacagagaaaggagaggaagatttggacacagacacacagagaagaggtcaaagtgaagacagaaccagagattggagttttgctgccataagccaagaaaccaagagccaagaaacaccagaaggtaggagaaaggcaaggaagaacttcccctctaaagccttcaaagaaagaaaatataaccctgccagcaccttgatttcagacttctggctccagaactgtgagagaataaatttctgttgttttaagctacc

SEQ ID NO: 122141 - DNA, 1641 bp, Homo sapiens
  Payload ID: 3945
  Gene Symbol: COPS3
  Gene Name: COP9 signalosome subunit 3
  Uniprot ID: Q9UNS2
  ENST ID: ENST00000268717
  CDS Start-End: 108-1379
tcgccgctcgcgaggacctcaggtggatcgccgcggcccctcctcccagagcggcagccttttcccgcgcgtgctgccttcgccgctcgggccgcccgggggaaaacatggcgtctgccctggagcagttcgtgaacagtgtccgacagctctcagctcaagggcaaatgacacagctttgtgaactgatcaacaagagtggggaactccttgcgaagaacttatcccatctggacactgtgctcggggctctggatgtacaagaacactccttgggcgtccttgctgttttgtttgtgaagttttctatgcccagtgttcctgacttcgaaacgctattctcacaggttcagctcttcatcagcacttgtaatggggagcacattcgatatgcaacagacacttttgctgggctttgccatcagctaacaaatgcacttgtggaaagaaaacagcccctgcgaggaattggcatccttaagcaagccatagacaagatgcagatgaatacaaaccagctgacctcaatacatgctgatctctgccagctttgtttgctagcaaaatgctttaagcctgcccttccatatcttgacgtggatatgatggatatctgtaaagagaatggagcctatgatgcaaaacactttttatgttactattattatggagggatgatctatactgggctgaagaactttgaaagagctctctacttttatgaacaggctataactactcctgccatggcggtcagtcatatcatgttggaatcatataaaaagtatattttagtgtctttgatattacttggcaaagtacaacagctaccaaaatatacatctcaaattgtgggtagattcattaagcctcttagcaatgcataccacgagttagcacaagtgtattcaaccaacaacccctcagaactccgaaacctggtgaataagcacagtgaaaccttcactcgcgataacaacatggggctggtgaagcaatgcttgtcatctctttataagaagaatattcagaggctaacaaagacctttttaactctatcattacaagatatggcaagtcgtgtgcagttgtctggacctcaggaggcagagaaatacgttctgcacatgatagaagatggtgagatttttgcaagtattaaccagaaggacggtatggtcagtttccatgataaccctgaaaaatataataacccagccatgcttcataacattgatcaggagatgctgaagtgcattgagctggatgagcggctgaaagccatggaccaggagatcacagtgaaccctcagtttgtacaaaagagtatgggctcacaagaagatgattcaggaaacaaaccatccagttattcttgaaactaacatccatcctgagctaaacaagagaaactaccatcttggccagtgacaagtgttcggagggcagcagagaggaccaagcctgtgtcacctggagactaagaaattaagttttgttttgacatcttcagtcctgtgtgctttcagaaaaccattttctctgcaaagaaaggaaacagatttgcaaactttaaagtctgtcgtggatttatttatcctcagattattgttactgcattaaatctacctttttgtttta

SEQ ID NO: 122142 - DNA, 1009 bp, Homo sapiens
  Payload ID: 3945
  Gene Symbol: COPS3
  Gene Name: COP9 signalosome subunit 3
  ENST ID: ENST00000417352
  CDS Start-End: 54-1009
cagccttttcccgcgcgtgctgccttcgccgctcgggccgcccgggggaaaacatggcgtctgccctggagcagttcgtgaacagtgtccgacagctctcagctcaagggcaaatgacacagctttgtgaactgatcaacaagagtggggaactccttgcgaagaacttatcccatctggacactgtgctcggggctctggatgtacaagaacactccttgggcgtccttgctgttttgtttgtgaagttttctatgcccagtgttcctgacttcgaaacgctattctcacaggttcagctcttcatcagcacttgtaatggggagcacattcgatatgcaacagacacttttgctgggctttgccatcagctaacaaatgcacttgtggaaagaaaacagcccctgcgaggaattggcatccttaagcaagccatagacaagatgcagatgaatacaaaccagctgacctcaatacatgctgatctctgccagctttgtttgctagcaaaatgctttaagcctgcccttccatatcttgacgtggatatgatggatatctgtaaagagaatggagcctatgatgcaaaacactttttatgttactattattatggagggatgatctatactgggctgaagaactttgaaagagctctctacttttatgaacaggctataactactcctgccatggcggtcagtcatatcatgttggaatcatataaaaagtatattttagtgtctttgatattacttggcaaagtacaacagctaccaaaatatacatctcaaattgtgggtagattcattaagagacagagtctcgctatgttggccaggttggtgttgaactcctggcctcaagcagtccttctgcgtctgcctcccagagtgctgggattacagcctcttagcaatgcataccacgagttagcacaagtgtattcaaccaacaacccctcagaactccgaaacctggtgaataagcacagtgaaaccttcactcg

SEQ ID NO: 122143 - DNA, 1394 bp, Homo sapiens
  Payload ID: 3945
  Gene Symbol: COPS3
  Gene Name: COP9 signalosome subunit 3
  ENST ID: ENST00000439936
  CDS Start-End: 133-1170
gcgagtccgttctgggtgtcttggctctatggctcgcctctgccagctcctccgctgccaggcggcgcacgctcgggaacctgtgcgcctattttggtcctacagaatgctgcggaagctctcgctcggcaaatgacacagctttgtgaactgatcaacaagagtggggaactccttgcgaagaacttatcccatctggacactgtgctcggggctctggatgtacaagaacactccttgggcgtccttgctgttttgtttgtgaagttttctatgcccagtgttcctgacttcgaaacgctattctcacaggttcagctcttcatcagcacttgtaatggggagcacattcgatatgcaacagacacttttgctgggctttgccatcagctaacaaatgcacttgtggaaagaaaacagcccctgcgaggaattggcatccttaagcaagccatagacaagatgcagatgaatacaaaccagctgacctcaatacatgctgatctctgccagctttgtttgctagcaaaatgctttaagcctgcccttccatatcttgacgtggatatgatggatatctgtaaagagaatggagcctatgatgcaaaacactttttatgttactattattatggagggatgatctatactgggctgaagaactttgaaagagctctctacttttatgaacaggctataactactcctgccatggcggtcagtcatatcatgttggaatcatataaaaagtatattttagtgtctttgatattacttggcaaagtacaacagctaccaaaatatacatctcaaattgtgggtagattcattaagacctttttaactctatcattacaagatatggcaagtcgtgtgcagttgtctggacctcaggaggcagagaaatacgttctgcacatgatagaagatggtgagatttttgcaagtattaaccagaaggacggtatggtcagtttccatgataaccctgaaaaatataataacccagccatgcttcataacattgatcaggagatgctgaagtgcattgagctggatgagcggctgaaagccatggaccaggagatcacagtgaaccctcagtttgtacaaaagagtatgggctcacaagaagatgattcaggaaacaaaccatccagttattcttgaaactaacatccatcctgagctaaacaagagaaactaccatcttggccagtgacaagtgttcggagggcagcagagaggaccaagcctgtgtcacctggagactaagaaattaagttttgttttgacatcttcagtcctgtgtgctttcagaaaaccattttctctgcaaagaaaggaaacagatttgcaaactttaaagtctgtcgtggatttatttatcctca

SEQ ID NO: 122144 - DNA, 1699 bp, Homo sapiens
  Payload ID: 3945
  Gene Symbol: COPS3
  Gene Name: COP9 signalosome subunit 3
  Uniprot ID: Q9UNS2
  ENST ID: ENST00000539941
  CDS Start-End: 210-1421
ggtgattggcgcaccgccatgtcatctttgccgccgatccgcagcttgctgactaggccgccgggagcgggcgggaggcgagtccgttctgggtgtcttggctctatggctcgcctctgccagctcctccgctgccaggcggcgcacgctcgggaacctgtgcgcctattttggtcctacagaatgctgcggaagctctcgctcggcaaatgacacagctttgtgaactgatcaacaagagtggggaactccttgcgaagaacttatcccatctggacactgtgctcggggctctggatgtacaagaacactccttgggcgtccttgctgttttgtttgtgaagttttctatgcccagtgttcctgacttcgaaacgctattctcacaggttcagctcttcatcagcacttgtaatggggagcacattcgatatgcaacagacacttttgctgggctttgccatcagctaacaaatgcacttgtggaaagaaaacagcccctgcgaggaattggcatccttaagcaagccatagacaagatgcagatgaatacaaaccagctgacctcaatacatgctgatctctgccagctttgtttgctagcaaaatgctttaagcctgcccttccatatcttgacgtggatatgatggatatctgtaaagagaatggagcctatgatgcaaaacactttttatgttactattattatggagggatgatctatactgggctgaagaactttgaaagagctctctacttttatgaacaggctataactactcctgccatggcggtcagtcatatcatgttggaatcatataaaaagtatattttagtgtctttgatattacttggcaaagtacaacagctaccaaaatatacatctcaaattgtgggtagattcattaagcctcttagcaatgcataccacgagttagcacaagtgtattcaaccaacaacccctcagaactccgaaacctggtgaataagcacagtgaaaccttcactcgcgataacaacatggggctggtgaagcaatgcttgtcatctctttataagaagaatattcagaggctaacaaagacctttttaactctatcattacaagatatggcaagtcgtgtgcagttgtctggacctcaggaggcagagaaatacgttctgcacatgatagaagatggtgagatttttgcaagtattaaccagaaggacggtatggtcagtttccatgataaccctgaaaaatataataacccagccatgcttcataacattgatcaggagatgctgaagtgcattgagctggatgagcggctgaaagccatggaccaggagatcacagtgaaccctcagtttgtacaaaagagtatgggctcacaagaagatgattcaggaaacaaaccatccagttattcttgaaactaacatccatcctgagctaaacaagagaaactaccatcttggccagtgacaagtgttcggagggcagcagagaggaccaagcctgtgtcacctggagactaagaaattaagttttgttttgacatcttcagtcctgtgtgctttcagaaaaccattttctctgcaaagaaaggaaacagatttgcaaactttaaagtctgtcgtggatttatttatcctcagattattgttactgcattaaatctacctttttgttttaagttgcttgaacatta

SEQ ID NO: 122145 - DNA, 876 bp, Homo sapiens
  Payload ID: 3945
  Gene Symbol: COPS3
  Gene Name: COP9 signalosome subunit 3
  ENST ID: ENST00000584216
  CDS Start-End: 88-411
aggtggatcgccgcggcccctcctcccagagcggcagccttttcccgcgcgtgctgccttcgccgctcgggccgcccgggggaaaacatggcgtctgccctggagcagttcgtgaacagtgtccgacagctctcagctcaagggcaaatgacacagctttgtgaactgatcaacaagagtggggaactccttgcgaagaacttatcccatctggacactgtgctcggggctctggatgtacaagaacactccttgggcgtccttgctgttttgtttgtgaagttttctatgcccagtgttcctgacttcgaaacgctattctcacaggttcagctcttcatcagcacttgtaatggggagcacattcgatatgcaacagacacttcccctgcgaggaattggcatccttaagcaagccatagacaagatgcagatgaatacaaaccagctgacctcaatacatgctgatctctgccagctttgtttgctagcaaaatgctttaagcctgcccttccatatcttgacgtggatatgatggatatctgtaaagagaatggagcctatgatgcaaaacactttttatgttactattattatggagggatgatctatactgggctgaagaactttgaaagagctctctacttttatgaacaggctataactactcctgccatggcggtcagtcatatcatgttggaatcatataaaaagtatattttagtgtctttgatattacttggcaaagtacaacagctaccaaaatatacatctcaaattgtgggtagattcattaagcctcttagcaatgcataccacgagttagcacaagtgtattcaaccaacaacccctcagaactccgaaacctggtgaa

SEQ ID NO: 122146 - DNA, 656 bp, Homo sapiens
  Payload ID: 3945
  Gene Symbol: COPS3
  Gene Name: COP9 signalosome subunit 3
  ENST ID: ENST00000477299
  CDS Start-End: 61-411
agagcggcagccttttcccgcgcgtgctgccttcgccgctcgggccgcccgggggaaaacatggcgtctgccctggagcagttcgtgaacagtgtccgacagctctcagctcaagggcaaatgacacagctttgtgaactgatcaacaagagtggggaactccttgcgaagaacttatcccatctggacactgtgctcggggctctggatgtacaagaacactccttgggcgtccttgctgttttgtttgtgaagttttctatgcccagtgttcctgacttcgaaacgctattctcacaggttcagctcttcatcagcacttgtaatggggagcacattcgatatgcaacagacacttttgctgggctttgccatcagctaacaaatgcacttgtggaaagaaaacagtgacaacataagatccaatgtgctgccatctttgagaacttatctgaaagagatgtcatttctgacagcccctgcgaggaattggcatccttaagcaagccatagacaagatgcagatgaatacaaaccagctgacctcaatacatgctgatctctgccaggctataactactcctgccatggcggtcagtcatatcatgttggaatcatataaaaagtatattttagtgtctttgatattacttggc

SEQ ID NO: 122147 - DNA, 752 bp, Homo sapiens
  Payload ID: 3945
  Gene Symbol: COPS3
  Gene Name: COP9 signalosome subunit 3
  ENST ID: ENST00000577210
  CDS Start-End: 1-63
atggcgtctgccctggagcagttcgtgaacagtgtccgacagctctcagctcaaggtttgtgaagttttctatgcccagtgttcctgacttcgaaacgctattctcacaggttcagctcttcatcagcacttgtaatggggagcacattcgatatgcaacagacacttcccctgcgaggaattggcatccttaagcaagccatagacaagatgcagatgaatacaaaccagctgacctcaatacatgctgatctctgccagctttgtttgctagcaaaatgctttaagcctgcccttccatatcttgacgtggatatgatggatatctgtaaagagaatggagcctatgatgcaaaacactttttatgttactattattatggagggatgatctatactgggctgaagaactttgaaagagctctctacttttatgaacaggctataactactcctgccatggcggtcagtcatatcatgttggaatcatataaaaagtatattttagtgtctttgatattacttggcaaagtacaacagctaccaaaatatacatctcaaattgtgggtagattcattaagcctcttagcaatgcataccacgagttagcacaagtgtattcaaccaacaacccctcagaactccgaaacctggtgaataagcacagtgaaaccttcactcgcgataacaacatggggctggtgaagcaatgcttgtcatctctttataagaagaatattcagaggctaac

SEQ ID NO: 122148 - DNA, 809 bp, Homo sapiens
  Payload ID: 3945
  Gene Symbol: COPS3
  Gene Name: COP9 signalosome subunit 3
  ENST ID: ENST00000492672
  CDS Start-End: 61-156
agagcggcagccttttcccgcgcgtgctgccttcgccgctcgggccgcccgggggaaaacatggcgtctgccctggagcagttcgtgaacagtgtccgacagctctcagctcaagtgttgttcctgttttccagggcaaatgacacagctttgtgaactgatcaacaagagtggggaactccttgcgaagaacttatcccatctggacactgtgctcggggctctggatgtacaagaacactccttgggcgtccttgctgttttgtttgtgaagttttctatgcccagtgttcctgacttcgaaacgctattctcacaggttcagctcttcatcagcacttgtaatggggagcacattcgatatgcaacagacacttttgctgggctttgccatcagctaacaaatgcacttgtggaaagaaaacagcccctgcgaggaattggcatccttaagcaagccatagacaagatgcagatgaatacaaaccagctgacctcaatacatgctgatctctgccagctttgtttgctagcaaaatgctttaagcctgcccttccatatcttgacgtggatatgatggatatctgtaaagagaatggagcctatgatgcaaaacactttttatgttactattattatggagggatgatctatactgggctgaagaactttgaaagagctctctacttttatgaacaggctataactactcctgccatggcggtcagtcatatcatgttggaatcatataaaaagtatattttagtgtctttgatattacttggcaaagtacaacagctaccaaaat

SEQ ID NO: 122149 - DNA, 639 bp, Homo sapiens
  Payload ID: 3945
  Gene Symbol: COPS3
  Gene Name: COP9 signalosome subunit 3
  ENST ID: ENST00000577246
  CDS Start-End: 88-150
aggtggatcgccgcggcccctcctcccagagcggcagccttttcccgcgcgtgctgccttcgccgctcgggccgcccgggggaaaacatggcgtctgccctggagcagttcgtgaacagtgtccgacagctctcagctcaaggtttgtgaagttttctatgcccagtgttcctgacttcgaaacgctattctcacaggttcagctcttcatcagcacttgtaatggggagcacattcgatatgcaacagacacttttgctgggctttgccatcagctaacaaatgcacttgtggaaagaaaacagcccctgcgaggaattggcatccttaagcaagccatagacaagatgcagatgaatacaaaccagctgacctcaatacatgctgatctctgccagctttgtttgctagcaaaatgctttaagcctgcccttccatatcttgacgtggatatgatggatatctgtaaagagaatggagcctatgatgcaaaacactttttatgttactattattatggagggatgatctatactgggctgaagaactttgaaagagctctctacttttatgaacaggctataactactcctgccatggcggtcagtcatatcatgttggaatcatataaaaagtata

SEQ ID NO: 122150 - DNA, 1625 bp, Homo sapiens
  Payload ID: 3945
  Gene Symbol: COPS3
  Gene Name: COP9 signalosome subunit 3
  ENST ID: ENST00000578317
  CDS Start-End: 6-101
aaaacatggcgtctgccctggagcagttcgtgaacagtgtccgacagctctcagctcaagtgttgttcctgttttccagggcaaatgacacagctttgtgaactgatcaacaagagtggggaactccttgcgaagaacttatcccatctggacactgtgctcggggctctggatgtacaagaacactccttgggcgtccttgctgttttgtttgtgaagttttctatgcccagtgttcctgacttcgaaacgctattctcacaggttcagctcttcatcagcacttgtaatggggagcacattcgatatgcaacagacacttttgctgggctttgccatcagctaacaaatgcacttgtggaaagaaaacagtgacaacataagatccaatgtgctgccatctttgagaacttatctgaaagagatgtcatttctgacagcccctgcgaggaattggcatccttaagcaagccatagacaagatgcagatgaatacaaaccagctgacctcaatacatgctgatctctgccagctttgtttgctagcaaaatgctttaagcctgcccttccatatcttgacgtggatatgatggatatctgtaaagagaatggagcctatgatgcaaaacactttttatgttactattattatggagggatgatctatactgggctgaagaactttgaaagagctctctacttttatgaacaggctataactactcctgccatggcggtcagtcatatcatgttggaatcatataaaaagtatattttagtgtctttgatattacttggcaaagtacaacagctaccaaaatatacatctcaaattgtgggtagattcattaagcctcttagcaatgcataccacgagttagcacaagtgtattcaaccaacaacccctcagaactccgaaacctggtgaataagcacagtgaaaccttcactcgcgataacaacatggggctggtgaagcaatgcttgtcatctctttataagaagaatattcagaggctaacaaagacctttttaactctatcattacaagatatggcaagtcgtgtgcagttgtctggacctcaggaggcagagaaatacgttctgcacatgatagaagatggtgagatttttgcaagtattaaccagaaggacggtatggtcagtttccatgataaccctgaaaaatataataacccagccatgcttcataacattgatcaggagatgctgaagtgcattgagctggatgagcggctgaaagccatggaccaggagatcacagtgaaccctcagtttgtacaaaagagtatgggctcacaagaagatgattcaggaaacaaaccatccagttattcttgaaactaacatccatcctgagctaaacaagagaaactaccatcttggccagtgacaagtgttcggagggcagcagagaggaccaagcctgtgtcacctggagactaagaaattaagttttgttttgacatcttcagtcctgtgtgctttcagaaaaccattttctctgcaaagaaaggaaacagatttgcaaactttaaagtctgtcgtggatttatttatcctcagattattgttactgcattaaatctacctttttgtttt

SEQ ID NO: 122151 - DNA, 333 bp, Homo sapiens
  Payload ID: 3945
  Gene Symbol: COPS3
  Gene Name: COP9 signalosome subunit 3
  ENST ID: ENST00000495640
  CDS Start-End: 1-53
ttgctgggctttgccatcagctaacaaatgcacttgtggaaagaaaacagtgacaacataagatccaatgtgctgccatctttgagaacttatctgaaagagatgtcatttctgacagcccctgcgaggaattggcatccttaagcaagccatagacaagatgcagatgaatacaaaccagctgacctcaatacatgctgatctctgccagctttgtttgctagcaaaatgctttaagcctgcccttccatatcttgacgtggatatgatggatatctgtaaagagaatggagcctatgatgcaaaacactttttatgttactattattatgg

SEQ ID NO: 122152 - DNA, 419 bp, Homo sapiens
  Payload ID: 3945
  Gene Symbol: COPS3
  Gene Name: COP9 signalosome subunit 3
  ENST ID: ENST00000579716
  CDS Start-End: 1-156
gagatttttgcaagtattaaccagaaggacggtatggtcagtttccatgataaccctgaaaaatataataacccagccatgcttcataacattgatcaggagagtatgggctcacaagaagatgattcaggaaacaaaccatccagttattcttgaaactaacatccatcctgagctaaacaagagaaactaccatcttggccagtgacaagtgttcggagggcagcagagaggaccaagcctgtgtcacctggagactaagaaattaagttttgttttgacatcttcagtcctgtgtgctttcagaaaaccattttctctgcaaagaaaggaaacagatttgcaaactttaaagtctgtcgtggatttatttatcctcagattattgttactgcattaaatctacctttttgttttaa

SEQ ID NO: 122153 - DNA, 365 bp, Homo sapiens
  Payload ID: 3945
  Gene Symbol: COPS3
  Gene Name: COP9 signalosome subunit 3
  ENST ID: ENST00000583160
  CDS Start-End: 1-365
acttcgaaacgctattctcacaggttcagctcttcatcagcacttgtaatggggagcacattcgatatgcaacagacacttttgctgggctttgccatcagctaacaaatgcacttgtggaaagaaaacagcccctgcgaggaattggcatccttaagcaagccatagacaagatgcagatgaatacaaaccagctgacctcaatacatgctgatctctgccaggctataactactcctgccatggcggtcagtcatatcatgttggaatcatataaaaagtatattttagtgtctttgatattacttggcaaagtacaacagctaccaaaatatacatctcaaattgtgggtagattcattaag

SEQ ID NO: 122154 - DNA, 1744 bp, Homo sapiens
  Payload ID: 3946
  Gene Symbol: COPS4
  Gene Name: COP9 signalosome subunit 4
  Uniprot ID: Q9BT78
  ENST ID: ENST00000264389
  CDS Start-End: 136-1356
acacccgacgctctggcccacacagacgctactctgtagcatctcaggttccctctggctgcactctggaggaccacactcgttttctttttggctgccagaggcccccgcatccaccgctgagctgggagaaagatggcggcagccgtgcgacaggatttggcccagctcatgaattcgagcggctctcataaagatctggctggcaagtatcgtcagatcctggaaaaagccattcagttatctggagcagaacaactagaagctttgaaagcttttgtggaagcaatggtaaatgagaatgtcagtctcgtgatctcgcggcagttgctgactgatttttgcacacatcttcctaacttgcctgatagcacagccaaagaaatctatcacttcaccttggaaaagatccagcctagagtcatttcatttgaggagcaggttgcttccataagacagcatcttgcatctatatatgagaaagaagaagattggagaaatgcagcccaagtgttggtgggaattcctttggaaacaggacaaaaacagtacaatgtagattataaactggagacttacttgaagattgctaggctatatctggaggatgatgatccagtccaggcagaggcttacataaatcgagcatcgttgcttcagaatgaatcaaccaatgaacaattacagatacattataaggtatgctatgcacgtgttcttgattatagaagaaaattcattgaagctgcacaaaggtacaatgagctctcttacaagacaatagtccacgaaagtgaaagactagaggccttaaaacatgctttgcactgtacgatcttagcatcagcagggcagcagcgttctcggatgctagctactctttttaaggatgaaaggtgccagcaacttgctgcctatgggatcctagagaaaatgtatctagataggatcatcagaggaaatcaacttcaagaatttgctgccatgctgatgcctcaccaaaaagcaactacagctgatggttccagcatcttggacagagctgttattgaacacaatttgttgtctgcaagcaaattatataataatattaccttcgaagaacttggagctcttttagagatccctgcagctaaggcggaaaagatagcatctcaaatgataaccgaaggacgtatgaatggatttattgaccagattgatggaatagttcattttgaaacacgagaagccctgccaacgtgggataagcagatccaatcactttgtttccaagtgaataaccttttggagaaaattagtcaaacagcaccagaatggacagcacaagccatggaagcccagatggctcagtgaatccttgcagaacttctgtgcacatgacatctttttccatgttgtgcagatcagtttcactatctccaaagcatttgcatcatgaccttatacatttcaatcccttttatgctggattccgtttaaagaagacattattagagcaggaagtacaagcatttaaaatatgtagttcccatatatttcagggtctctgtgtattaagctaactcagatgttttgaaagctttttctttaaacagaggtgaaatatctgtggctaaaaagtttgagatttgtgataactttgtagtcatgtaaaacttaagtgcttcatgcctctccaaatgtggttattctaataaatggagaaatgagccaaataaaagtagtactttgtttttagtta

SEQ ID NO: 122155 - DNA, 1695 bp, Homo sapiens
  Payload ID: 3946
  Gene Symbol: COPS4
  Gene Name: COP9 signalosome subunit 4
  ENST ID: ENST00000511653
  CDS Start-End: 1-1263
atggcggcagccgtgcgacaggatttggcccagctcatgaattcgagcggctctcataaagatctggctggcaagtatcgtcagatcctggaaaaagccattcagttatctggagcagaacaactagaagctttgaaagcttttgtggaagcaatggtaaatgagaatgtcagtctcgtgatctcgcggcagttgctgactgatttttgcacacatcttcctaacttgcctgatagcacagccaaagaaatctatcacttcaccttggaaaagatccagcctagagtcatttcatttgaggagcaggttgcttccataagacagcatcttgcatctatatatgagaaagaagaagattggagaaatgcagcccaagtgttggtgggaattcctttggaaacaggacaaaaacagtacaatgtagattataaactggagacttacttgaagattgctaggctatatctggaggatgatgatccagtccaggcagaggcttacataaatcgagcatcgttgcttcagaatgaatcaaccaatgaacaattacagatacattataaggtatgctatgcacgtgttcttgattatagaagaaaattcattgaagctgcacaaaggtacaatgagctctcttacaagacaatagtccacgaaagtgaaagactagaggccttaaaacatgctttgcactgtacgatcttagcatcagcagggcagcagcgttctcggatgctagctactctttttaaggatgaaaggtgccagcaacttgctgcctatgggatcctagagaaaatgtatctagataggatcatcagaggaaatcaacttcaagaatttgctgccatgctgatgcctcaccaaaaagcaactacagctgatggttccagcatcttggacagagctgttattgaacacaatttgttgtctgcaagcaaattatataataatattaccttcgaagaacttggagctcttttagagatccctgcagctaaggcggaaaagatagcatctcaaatgataaccgaaggacgtatgaatggatttattgaccagattgatggaatagttcattttgaaacttctggcaaccaccaatccatcttctgtctctggatttacctagtctggatagttcatataaatggaatcatacaatatgtgacatgtgaccttttggctgattccactcagcatagtatctttagggttcatccatgtcatggcagcacgagaagccctgccaacgtgggataagcagatccaatcactttgtttccaagtgaataaccttttggagaaaattagtcaaacagcaccagaatggacagcacaagccatggaagcccagatggctcagtgaatccttgcagaacttctgtgcacatgacatctttttccatgttgtgcagatcagtttcactatctccaaagcatttgcatcatgaccttatacatttcaatcccttttatgctggattccgtttaaagaagacattattagagcaggaagtacaagcatttaaaatatgtagttcccatatatttcagggtctctgtgtattaagctaactcagatgttttgaaagctttttctttaaacagaggtgaaatatctgtggctaaaaagtttgagatttgtgataactttgtagtcatgtaaaacttaagtgcttcatgcctctccaa

SEQ ID NO: 122156 - DNA, 1702 bp, Homo sapiens
  Payload ID: 3946
  Gene Symbol: COPS4
  Gene Name: COP9 signalosome subunit 4
  ENST ID: ENST00000503682
  CDS Start-End: 19-1335
cgctgagctgggagaaagatggcggcagccgtgcgacaggatttggcccagctcatgaattcgagcggctctcataaagatctggctggcaagtatcgtcagatcctggaaaaagccattcagttatctggagcagaacaactagaagctttgaaagcttttgtggaagcaatggtaaatgagaatgtcagtctcgtgatctcgcggcagttgctgactgatttttgcacacatcttcctaacttgcctgatagcacagccaaagaaatctatcacttcaccttggaaaagatccagcctagagtcatttcatttgaggagcaggttgcttccataagacagcatcttgcatctatatatgagaaagaagaagattggagaaatgcagcccaagtgttggtgggaattcctttggaaacaggacaaaaacagtacaatgtagattataaactggagacttacttgaagattgctaggctatatctggaggatgatgatccagtccaggcagaggcttacataaatcgagcatcgttgcttcagaatgaatcaaccaatgaacaattacagatacattataaggtatgctatgcacgtgttcttgattatagaagaaaattcattgaagctgcacaaaggtacaatgagctctcttacaagacaatagtccacgaaagtgaaagactagaggccttaaaacatgctttgcactgtacgatcttagcatcagcagggcagcagcgttctcggatgctagctactctttttaaggatgaaaggtgccagcaacttgctgcctatgggatcctagagaaaatgtatctagataggatcatcagaggaaatcaacttcaagaatttgctgccatgctgatgcctcaccaaaaagcaactacagctgatgagacaggatctctccattttgcccaggctggtcttgaactcctgggctcaagcagttcctcccatcttggcttcccaaagtgctgggatgataggggttccagcatcttggacagagctgttattgaacacaatttgttgtctgcaagcaaattatataataatattaccttcgaagaacttggagctcttttagagatccctgcagctaaggcggaaaagatagcatctcaaatgataaccgaaggacgtatgaatggatttattgaccagattgatggaatagttcattttgaaacacgagaagccctgccaacgtgggataagcagatccaatcactttgtttccaagtgaataaccttttggagaaaattagtcaaacagcaccagaatggacagcacaagccatggaagcccagatggctcagtgaatccttgcagaacttctgtgcacatgacatctttttccatgttgtgcagatcagtttcactatctccaaagcatttgcatcatgaccttatacatttcaatcccttttatgctggattccgtttaaagaagacattattagagcaggaagtacaagcatttaaaatatgtagttcccatatatttcagggtctctgtgtattaagctaactcagatgttttgaaagctttttctttaaacagaggtgaaatatctgtggctaaaaagtttgagatttgtgataactttgtagtcatgtaaaacttaagtgcttcatgcctctccaaatgtggttattctaataaatggagaaatgagccaaataaaa

SEQ ID NO: 122157 - DNA, 878 bp, Homo sapiens
  Payload ID: 3946
  Gene Symbol: COPS4
  Gene Name: COP9 signalosome subunit 4
  ENST ID: ENST00000509317
  CDS Start-End: 53-878
tttctttttggctgccagaggcccccgcatccaccgctgagctgggagaaagatggcggcagccgtgcgacaggatttggcccagctcatgaattcgagcggctctcataaagatctggctggcaaacagtacaatgtagattataaactggagacttacttgaagattgctaggctatatctggaggatgatgatccagtccaggcagaggcttacataaatcgagcatcgttgcttcagaatgaatcaaccaatgaacaattacagatacattataaggtatgctatgcacgtgttcttgattatagaagaaaattcattgaagctgcacaaaggtacaatgagctctcttacaagacaatagtccacgaaagtgaaagactagaggccttaaaacatgctttgcactgtacgatcttagcatcagcagggcagcagcgttctcggatgctagctactctttttaaggatgaaaggtgccagcaacttgctgcctatgggatcctagagaaaatgtatctagataggatcatcagaggaaatcaacttcaagaatttgctgccatgctgatgcctcaccaaaaagcaactacagctgatggttccagcatcttggacagagctgttattgaacacaatttgttgtctgcaagcaaattatataataatattaccttcgaagaacttggagctcttttagagatccctgcagctaaggcggaaaagatagcatctcaaatgataaccgaaggacgtatgaatggatttattgaccagattgatggaatagttcattttgaaacacgagaagccctgccaacgtgggataagcagatccaatcactttgtttccaagtgaataaccttttggagaaaa

SEQ ID NO: 122158 - DNA, 2273 bp, Homo sapiens
  Payload ID: 3946
  Gene Symbol: COPS4
  Gene Name: COP9 signalosome subunit 4
  Uniprot ID: Q9BT78
  ENST ID: ENST00000509093
  CDS Start-End: 779-1837
attctcctgcctcagcctcccgagttgctgggactacaggggtgcaccacctacgcccggctaatttttttgtatttttagtagagaacggggtttcaccgtgttagccaggatggcctcgatctcttgacctcgtgatccgcccgcctcggctgcccaaagtgctgggattacaggcgtgagccaccgcgcccggccgaaaggggggatattaatcattactccaggacgacagagggaaaatcgctttgtactggacaaactggaatgtctgaccaaccattataaagtgcacggagtgggaggaggaatagggacattttaattgtatttctaaaaagtatcttctgtggtgaatcggaaacaaaactcattctttaccacaggcagtttaagcgctgcctgaaagatcgaaggacggtaaaccacagacgtgagaaacggaactttgcgaaaacgcagtcgttttatgtaccggctactcattggagttacaccagagactcactactggagttcatcagccaatccaaagtccaagcgtgagagccagagcctgtaggagagacctgggcaggcctcagacctgaggagtggagctccgcatcactcaaccctgggggcggagctagcccaggctcccacacccgacgctctggcccacacagacgctactctgtagcatctcaggttccctctggctgcactctggaggaccacactcgttttctttttggctgccagaggcccccgcatccaccgctgagctgggagaaagatggcggcagccgtgcgacaggatttggcccagctcatgaattcgagcggctctcataaagatctggctggcaagtatcgtcagatcctggaaaaagccattcagttatctggagcagaacaactagaagctttgaaagcttttgtggaagcaatggtaaatgagaatgtcagtctcgtgatctcgcggcagttgctgactgatttttgcacacatcttcctaacttgcctgatagcacagccaaagaaatctatcacttcaccttggaaaagatccagcctagagtcatttcatttgaggagcaggttgcttccataagacagcatcttgcatctatatatgagaaagaagaagattggagaaatgcagcccaagtgttggtgggaattcctttggaaacaggacaaaaacagtacaatgtagattataaactggagacttacttgaagattgctaggctatatctggaggatgatgatccagtccaggcagaggcttacataaatcgagcatcgttgcttcagaatgaatcaaccaatgaacaattacagatacattataaggtatgctatgcacgtgttcttgattatagaagaaaattcattgaagctgcacaaaggtacaatgagctctcttacaagacaatagtccacgaaagtgaaagactagaggccttaaaacatgctttgcactgtacgatcttagcatcagcagggcagcagcgttctcggatgctagctactctttttaaggatgaaaggtgccagcaacttgctgcctatgggatcctagagaaaatgtatctagataggatcatcagaggaaatcaacttcaagaatttgctgccatgctgatgcctcaccaaaaagcaactacagctgatggttccagcatcttggacagagctgttattgaacacaatttgttgtctgcaagcaaattatataataatattaccttcgaagaacttggagctcttttagagatccctgcagctaagcacgagaagccctgccaacgtgggataagcagatccaatcactttgtttccaagtgaataaccttttggagaaaattagtcaaacagcaccagaatggacagcacaagccatggaagcccagatggctcagtgaatccttgcagaacttctgtgcacatgacatctttttccatgttgtgcagatcagtttcactatctccaaagcatttgcatcatgaccttatacatttcaatcccttttatgctggattccgtttaaagaagacattattagagcaggaagtacaagcatttaaaatatgtagttcccatatatttcagggtctctgtgtattaagctaactcagatgttttgaaagctttttctttaaacagaggtgaaatatctgtggctaaaaagtttgagatttgtgataactttgtagtcatgtaaaacttaagtgcttcatgcctctccaaatgtggttattctaataaatggagaaatgagcc

SEQ ID NO: 122159 - DNA, 438 bp, Homo sapiens
  Payload ID: 3946
  Gene Symbol: COPS4
  Gene Name: COP9 signalosome subunit 4
  ENST ID: ENST00000507376
  CDS Start-End: 25-180
atccaccgctgagctgggagaaagatggcggcagccgtgcgacaggatttggcccagctcatgaattcgagcggctctcataaagatctggctggcaaaacattattttcatttggtattgttgtaggtatcgtcagatcctggaaaaagccattcagttatctggagcagaacaactagaagctttgaaagcttttgtggaagcaatggtaaatgagaatgtcagtctcgtgatctcgcggcagttgctgactgatttttgcacacatcttcctaacttgcctgatagcacagccaaagaaatctatcacttcaccttggaaaagatccagcctagagtcatttcatttgaggagcaggttgcttccataagacagcatcttgcatctatatatgagaaagaagaagattggagaaatgcagcccaagtgttggtgg

SEQ ID NO: 122160 - DNA, 1480 bp, Homo sapiens
  Payload ID: 3947
  Gene Symbol: COPS5
  Gene Name: COP9 signalosome subunit 5
  Uniprot ID: Q92905
  ENST ID: ENST00000357849
  CDS Start-End: 322-1326
ctcccataccctataactttgtttgttctatttcacacatataattttccgagacaagatgttctcatttaagcaacaagaagattcgtctctcgctattactgtaactgctgtttatatcgtcatgtcccggaaaggtccctgtcttccctgaatggtctctaccaacttcacctccggttctaggtgtcatggctgccccaagagtctaggtaagagtttgttcccgtggtgcggagggtcaaggcccacacccggaaacctagcgaggtaaagttgcgtcttggttgtagagacgacaacttctccgcttcctcggcgatggcggcgtccgggagcggtatggcccagaaaacctgggaactggccaacaacatgcaggaagctcagagtatcgatgaaatctacaaatacgacaagaaacagcagcaagaaatcctggcggcgaagccctggactaaggatcaccattactttaagtactgcaaaatctcagcattggctctgctgaagatggtgatgcatgccagatcgggaggcaacttggaagtgatgggtctgatgctaggaaaggtggatggtgaaaccatgatcattatggacagttttgctttgcctgtggagggcactgaaacccgagtaaatgctcaggctgctgcatatgaatacatggctgcatacatagaaaatgcaaaacaggttggccgccttgaaaatgcaatcgggtggtatcatagccaccctggctatggctgctggctttctgggattgatgttagtactcagatgctcaatcagcagttccaggaaccatttgtagcagtggtgattgatccaacaagaacaatatccgcagggaaagtgaatcttggcgcctttaggacatacccaaagggctacaaacctcctgatgaaggaccttctgagtaccagactattccacttaataaaatagaagattttggtgtacactgcaaacaatattatgccttagaagtctcatatttcaaatcctctttggatcgcaaattgcttgagctgttgtggaataaatactgggtgaatacgttgagttcttctagcttgcttactaatgcagactataccactggtcaggtctttgatttgtctgaaaagttagagcagtcagaagcccagctgggacgagggagtttcatgttgggtttagaaacgcatgaccgaaaatcagaagacaaacttgccaaagctacaagagacagctgtaaaactaccatagaagctatccatggattgatgtctcaggttattaaggataaactgtttaatcaaattaacatctcttaaacagtctctgagaagtactttacctgaaagacagtatgagaaaaatattcaagtaacactttaaaaccagttacccaaaatctgattagaagtataaggtgctctgaagtgtcctaaatattaatatcctgtaataaagctctttaaaatgaaa

SEQ ID NO: 122161 - DNA, 1451 bp, Homo sapiens
  Payload ID: 3947
  Gene Symbol: COPS5
  Gene Name: COP9 signalosome subunit 5
  ENST ID: ENST00000518374
  CDS Start-End: 247-453
ataccactcccataccctataactttgtttgttctatttcacacatataattttccgagacaagatgttctcatttaagcaacaagaagattcgtctctcgctattactgtaactgctgtttatatcgtcatgtcccggaaaggtccctgtcttccctgaatggtctctaccaacttcacctccggttctaggtgtcatggctgccccaagagtctagagacgacaacttctccgcttcctcggcgatggcggcgtccgggagcggtatggcccagaaaacctgggaactggccaacaacatgcaggaagctcagagtatcgatgaaatctacaaatacgacaagaaacagcagcaagaaatcctggcggcgaagccctggactaaggataaagggagaagccaagatttcgattcatgtcttgacttccaacatgagtcaccattactttaagtactgcaaaatctcagcattggctctgctgaagatggtgatgcatgccagatcgggaggcaacttggaagtgatgggtctgatgctaggaaaggtggatggtgaaaccatgatcattatggacagttttgctttgcctgtggagggcactgaaacccgagtaaatgctcaggctgctgcatatgaatacatggctgcatacatagaaaatgcaaaacaggttggccgccttgaaaatgcaatcgggtggtatcatagccaccctggctatggctgctggctttctgggattgatgttagtactcagatgctcaatcagcagttccaggaaccatttgtagcagtggtgattgatccaacaagaacaatatccgcagggaaagtgaatcttggcgcctttaggacatacccaaagggctacaaacctcctgatgaaggaccttctgagtaccagactattccacttaataaaatagaagattttggtgtacactgcaaacaatattatgccttagaagtctcatatttcaaatcctctttggatcgcaaattgcttgagctgttgtggaataaatactgggtgaatacgttgagttcttctagcttgcttactaatgcagactataccactggtcaggtctttgatttgtctgaaaagttagagcagtcagaagcccagctgggacgagggagtttcatgttgggtttagaaacgcatgaccgaaaatcagaagacaaacttgccaaagctacaagagacagctgtaaaactaccatagaagctatccatggattgatgtctcaggttattaaggataaactgtttaatcaaattaacatctcttaaacagtctctgagaagtactttacctgaaagacagtatgagaaaaatattcaagtaacactttaaaaccagttacccaaaatctgattagaagtataaggtgctctgaagtgtcctaaatattaatatcctgtaataaagctctttaaaatg

SEQ ID NO: 122162 - DNA, 1086 bp, Homo sapiens
  Payload ID: 3947
  Gene Symbol: COPS5
  Gene Name: COP9 signalosome subunit 5
  ENST ID: ENST00000523890
  CDS Start-End: 34-207
tgtagagacgacaacttctccgcttcctcggcgatggcggcgtccgggagcggtatggcccagaaaacctgggaactggccaacaacatgcaggaagctcagagtatcgatgaaatctacaaatacgacaagaaacagcagcaagaaatcctggcggcgaagccctggactaaggaaaatgggtcctcgctgtgttgctcaggctgatctcgagcttctgccttcaagcgatcctcccgccttcgccttccaaagtgctgggattacaggcgtgaggcctgggcctataatagttttttgattgctgtcaccattactttaagtactgcaaaatctcagcattggctctgctgaagatggtgatgcatgccagatcgggaggcaacttggaagtgatgggtctgatgctaggaaaggtggatggtgaaaccatgatcattatggacagttttgctttgcctgtggagggcactgaaacccgagtaaatgctcaggctgctgcatatgaatacatggctgcatacatagaaaatgcaaaacaggttggccgccttgaaaatgcaatcgggtggtatcatagccaccctggctatggctgctggctttctgggattgatgttagtactcagatgctcaatcagcagttccaggaaccatttgtagcagtggtgattgatccaacaagaacaatatccgcagggaaagtgaatcttggcgcctttaggacatacccaaagggctacaaacctcctgatgaaggaccttctgagtaccagactattccacttaataaaatagaagattttggtgtacactgcaaacaatattatgccttagaagtctcatatttcaaatcctctttggatcgcaaattgcttgagctgttgtggaataaatactgggtgaatacgttgagttcttctagcttgcttactaatgcagactataccactggtcaggtctttgatttgtctgaaaagttagagcagtcagaagcccagctgggacgagggagtttcatgttgggtttagaaacgcatgaccgaaaatcagaagacaaacttgccaaagctacaagagacaggt

SEQ ID NO: 122163 - DNA, 474 bp, Homo sapiens
  Payload ID: 3947
  Gene Symbol: COPS5
  Gene Name: COP9 signalosome subunit 5
  ENST ID: ENST00000517406
  CDS Start-End: 77-313
ccaacttcacctccggttctaggtgtcatggctgccccaagagtctagagacgacaacttctccgcttcctcggcgatggcggcgtccgggagcggtatggcccagaaaacctgggaactggccaacaacatgcaggaagctcagagtatcgatgaaatctacaaatacgacaagaaacagcagcaagaaatcctggcggcgaagccctggactaaggataaagggagaagccaagatttcgattcatgtcttgacttccaacatgaggtctacacatttttcagcttttggttgaaatctggcaaagcttaggaattaaatttggattctttctgtgggcagacatctaaaaaggctttgtagagacgttgactgactgctctgtaaggctgcttaagttgcttggttatctgcttgcttctgtaacaggctgtgcattttagtcaccattactttaagtactgcaaaatctc

SEQ ID NO: 122164 - DNA, 676 bp, Homo sapiens
  Payload ID: 3947
  Gene Symbol: COPS5
  Gene Name: COP9 signalosome subunit 5
  ENST ID: ENST00000518747
  CDS Start-End: 224-676
cctggaggccgcatagctgcccgctgctctcggttcgccagtacgctggccggggacttggtcaactcgttctcctgctgtgcccaggggctattaaactgtgggggccacttctcaggctaaatctattgcagcctctccagcctcccatgcaccagccagcttaggaacagttcaccattactttaagtactgcaaaatctcagcattggctctgctgaagatggtgatgcatgccagatcgggaggcaacttggaagtgatgggtctgatgctaggaaaggtggatggtgaaaccatgatcattatggacagttttgctttgcctgtggagggcactgaaacccgagtaaatgctcaggctgctgcatatgaatacatggctgcatacatagaaaatgcaaaacaggttggccgccttgaaaatgcaatcgggtggtatcatagccaccctggctatggctgctggctttctgggattgatgttagtactcagatgctcaatcagcagttccaggaaccatttgtagcagtggtgattgatccaacaagaacaatatccgcagggaaagtgaatcttggcgcctttaggacatacccaaagggctacaaacctcctgatgaaggaccttctgagtaccagactattccacttaataaaatagaagattttggt

SEQ ID NO: 122165 - DNA, 1621 bp, Homo sapiens
  Payload ID: 3947
  Gene Symbol: COPS5
  Gene Name: COP9 signalosome subunit 5
  ENST ID: ENST00000517736
  CDS Start-End: 563-1156
aacaacaccgcgggcagcagcgaccgcagtggcccaggaatccggaccgtgtaaccagggaacctccccgaccccggcagctgcaagacccctgctcacagaactcccgcccccaaccctcataactcgtagtcaccgatgccggcctcacggcggcgaaatcccaactctccacacccttaactcgggcacctcccccaccgcacccagccgccacgagaccccctgccgacaagaaaccccacccccacccccagattccagagcctgtaactctggcacgtcgccggcctagttgcctcgagacctacgccccgagggagccactgcccctgcccccgctccggggcagcgaatgcagccccaggaccctccaccctcaacctacaccaccccaggccacacctcgccactcacgctccccatccgcggctggctgactcttactcaggggagcgggctcgcgtccggggagacacacagtgctctagaggatcgtcgcggaccgaagagtcaccattactttaagtactgcaaaatctcagcattggctctgctgaagatggtgatgcatgccagatcgggaggcaacttggaagtgatgggtctgatgctaggaaaggtggatggtgaaaccatgatcattatggacagttttgctttgcctgtggagggcactgaaacccgagtaaatgctcaggctgctgcatatgaatacatggctgcatacatagaaaatgcaaaacaggttggccgccttgaaaatgcaatcgggtggtatcatagccaccctggctatggctgctggctttctgggattgatgttagtactcagatgctcaatcagcagttccaggaaccatttgtagcagtggtgattgatccaacaagaacaatatccgcagggaaagtgaatcttggcgcctttaggacatacccaaagggctacaaacctcctgatgaaggaccttctgagtaccagactattccacttaataaaatagaagattttggtgtacactgcaaacaatattatgccttagaagtctcatatttcaaatcctctttggatcgcaaattgcttgagctgttgtggaataaatactgggtgaatacgttgagttcttctagcttgcttactaggcaagtatattaatagcagccagaagtgacacctgatggcaaggggagaaaacactgttaagaccagaacagtctgaacctttgtatgagaatgcagactataccactggtcaggtctttgatttgtctgaaaagttagagcagtcagaagcccagctgggacgagggagtttcatgttgggtttagaaacgcatgaccgaaaatcagaagacaaacttgccaaagctacaagagacagctgtaaaactaccatagaagctatccatggattgatgtctcaggttattaaggataaactgtttaatcaaattaacatctcttaaacagtctctgagaagtactttacctgaaagacagtatgagaaaaatattcaagtaacactttaaaaccagttacccaaaatctgattagaagtataaggtgctctgaagtgtcctaaatattaatatcctgtaataaagctctttaaaatgaaa

SEQ ID NO: 122166 - DNA, 1432 bp, Homo sapiens
  Payload ID: 3948
  Gene Symbol: COPS6
  Gene Name: COP9 signalosome subunit 6
  Uniprot ID: Q7L5N1
  ENST ID: ENST00000303904
  CDS Start-End: 38-1021
gaagggggcggggccgaggctggcgggcgcggggaaaatggcggcggcggcggcggcggctgcagctacgaacgggaccggaggaagcagcgggatggaggtggatgcagcagtagtccccagcgtgatggcctgcggagtgactgggagtgtttccgtcgctctccatccccttgtcattctcaacatctcagaccactggatccgcatgcgctcccaggaggggcggcctgtgcaggtgattggggctctgattggcaagcaggagggccgaaatatcgaggtgatgaactcctttgagctgctgtcccacaccgtggaagagaagattatcattgacaaggaatattattacaccaaggaggagcagtttaaacaggtgttcaaggagctggagtttctgggttggtataccacaggggggccacctgacccctcggacatccacgtccataagcaggtgtgtgagatcatcgagagccccctctttctgaagttgaaccctatgaccaagcacacagatcttcctgtcagcgtttttgagtctgtcattgatataatcaatggagaggccacaatgctgtttgctgagctgacctacactctggccacagaggaagcggaacgcattggtgtagaccacgtagcccgaatgacagcaacaggcagtggagagaactccactgtggctgaacacctgatagcacagcacagcgccatcaagatgctgcacagccgcgtcaagctcatcttggagtacgtcaaggcctctgaagcgggagaggtcccctttaatcatgagatcctgcgggaggcctatgctctgtgtcactgtctcccggtgctcagcacagacaagttcaagacagatttttatgatcaatgcaacgacgtggggctcatggcctacctcggcaccatcaccaaaacgtgcaacaccatgaaccagtttgtgaacaagttcaatgtcctctacgaccgacaaggcatcggcaggagaatgcgcgggctctttttctgatgagggtacttgaagggctgatggacaggggtcaggcaactatcccaaaggggagggcactacacttccttgagagaaaccgctgtcattaataaaaggggagcagcccctgagcacccctgctggtggctctgtcctctgttaggcaccacactggttggtcaacttggatgttcatcgaggctcattctggccttgctcagaagcccttctgatgctcttcagtgagggaggcactaccatttgaagtgaccccatgtcagtcacatggactggtctttagcaaagtccaaggctgcctgcttccacctaagtggtctctgttctacactttaatgtcaccctctacatcatcttacctagcccacccaaccttataaacatgataattgactactttcctgagctaaa

SEQ ID NO: 122167 - DNA, 218 bp, Homo sapiens
  Payload ID: 3948
  Gene Symbol: COPS6
  Gene Name: COP9 signalosome subunit 6
  ENST ID: ENST00000419210
  CDS Start-End: 94-218
ggcgggcgcggggaaaatggcggcggcggcggcggcggctgcagctacgaacgggaccggaggaagcagcgggatggagtagtccccagcgtgatggcctgcggagtgactgggagtgtttccgtcgctctccatccccttgtcattctcaacatctcagaccactggatccgcatgcgctcccaggaggggcggcctgtgcaggtgattggggctct

SEQ ID NO: 122168 - DNA, 1107 bp, Homo sapiens
  Payload ID: 3948
  Gene Symbol: COPS6
  Gene Name: COP9 signalosome subunit 6
  ENST ID: ENST00000418625
  CDS Start-End: 11-991
cgcggggaaaatggcggcggcggcggcggcggctgcagctacgaacgggaccggaggaagcagcgggatggaggtggatgcagcagtccccagcgtgatggcctgcggagtgactgggagtgtttccgtcgctctccatccccttgtcattctcaacatctcagaccactggatccgcatgcgctcccaggaggggcggcctgtgcaggtgattggggctctgattggcaagcaggagggccgaaatatcgaggtgatgaactcctttgagctgctgtcccacaccgtggaagagaagattatcattgacaaggaatattattacaccaaggaggagcagtttaaacaggtgttcaaggagctggagtttctgggttggtataccacaggggggccacctgacccctcggacatccacgtccataagcaggtgtgtgagatcatcgagagccccctctttctgaagttgaaccctatgaccaagcacacagatcttcctgtcagcgtttttgagtctgtcattgatataatcaatggagaggccacaatgctgtttgctgagctgacctacactctggccacagaggaagcggaacgcattggtgtagaccacgtagcccgaatgacagcaacaggcagtggagagaactccactgtggctgaacacctgatagcacagcacagcgccatcaagatgctgcacagccgcgtcaagctcatcttggagtacgtcaaggcctctgaagcgggagaggtcccctttaatcatgagatcctgcgggaggcctatgctctgtgtcactgtctcccggtgctcagcacagacaagttcaagacagatttttatgatcaatgcaacgacgtggggctcatggcctacctcggcaccatcaccaaaacgtgcaacaccatgaaccagtttgtgaacaagttcaatgtcctctacgaccgacaaggcatcggcaggagaatgcgcgggctctttttctgatgagggtacttgaagggctgatggacaggggtcaggcaactatcccaaaggggagggcactacacttccttgagagaaaccgctgtcattaataaaaggggagcagcccctgagca

SEQ ID NO: 122169 - DNA, 716 bp, Homo sapiens
  Payload ID: 3948
  Gene Symbol: COPS6
  Gene Name: COP9 signalosome subunit 6
  ENST ID: ENST00000426712
  CDS Start-End: 1-372
ctgggttggtataccacaggggggccacctgacccctcggacatccacgtccataagcaggtgtgtgagatcatcgagagccccctctttctgaagttgaaccctatgaccaagcacacagatcttcctgtcagcgtttttgagtctgtcattgatataatcaatggagaggccacaatgctgtttgctgagctgacctacactctggccacagaggaagcggaacgcattggtgtagaccacgtagcccgaatgacagcaacaggcagtggagagaactccactgtggctgaacacctgatagcacagcacagcgccatcaagatgctgcacagccgcgtcaagctcatcttggagagaggtcccctttaatcatgagatcctgcgggaggcctatgctctgtgtcactgtctcccggtgctcagcacagacaagttcaagacagatttttatgatcaatgcaacgacgtggggctcatggcctacctcggcaccatcaccaaaacgtgcaacaccatgaaccagtttgtgaacaagttcaatgtcctctacgaccgacaaggcatcggcaggagaatgcgcgggctctttttctgatgagggtacttgaagggctgatggacaggggtcaggcaactatcccaaaggggagggcactacacttccttgagagaaaccgctgtcattaataaaaggggagcagcccctgagcacc

SEQ ID NO: 122170 - DNA, 1721 bp, Homo sapiens
  Payload ID: 3949
  Gene Symbol: COPS7A
  Gene Name: COP9 signalosome subunit 7A
  Uniprot ID: Q9UBW8
  ENST ID: ENST00000229251
  CDS Start-End: 126-953
ggtggcaggaaaggcttggaacagctgccggaggtgacggagcggcggccccgcccggtgcgctggaggtcgaagcttccagctctggacatcctgagcccaagtcccccacactcagtgcagtgatgagtgcggaagtgaaggtgacagggcagaaccaggagcaatttctgctcctagccaagtcggccaagggggcagcgctggccacactcatccatcaggtgctggaggcccctggtgtctacgtgtttggagaactgctggacatgcccaatgttagagagctggctgagagtgactttgcctctaccttccggctgctcacagtgtttgcttatgggacatacgctgactacttagctgaagcccggaatcttcctccactaacagaggctcagaagaataagcttcgacacctctcagttgtcaccctggctgctaaagtaaagtgtatcccatatgcagtgttgctggaggctcttgccctgcgtaatgtgcggcagctggaagaccttgtgattgaggctgtgtatgctgacgtgcttcgtggctccctggaccagcgcaaccagcggctcgaggttgactacagcatcgggcgggacatccagcgccaggacctcagtgccattgcccgaaccctgcaggaatggtgtgtgggctgtgaggtcgtgctgtcaggcattgaggagcaggtgagccgtgccaaccaacacaaggagcagcagctgggcctgaagcagcagattgagagtgaggttgccaaccttaaaaaaaccattaaagttacgacggcagcagcagccgcagccacatctcaggaccctgagcaacacctgactgagctgagggaaccagctcctggcaccaaccagcgccagcccagcaagaaagcctcaaagggcaaggggctccgagggagcgccaagatttggtccaagtcgaattgaaaggactgtcgtttcctccctggggatgtggggtcccagctgcctgcctgcctcttaggagtcctcagagagccttctgtgcccctggccagctgataatcctaggttcatgacccttcacctcccctaaccccaaacatagatcacaccttctctagggaggaggcaaatgtaggtcatgtttttgttggtactttctgttttttgtgacttcatgtgttccattgctccccgctgccatgctctctcccttgtttccttaagagctcagcatctgtccctgttcattacatgtcattgagtaggtgggtagccctgatgggggtcgctctgtctggagcataacccacaggcgttttttctgccaccccatccctgcatgcctgatccccagttcctataccctacccctgacctattgagcagcctctgaagagccatagggcccccacctttactcacaccctgagaattctgggagccagtctgccatgccaggagtcactggacatgttcatcctagaatcctgtcacactacagtcatttcttttcctctctctggcccttgggtcctgggaatgctgctgcttcaaccccagagcctaagaatggcagccgtttcttaacatgttgagagatgattctttcttggccctggccatctcgggaagcttgatggcaatcctggaagggtttaatctccttttgtgagtttggtggggaagggaagggtatatagattgtattaaaaaaaaaaaggtatatat

SEQ ID NO: 122171 - DNA, 1718 bp, Homo sapiens
  Payload ID: 3949
  Gene Symbol: COPS7A
  Gene Name: COP9 signalosome subunit 7A
  ENST ID: ENST00000455113
  CDS Start-End: 185-373
agagtttagtggccagagcgactcttcagggaggtggcaggaaaggcttggaacagctgccggaggtgacggagcggcggccccgcccggtgcgctggaggtcgaagcttccaggtagcggcccgcagagcctgacccaggctctggacatcctgagcccaagtcccccacactcagtgcagtgatgagtgcggaagtgaaggtgacagggcagaaccaggagcaatttctgctcctagccaagtcggccaagggggcagcgctggccacactcatccatcaggtgctggaggcccctggtgtctacgtgtttggagaactgctggacatgcccaatgttagagagctgaagcccggaatcttcctccactaacagaggctcagaagaataagcttcgacacctctcagttgtcaccctggctgctaaagtaaagtgtatcccatatgcagtgttgctggaggctcttgccctgcgtaatgtgcggcagctggaagaccttgtgattgaggctgtgtatgctgacgtgcttcgtggctccctggaccagcgcaaccagcggctcgaggttgactacagcatcgggcgggacatccagcgccaggacctcagtgccattgcccgaaccctgcaggaatggtgtgtgggctgtgaggtcgtgctgtcaggcattgaggagcaggtgagccgtgccaaccaacacaaggagcagcagctgggcctgaagcagcagattgagagtgaggttgccaaccttaaaaaaaccattaaagttacgacggcagcagcagccgcagccacatctcaggaccctgagcaacacctgactgagctgagggaaccagctcctggcaccaaccagcgccagcccagcaagaaagcctcaaagggcaaggggctccgagggagcgccaagatttggtccaagtcgaattgaaaggactgtcgtttcctccctggggatgtggggtcccagctgcctgcctgcctcttaggagtcctcagagagccttctgtgcccctggccagctgataatcctaggttcatgacccttcacctcccctaaccccaaacatagatcacaccttctctagggaggaggcaaatgtaggtcatgtttttgttggtactttctgttttttgtgacttcatgtgttccattgctccccgctgccatgctctctcccttgtttccttaagagctcagcatctgtccctgttcattacatgtcattgagtaggtgggtagccctgatgggggtcgctctgtctggagcataacccacaggcgttttttctgccaccccatccctgcatgcctgatccccagttcctataccctacccctgacctattgagcagcctctgaagagccatagggcccccacctttactcacaccctgagaattctgggagccagtctgccatgccaggagtcactggacatgttcatcctagaatcctgtcacactacagtcatttcttttcctctctctggcccttgggtcctgggaatgctgctgcttcaaccccagagcctaagaatggcagccgtttcttaacatgttgagagatgattctttcttggccctggccatctcgggaagcttgatggcaatcctggaagggtttaatctccttttgtgagtttggtggggaagggaagggtatatagattgtattaaaaaaaaaaaggtatatatgcatatatctatat

SEQ ID NO: 122172 - DNA, 2127 bp, Homo sapiens
  Payload ID: 3949
  Gene Symbol: COPS7A
  Gene Name: COP9 signalosome subunit 7A
  Uniprot ID: Q9UBW8
  ENST ID: ENST00000543155
  CDS Start-End: 483-1310
aggtacccagtgcagtcctgatctccagctctccagcggcttagaacagacacagaatgggccgggaccagggacccaccagagacgtctgtagttaatagctggcgctcttccactaataaagttttattgaaataaagcatttaaaaaggcgcccgtcattcttcccccagcgaccaatcgaagagtagaatgcctgcgtccctcactggagcttcagcggtcggaacgcgggggtggggcatgtcctgccgaaatttgcgtccttagagcggaagtacggccggaagcccgccatagagtttagtggccagagcgactcttcagggaggtggcaggaaaggcttggaacagctgccggaggtgacggagcggcggccccgcccggtgcgctggaggtcgaagcttccaggtagcggcccgcagagcctgacccaggctctggacatcctgagcccaagtcccccacactcagtgcagtgatgagtgcggaagtgaaggtgacagggcagaaccaggagcaatttctgctcctagccaagtcggccaagggggcagcgctggccacactcatccatcaggtgctggaggcccctggtgtctacgtgtttggagaactgctggacatgcccaatgttagagagctggctgagagtgactttgcctctaccttccggctgctcacagtgtttgcttatgggacatacgctgactacttagctgaagcccggaatcttcctccactaacagaggctcagaagaataagcttcgacacctctcagttgtcaccctggctgctaaagtaaagtgtatcccatatgcagtgttgctggaggctcttgccctgcgtaatgtgcggcagctggaagaccttgtgattgaggctgtgtatgctgacgtgcttcgtggctccctggaccagcgcaaccagcggctcgaggttgactacagcatcgggcgggacatccagcgccaggacctcagtgccattgcccgaaccctgcaggaatggtgtgtgggctgtgaggtcgtgctgtcaggcattgaggagcaggtgagccgtgccaaccaacacaaggagcagcagctgggcctgaagcagcagattgagagtgaggttgccaaccttaaaaaaaccattaaagttacgacggcagcagcagccgcagccacatctcaggaccctgagcaacacctgactgagctgagggaaccagctcctggcaccaaccagcgccagcccagcaagaaagcctcaaagggcaaggggctccgagggagcgccaagatttggtccaagtcgaattgaaaggactgtcgtttcctccctggggatgtggggtcccagctgcctgcctgcctcttaggagtcctcagagagccttctgtgcccctggccagctgataatcctaggttcatgacccttcacctcccctaaccccaaacatagatcacaccttctctagggaggaggcaaatgtaggtcatgtttttgttggtactttctgttttttgtgacttcatgtgttccattgctccccgctgccatgctctctcccttgtttccttaagagctcagcatctgtccctgttcattacatgtcattgagtaggtgggtagccctgatgggggtcgctctgtctggagcataacccacaggcgttttttctgccaccccatccctgcatgcctgatccccagttcctataccctacccctgacctattgagcagcctctgaagagccatagggcccccacctttactcacaccctgagaattctgggagccagtctgccatgccaggagtcactggacatgttcatcctagaatcctgtcacactacagtcatttcttttcctctctctggcccttgggtcctgggaatgctgctgcttcaaccccagagcctaagaatggcagccgtttcttaacatgttgagagatgattctttcttggccctggccatctcgggaagcttgatggcaatcctggaagggtttaatctccttttgtgagtttggtggggaagggaagggtatatagattgtattaaaaaaaaaaaggtatatatgcatatatctatatataatatgacgcagaaataaatctatgagaaatct

SEQ ID NO: 122173 - DNA, 898 bp, Homo sapiens
  Payload ID: 3949
  Gene Symbol: COPS7A
  Gene Name: COP9 signalosome subunit 7A
  ENST ID: ENST00000538375
  CDS Start-End: 89-277
ggaggtcgaagcttccaggtagcggcccgcagagcctgacccaggctctggacatcctgagcccaagtcccccacactcagtgcagtgatgagtgcggaagtgaaggtgacagggcagaaccaggagcaatttctgctcctagccaagtcggccaagggggcagcgctggccacactcatccatcaggtgctggaggcccctggtgtctacgtgtttggagaactgctggacatgcccaatgttagagagctgaagcccggaatcttcctccactaacagaggctcagaagaataagcttcgacacctctcagttgtcaccctggctgctaaagtaaagtgtatcccatatgcagtgttgctggaggctcttgccctgcgtaatgtgcggcagctggaagaccttgtgattgaggctgtgtatgctgacgtgcttcgtggctccctggaccagcgcaaccagcggctcgaggttgactacagcatcgggcgggacatccagcgccaggacctcagtgccattgcccgaaccctgcaggaatggtgtgtgggctgtgaggtcgtgctgtcaggcattgaggagcaggtgagccgtgccaaccaacacaaggagcagcagctgggcctgaagcagcagattgagagtgaggttgccaaccttaaaaaaaccattaaagttacgacggcagcagcagccgcagccacatctcaggaccctgagcaacacctgactgagctgagggaaccagctcctggcaccaaccagcgccagcccagcaagaaagcctcaaagggcaaggggctccgagggagcgccaagatttggtccaagtcgaattgaaaggactgtcgtttcctccctggggatgtggggtcccagctgcctgcctgcctcttag

SEQ ID NO: 122174 - DNA, 1707 bp, Homo sapiens
  Payload ID: 3949
  Gene Symbol: COPS7A
  Gene Name: COP9 signalosome subunit 7A
  Uniprot ID: Q9UBW8
  ENST ID: ENST00000534877
  CDS Start-End: 77-904
gcagcaatggagagctgagggagcgtcgtcaggctctggacatcctgagcccaagtcccccacactcagtgcagtgatgagtgcggaagtgaaggtgacagggcagaaccaggagcaatttctgctcctagccaagtcggccaagggggcagcgctggccacactcatccatcaggtgctggaggcccctggtgtctacgtgtttggagaactgctggacatgcccaatgttagagagctggctgagagtgactttgcctctaccttccggctgctcacagtgtttgcttatgggacatacgctgactacttagctgaagcccggaatcttcctccactaacagaggctcagaagaataagcttcgacacctctcagttgtcaccctggctgctaaagtaaagtgtatcccatatgcagtgttgctggaggctcttgccctgcgtaatgtgcggcagctggaagaccttgtgattgaggctgtgtatgctgacgtgcttcgtggctccctggaccagcgcaaccagcggctcgaggttgactacagcatcgggcgggacatccagcgccaggacctcagtgccattgcccgaaccctgcaggaatggtgtgtgggctgtgaggtcgtgctgtcaggcattgaggagcaggtgagccgtgccaaccaacacaaggagcagcagctgggcctgaagcagcagattgagagtgaggttgccaaccttaaaaaaaccattaaagttacgacggcagcagcagccgcagccacatctcaggaccctgagcaacacctgactgagctgagggaaccagctcctggcaccaaccagcgccagcccagcaagaaagcctcaaagggcaaggggctccgagggagcgccaagatttggtccaagtcgaattgaaaggactgtcgtttcctccctggggatgtggggtcccagctgcctgcctgcctcttaggagtcctcagagagccttctgtgcccctggccagctgataatcctaggttcatgacccttcacctcccctaaccccaaacatagatcacaccttctctagggaggaggcaaatgtaggtcatgtttttgttggtactttctgttttttgtgacttcatgtgttccattgctccccgctgccatgctctctcccttgtttccttaagagctcagcatctgtccctgttcattacatgtcattgagtaggtgggtagccctgatgggggtcgctctgtctggagcataacccacaggcgttttttctgccaccccatccctgcatgcctgatccccagttcctataccctacccctgacctattgagcagcctctgaagagccatagggcccccacctttactcacaccctgagaattctgggagccagtctgccatgccaggagtcactggacatgttcatcctagaatcctgtcacactacagtcatttcttttcctctctctggcccttgggtcctgggaatgctgctgcttcaaccccagagcctaagaatggcagccgtttcttaacatgttgagagatgattctttcttggccctggccatctcgggaagcttgatggcaatcctggaagggtttaatctccttttgtgagtttggtggggaagggaagggtatatagattgtattaaaaaaaaaaaggtatatatgcatatatctatatataatatgacgcagaaataaa

SEQ ID NO: 122175 - DNA, 569 bp, Homo sapiens
  Payload ID: 3949
  Gene Symbol: COPS7A
  Gene Name: COP9 signalosome subunit 7A
  ENST ID: ENST00000540408
  CDS Start-End: 205-393
aacagctgccggaggtgacggagcggcggccccgcccggtgcgctggaggtcgaagcttccaggtagcggcccgcagagcctgacccagggtacgacgaagcagtcggcgggagcccacggtcgctgggcggtgtctttaagggagggggcggagccacgtctctggacatcctgagcccaagtcccccacactcagtgcagtgatgagtgcggaagtgaaggtgacagggcagaaccaggagcaatttctgctcctagccaagtcggccaagggggcagcgctggccacactcatccatcaggtgctggaggcccctggtgtctacgtgtttggagaactgctggacatgcccaatgttagagagctgaagcccggaatcttcctccactaacagaggctcagaagaataagcttcgacacctctcagttgtcaccctggctgctaaagtaaagtgtatcccatatgcagtgttgctggaggctcttgccctgcgtaatgtgcggcagctggaagaccttgtgattgaggctgtgtatgctgacgtgcttcgtggctccctggaccag

SEQ ID NO: 122176 - DNA, 802 bp, Homo sapiens
  Payload ID: 3949
  Gene Symbol: COPS7A
  Gene Name: COP9 signalosome subunit 7A
  ENST ID: ENST00000543537
  CDS Start-End: 107-295
ggagagctgagggagcgtcgtcagggtggacaccatgcgacacccatttctcctttgcatcctctctggacatcctgagcccaagtcccccacactcagtgcagtgatgagtgcggaagtgaaggtgacagggcagaaccaggagcaatttctgctcctagccaagtcggccaagggggcagcgctggccacactcatccatcaggtgctggaggcccctggtgtctacgtgtttggagaactgctggacatgcccaatgttagagagctgaagcccggaatcttcctccactaacagaggctcagaagaataagcttcgacacctctcagttgtcaccctggctgctaaagtaaagtgtatcccatatgcagtgttgctggaggctcttgccctgcgtaatgtgcggcagctggaagaccttgtgattgaggctgtgtatgctgacgtgcttcgtggctccctggaccagcgcaaccagcggctcgaggttgactacagcatcgggcgggacatccagcgccaggacctcagtgccattgcccgaaccctgcaggaatggtgtgtgggctgtgaggtcgtgctgtcaggcattgaggagcaggtgagccgtgccaaccaacacaaggagcagcagctgggcctgaagcagcagattgagagtgaggttgccaaccttaaaaaaaccattaaagttacgacggcagcagcagccgcagccacatctcaggaccctgagcaacacctgactgagctgagggaaccagctcctggcaccaaccagcgccagcccagcaagaaag

SEQ ID NO: 122177 - DNA, 1610 bp, Homo sapiens
  Payload ID: 3949
  Gene Symbol: COPS7A
  Gene Name: COP9 signalosome subunit 7A
  ENST ID: ENST00000538410
  CDS Start-End: 142-930
aggcttggaacagctgccggaggtgacggagcggcggccccgcccggtgcgctggaggtcgaagcttccaggtagcggcccgcagagcctgacccaggctctggacatcctgagcccaagtcccccacactcagtgcagtgatgagtgcggaagtgaaggtgacagggcagaaccaggagcaatttctgctcctagccaagtcggccaagggggcagcgctggccacactcatccatcaggtgctggaggcccctggtgtctacgtgtttggagaactgctggacatgcccaatgttagagagctggctgagagtgactttgcctctaccttccggctgctcacagtgtttgcttatgggacatacgctgactacttagctgaagcccggaatcttcctccactaacagaggctcagaagaataagcttcgacacctctcagttgtcaccctggctgctaaagtaaagtgtatcccatatgcagtgttgctggaggctcttgccctgcgtaatgtgcggcagctggaagaccttgtgattgaggctgtgtatgctgacgtgcttcgtggctccctggaccagcgcaaccagcggctcgaggttgactacagcatcgggcgggacatccagcgccaggacctcagtgccattgcccgaaccctgcaggaatggtgtgtgggctgtgaggtcgtgctgtcaggcattgaggagcaggtgagccgtgccaaccaacacaaggagcagcagctgggcctgaagcagcagattgagagtgaggctccgagggagcgccaagatttggtccaagtcgaattgaaaggactgtcgtttcctccctggggatgtggggtcccagctgcctgcctgcctcttaggagtcctcagagagccttctgtgcccctggccagctgataatcctaggttcatgacccttcacctcccctaaccccaaacatagatcacaccttctctagggaggaggcaaatgtaggtcatgtttttgttggtactttctgttttttgtgacttcatgtgttccattgctccccgctgccatgctctctcccttgtttccttaagagctcagcatctgtccctgttcattacatgtcattgagtaggtgggtagccctgatgggggtcgctctgtctggagcataacccacaggcgttttttctgccaccccatccctgcatgcctgatccccagttcctataccctacccctgacctattgagcagcctctgaagagccatagggcccccacctttactcacaccctgagaattctgggagccagtctgccatgccaggagtcactggacatgttcatcctagaatcctgtcacactacagtcatttcttttcctctctctggcccttgggtcctgggaatgctgctgcttcaaccccagagcctaagaatggcagccgtttcttaacatgttgagagatgattctttcttggccctggccatctcgggaagcttgatggcaatcctggaagggtttaatctccttttgtgagtttggtggggaagggaagggtatatagattgtattaaaaaaaaaaaggtatatatgcatatatctatatataatatgacg

SEQ ID NO: 122178 - DNA, 502 bp, Homo sapiens
  Payload ID: 3949
  Gene Symbol: COPS7A
  Gene Name: COP9 signalosome subunit 7A
  ENST ID: ENST00000544725
  CDS Start-End: 127-502
gacgaagcagtcggcgggagcccacggtcgctgggcggtgtctttaagggagggggcggagccacgtgtaagcttcaatggggctctggacatcctgagcccaagtcccccacactcagtgcagtgatgagtgcggaagtgaaggtgacagggcagaaccaggagcaatttctgctcctagccaagtcggccaagggggcagcgctggccacactcatccatcaggtgctggaggcccctggtgtctacgtgtttggagaactgctggacatgcccaatgttagagagctggctgagagtgactttgcctctaccttccggctgctcacagtgtttgcttatgggacatacgctgactacttagctgaagcccggaatcttcctccactaacagaggctcagaagaataagcttcgacacctctcagttgtcaccctggctgctaaagtaaagtgtatcccatatgcagtgttgctggaggctcttgccctgcgtaatgtgc

SEQ ID NO: 122179 - DNA, 1728 bp, Homo sapiens
  Payload ID: 3949
  Gene Symbol: COPS7A
  Gene Name: COP9 signalosome subunit 7A
  ENST ID: ENST00000543939
  CDS Start-End: 192-380
ccccgcccggtgcgctggaggtcgaagcttccaggtagcggcccgcagagcctgacccagggtacgacgaagcagtcggcgggagcccacggtcgctgggcggtgtctttaagggagggggcggagccacgtgtaagcttcaatggggctctggacatcctgagcccaagtcccccacactcagtgcagtgatgagtgcggaagtgaaggtgacagggcagaaccaggagcaatttctgctcctagccaagtcggccaagggggcagcgctggccacactcatccatcaggtgctggaggcccctggtgtctacgtgtttggagaactgctggacatgcccaatgttagagagctgaagcccggaatcttcctccactaacagaggctcagaagaataagcttcgacacctctcagttgtcaccctggctgctaaagtaaagtgtatcccatatgcagtgttgctggaggctcttgccctgcgtaatgtgcggcagctggaagaccttgtgattgaggctgtgtatgctgacgtgcttcgtggctccctggaccagcgcaaccagcggctcgaggttgactacagcatcgggcgggacatccagcgccaggacctcagtgccattgcccgaaccctgcaggaatggtgtgtgggctgtgaggtcgtgctgtcaggcattgaggagcaggtgagccgtgccaaccaacacaaggagcagcagctgggcctgaagcagcagattgagagtgaggttgccaaccttaaaaaaaccattaaagttacgacggcagcagcagccgcagccacatctcaggaccctgagcaacacctgactgagctgagggaaccagctcctggcaccaaccagcgccagcccagcaagaaagcctcaaagggcaaggggctccgagggagcgccaagatttggtccaagtcgaattgaaaggactgtcgtttcctccctggggatgtggggtcccagctgcctgcctgcctcttaggagtcctcagagagccttctgtgcccctggccagctgataatcctaggttcatgacccttcacctcccctaaccccaaacatagatcacaccttctctagggaggaggcaaatgtaggtcatgtttttgttggtactttctgttttttgtgacttcatgtgttccattgctccccgctgccatgctctctcccttgtttccttaagagctcagcatctgtccctgttcattacatgtcattgagtaggtgggtagccctgatgggggtcgctctgtctggagcataacccacaggcgttttttctgccaccccatccctgcatgcctgatccccagttcctataccctacccctgacctattgagcagcctctgaagagccatagggcccccacctttactcacaccctgagaattctgggagccagtctgccatgccaggagtcactggacatgttcatcctagaatcctgtcacactacagtcatttcttttcctctctctggcccttgggtcctgggaatgctgctgcttcaaccccagagcctaagaatggcagccgtttcttaacatgttgagagatgattctttcttggccctggccatctcgggaagcttgatggcaatcctggaagggtttaatctccttttgtgagtttggtggggaagggaagggtatatagattgtattaaaaaaaaaaaggtatatatgcatatatctatatata

SEQ ID NO: 122180 - DNA, 754 bp, Homo sapiens
  Payload ID: 3949
  Gene Symbol: COPS7A
  Gene Name: COP9 signalosome subunit 7A
  ENST ID: ENST00000538753
  CDS Start-End: 117-754
ggagagctgagggagcgtcgtcagggtggacaccatgcgacacccatttctcctttgcatcctgtgtcttgggctctggacatcctgagcccaagtcccccacactcagtgcagtgatgagtgcggaagtgaaggtgacagggcagaaccaggagcaatttctgctcctagccaagtcggccaagggggcagcgctggccacactcatccatcaggtgctggaggcccctggtgtctacgtgtttggagaactgctggacatgcccaatgttagagagctggctgagagtgactttgcctctaccttccggctgctcacagtgtttgcttatgggacatacgctgactacttagctgaagcccggaatcttcctccactaacagaggctcagaagaataagcttcgacacctctcagttgtcaccctggctgctaaagtaaagtgtatcccatatgcagtgttgctggaggctcttgccctgcgtaatgtgcggcagctggaagaccttgtgattgaggctgtgtatgctgacgtgcttcgtggctccctggaccagcgcaaccagcggctcgaggttgactacagcatcgggcgggacatccagcgccaggacctcagtgccattgcccgaaccctgcaggaatggtgtgtgggctgtgaggtcgtgctgtcaggcattgaggagcaggtgagccgtgccaaccaacacaaggagcagcagctgggcctgaagcagcagattgagagtgaggt

SEQ ID NO: 122181 - DNA, 744 bp, Homo sapiens
  Payload ID: 3949
  Gene Symbol: COPS7A
  Gene Name: COP9 signalosome subunit 7A
  ENST ID: ENST00000546229
  CDS Start-End: 82-297
gcggggcagcaatggagagctgagggagcgtcgtcaggctctggacatcctgagcccaagtcccccacactcagtgcagtgatgagtgcggaagtgaaggtgacagggcagaaccaggagcaatttctgctcctagccaagtcggccaagggggcagcgctggccacactcatccatcaggtgctggaggcccctggtgtctacgtgtttggagaactgctggacatgcccaatgttagagagggtaggaattggatgacgtatggagcaagagggcattgtggtttgggagaatagtgtaaacaaaagcctgaaggtggaaatgagcccttcctatgtgaagagtgatcagagaggcagagaactccttttgctggctgagagtgactttgcctctaccttccggctgctcacagtgtttgcttatgggacatacgctgactacttagctgaagcccggaatcttcctccactaacagaggctcagaagaataagcttcgacacctctcagttgtcaccctggctgctaaagtaaagtgtatcccatatgcagtgttgctggaggctcttgccctgcgtaatgtgcggcagctggaagaccttgtgattgaggctgtgtatgctgacgtgcttcgtggctccctggaccagcgcaaccagcggctcgaggttgactacagcatcgggcgggacatccagcgccaggacctcagtgccattgcccgaaccctgcaggaatggtg

SEQ ID NO: 122182 - DNA, 1832 bp, Homo sapiens
  Payload ID: 3949
  Gene Symbol: COPS7A
  Gene Name: COP9 signalosome subunit 7A
  Uniprot ID: Q9UBW8
  ENST ID: ENST00000539735
  CDS Start-End: 216-1043
gaaaggcttggaacagctgccggaggtgacggagcggcggccccgcccggtgcgctggaggtcgaagcttccaggtagcggcccgcagagcctgacccagggtacgacgaagcagtcggcgggagcccacggtcgctgggcggtgtctttaagggagggggcggagccacgtctctggacatcctgagcccaagtcccccacactcagtgcagtgatgagtgcggaagtgaaggtgacagggcagaaccaggagcaatttctgctcctagccaagtcggccaagggggcagcgctggccacactcatccatcaggtgctggaggcccctggtgtctacgtgtttggagaactgctggacatgcccaatgttagagagctggctgagagtgactttgcctctaccttccggctgctcacagtgtttgcttatgggacatacgctgactacttagctgaagcccggaatcttcctccactaacagaggctcagaagaataagcttcgacacctctcagttgtcaccctggctgctaaagtaaagtgtatcccatatgcagtgttgctggaggctcttgccctgcgtaatgtgcggcagctggaagaccttgtgattgaggctgtgtatgctgacgtgcttcgtggctccctggaccagcgcaaccagcggctcgaggttgactacagcatcgggcgggacatccagcgccaggacctcagtgccattgcccgaaccctgcaggaatggtgtgtgggctgtgaggtcgtgctgtcaggcattgaggagcaggtgagccgtgccaaccaacacaaggagcagcagctgggcctgaagcagcagattgagagtgaggttgccaaccttaaaaaaaccattaaagttacgacggcagcagcagccgcagccacatctcaggaccctgagcaacacctgactgagctgagggaaccagctcctggcaccaaccagcgccagcccagcaagaaagcctcaaagggcaaggggctccgagggagcgccaagatttggtccaagtcgaattgaaaggactgtcgtttcctccctggggatgtggggtcccagctgcctgcctgcctcttaggagtcctcagagagccttctgtgcccctggccagctgataatcctaggttcatgacccttcacctcccctaaccccaaacatagatcacaccttctctagggaggaggcaaatgtaggtcatgtttttgttggtactttctgttttttgtgacttcatgtgttccattgctccccgctgccatgctctctcccttgtttccttaagagctcagcatctgtccctgttcattacatgtcattgagtaggtgggtagccctgatgggggtcgctctgtctggagcataacccacaggcgttttttctgccaccccatccctgcatgcctgatccccagttcctataccctacccctgacctattgagcagcctctgaagagccatagggcccccacctttactcacaccctgagaattctgggagccagtctgccatgccaggagtcactggacatgttcatcctagaatcctgtcacactacagtcatttcttttcctctctctggcccttgggtcctgggaatgctgctgcttcaaccccagagcctaagaatggcagccgtttcttaacatgttgagagatgattctttcttggccctggccatctcgggaagcttgatggcaatcctggaagggtttaatctccttttgtgagtttggtggggaagggaagggtatatagattgtattaaaaaaaaaaaggtatatatgcatatatctatatataatat

SEQ ID NO: 122183 - DNA, 940 bp, Homo sapiens
  Payload ID: 3949
  Gene Symbol: COPS7A
  Gene Name: COP9 signalosome subunit 7A
  ENST ID: ENST00000541866
  CDS Start-End: 364-940
cggggcagcaatggagagctgagggagcgtcgtcagggtggacaccatgcgacacccatttctcctttgcatcctgtgtcttggggttcaatggggtgcacgtgatggggcttggggttaggcccaggggagggggtgggtgtggcagccttgcgaagtggctgactttaggattcctagatcagaattttagaccgctccatgtctgattcctcaccgcagaaccgacttagtgcctttacaatccagtccctcagccttgtgcttcccatccgaccagccatcggggacctctagcttcacatcctctttccttgcagctctggacatcctgagcccaagtcccccacactcagtgcagtgatgagtgcggaagtgaaggtgacagggcagaaccaggagcaatttctgctcctagccaagtcggccaagggggcagcgctggccacactcatccatcaggtgctggaggcccctggtgtctacgtgtttggagaactgctggacatgcccaatgttagagagctggctgagagtgactttgcctctaccttccggctgctcacagtgtttgcttatgggacatacgctgactacttagctgaagcccggaatcttcctccactaacagaggctcagaagaataagcttcgacacctctcagttgtcaccctggctgctaaagtaaagtgtatcccatatgcagtgttgctggaggctcttgccctgcgtaatgtgcggcagctggaagaccttgtgattgaggctgtgtatgctgacgtgcttcgtggctccctggaccagcgcaaccagcggctcgaggttgactacagcatcgggcgggacatccagcgccaggacctcagtgccattgcccgaaccctgcaggaatggtgtgtgggctgtgaggtcgtgctgtcaggcattgaggagcaggtga

SEQ ID NO: 122184 - DNA, 552 bp, Homo sapiens
  Payload ID: 3949
  Gene Symbol: COPS7A
  Gene Name: COP9 signalosome subunit 7A
  ENST ID: ENST00000543170
  CDS Start-End: 116-304
aaggcttggaacagctgccggaggtgacggagcggcggccccgcccggtgcgctggaggtcgaagcttccagctctggacatcctgagcccaagtcccccacactcagtgcagtgatgagtgcggaagtgaaggtgacagggcagaaccaggagcaatttctgctcctagccaagtcggccaagggggcagcgctggccacactcatccatcaggtgctggaggcccctggtgtctacgtgtttggagaactgctggacatgcccaatgttagagagctgaagcccggaatcttcctccactaacagaggctcagaagaataagcttcgacacctctcagttgtcaccctggctgctaaagtaaagtgtatcccatatgcagtgttgctggaggctcttgccctgcgtaatgtgcggcagctggaagaccttgtgattgaggctgtgtatgctgacgtgcttcgtggctccctggaccagcgcaaccagcggctcgaggttgactacagcatcgggcgggacatccagcgccaggacctcagtgccattgcc

SEQ ID NO: 122185 - DNA, 534 bp, Homo sapiens
  Payload ID: 3949
  Gene Symbol: COPS7A
  Gene Name: COP9 signalosome subunit 7A
  ENST ID: ENST00000537022
  CDS Start-End: 113-283
agcggcggccccgcccggtgcgctggaggtcgaagcttccaggtagcggcccgcagagcctgacccaggctctggacatcctgagcccaagtcccccacactcagtgcagtgatgagtgcggaagtgaaggtgacagggcagaaccaggagcaatttctgctcctagccaagtcggccaagggggcagcgctggccacactcatccatcaggtgctggaggcccctggtgtctacgtgtttggagaactgctggacatgcccaatgttagagagtggaactaaagagtatcaatcaaagtgatgaaaaagaagcacttggctgggtgcggtggctcatgcctgtaatcccagcactttggaaggccaagctggctgagagtgactttgcctctaccttccggctgctcacagtgtttgcttatgggacatacgctgactacttagctgaagcccggaatcttcctccactaacagaggctcagaagaataagcttcgacacctctcagttgtcaccctggctgctaaagtaaag

SEQ ID NO: 122186 - DNA, 538 bp, Homo sapiens
  Payload ID: 3949
  Gene Symbol: COPS7A
  Gene Name: COP9 signalosome subunit 7A
  ENST ID: ENST00000544316
  CDS Start-End: 221-403
ggcagccttgcgaagtggctgactttaggattcctagatcagaattttagaccgctccatgtctgattcctcaccgcagaaccgacttagtgcctttacaatccagtccctcagccttgtgcttcccatccgaccagccatcggggacctctagcttcacatcctctttccttgcagctctggacatcctgagcccaagtcccccacactcagtgcagtgatgagtgcggaagtgaaggtgacagggcagaaccaggagcaatttctgctcctagccaagtcggccaagggggcagcgctggccacactcatccatcaggtgctggaggcccctggtgtctacgtgtttggagaactgctggacatgcccaatgttagagagagacacatggcaaactgctaggaacacagcagagagaaccgttcacacaaaagtggcagagttaatttacaatcagaggaggcagcctgagtcctgacatgctgacagtgtggaactaaagagtatcaatcaaagtgatgaaaaagaagcacttgg

SEQ ID NO: 122187 - DNA, 2034 bp, Homo sapiens
  Payload ID: 3949
  Gene Symbol: COPS7A
  Gene Name: COP9 signalosome subunit 7A
  Uniprot ID: Q9UBW8
  ENST ID: ENST00000534947
  CDS Start-End: 371-1198
gcgcgtgcggggcagcaatggagagctgagggagcgtcgtcagggtggacaccatgcgacacccatttctcctttgcatcctgtgtcttggggttcaatggggtgcacgtgatggggcttggggttaggcccaggggagggggtgggtgtggcagccttgcgaagtggctgactttaggattcctagatcagaattttagaccgctccatgtctgattcctcaccgcagaaccgacttagtgcctttacaatccagtccctcagccttgtgcttcccatccgaccagccatcggggacctctagcttcacatcctctttccttgcagctctggacatcctgagcccaagtcccccacactcagtgcagtgatgagtgcggaagtgaaggtgacagggcagaaccaggagcaatttctgctcctagccaagtcggccaagggggcagcgctggccacactcatccatcaggtgctggaggcccctggtgtctacgtgtttggagaactgctggacatgcccaatgttagagagctggctgagagtgactttgcctctaccttccggctgctcacagtgtttgcttatgggacatacgctgactacttagctgaagcccggaatcttcctccactaacagaggctcagaagaataagcttcgacacctctcagttgtcaccctggctgctaaagtaaagtgtatcccatatgcagtgttgctggaggctcttgccctgcgtaatgtgcggcagctggaagaccttgtgattgaggctgtgtatgctgacgtgcttcgtggctccctggaccagcgcaaccagcggctcgaggttgactacagcatcgggcgggacatccagcgccaggacctcagtgccattgcccgaaccctgcaggaatggtgtgtgggctgtgaggtcgtgctgtcaggcattgaggagcaggtgagccgtgccaaccaacacaaggagcagcagctgggcctgaagcagcagattgagagtgaggttgccaaccttaaaaaaaccattaaagttacgacggcagcagcagccgcagccacatctcaggaccctgagcaacacctgactgagctgagggaaccagctcctggcaccaaccagcgccagcccagcaagaaagcctcaaagggcaaggggctccgagggagcgccaagatttggtccaagtcgaattgaaaggactgtcgtttcctccctggggatgtggggtcccagctgcctgcctgcctcttaggagtcctcagagagccttctgtgcccctggccagctgataatcctaggttcatgacccttcacctcccctaaccccaaacatagatcacaccttctctagggaggaggcaaatgtaggtcatgtttttgttggtactttctgttttttgtgacttcatgtgttccattgctccccgctgccatgctctctcccttgtttccttaagagctcagcatctgtccctgttcattacatgtcattgagtaggtgggtagccctgatgggggtcgctctgtctggagcataacccacaggcgttttttctgccaccccatccctgcatgcctgatccccagttcctataccctacccctgacctattgagcagcctctgaagagccatagggcccccacctttactcacaccctgagaattctgggagccagtctgccatgccaggagtcactggacatgttcatcctagaatcctgtcacactacagtcatttcttttcctctctctggcccttgggtcctgggaatgctgctgcttcaaccccagagcctaagaatggcagccgtttcttaacatgttgagagatgattctttcttggccctggccatctcgggaagcttgatggcaatcctggaagggtttaatctccttttgtgagtttggtggggaagggaagggtatatagattgtattaaaaaaaaaaaggtatatatgcatatatctatatataatatgacgcagaaataaatctatgagaaatctatctacaaactaccctgaa

SEQ ID NO: 122188 - DNA, 871 bp, Homo sapiens
  Payload ID: 3949
  Gene Symbol: COPS7A
  Gene Name: COP9 signalosome subunit 7A
  ENST ID: ENST00000536872
  CDS Start-End: 367-555
gtgcggggcagcaatggagagctgagggagcgtcgtcagggtggacaccatgcgacacccatttctcctttgcatcctgtgtcttggggttcaatggggtgcacgtgatggggcttggggttaggcccaggggagggggtgggtgtggcagccttgcgaagtggctgactttaggattcctagatcagaattttagaccgctccatgtctgattcctcaccgcagaaccgacttagtgcctttacaatccagtccctcagccttgtgcttcccatccgaccagccatcggggacctctagcttcacatcctctttccttgcagctctggacatcctgagcccaagtcccccacactcagtgcagtgatgagtgcggaagtgaaggtgacagggcagaaccaggagcaatttctgctcctagccaagtcggccaagggggcagcgctggccacactcatccatcaggtgctggaggcccctggtgtctacgtgtttggagaactgctggacatgcccaatgttagagagctgaagcccggaatcttcctccactaacagaggctcagaagaataagcttcgacacctctcagttgtcaccctggctgctaaagtaaagtgtatcccatatgcagtgttgctggaggctcttgccctgcgtaatgtgcggcagctggaagaccttgtgattgaggctgtgtatgctgacgtgcttcgtggctccctggaccagcgcaaccagcggctcgaggttgactacagcatcgggcgggacatccagcgccaggacctcagtgccattgcccgaaccctgcaggaatggtgtgtgggctgtgaggtcgtgctgtcaggcattgaggagcaggtgagccg

SEQ ID NO: 122189 - DNA, 1768 bp, Homo sapiens
  Payload ID: 3949
  Gene Symbol: COPS7A
  Gene Name: COP9 signalosome subunit 7A
  ENST ID: ENST00000626119
  CDS Start-End: 183-371
ggaagtacggccggaagcccgccatagagtttagtggccagagcgactcttcagggaggtggcaggaaaggcttggaacagctgccggaggtgacggagcggcggccccgcccggtgcgctggaggtcgaagcttccagctctggacatcctgagcccaagtcccccacactcagtgcagtgatgagtgcggaagtgaaggtgacagggcagaaccaggagcaatttctgctcctagccaagtcggccaagggggcagcgctggccacactcatccatcaggtgctggaggcccctggtgtctacgtgtttggagaactgctggacatgcccaatgttagagagctgaagcccggaatcttcctccactaacagaggctcagaagaataagcttcgacacctctcagttgtcaccctggctgctaaagtaaagtgtatcccatatgcagtgttgctggaggctcttgccctgcgtaatgtgcggcagctggaagaccttgtgattgaggctgtgtatgctgacgtgcttcgtggctccctggaccagcgcaaccagcggctcgaggttgactacagcatcgggcgggacatccagcgccaggacctcagtgccattgcccgaaccctgcaggaatggtgtgtgggctgtgaggtcgtgctgtcaggcattgaggagcaggtgagccgtgccaaccaacacaaggagcagcagctgggcctgaagcagcagattgagagtgaggttgccaaccttaaaaaaaccattaaagttacgacggcagcagcagccgcagccacatctcaggaccctgagcaacacctgactgagctgagggaaccagctcctggcaccaaccagcgccagcccagcaagaaagcctcaaagggcaaggggctccgagggagcgccaagatttggtccaagtcgaattgaaaggactgtcgtttcctccctggggatgtggggtcccagctgcctgcctgcctcttaggagtcctcagagagccttctgtgcccctggccagctgataatcctaggttcatgacccttcacctcccctaaccccaaacatagatcacaccttctctagggaggaggcaaatgtaggtcatgtttttgttggtactttctgttttttgtgacttcatgtgttccattgctccccgctgccatgctctctcccttgtttccttaagagctcagcatctgtccctgttcattacatgtcattgagtaggtgggtagccctgatgggggtcgctctgtctggagcataacccacaggcgttttttctgccaccccatccctgcatgcctgatccccagttcctataccctacccctgacctattgagcagcctctgaagagccatagggcccccacctttactcacaccctgagaattctgggagccagtctgccatgccaggagtcactggacatgttcatcctagaatcctgtcacactacagtcatttcttttcctctctctggcccttgggtcctgggaatgctgctgcttcaaccccagagcctaagaatggcagccgtttcttaacatgttgagagatgattctttcttggccctggccatctcgggaagcttgatggcaatcctggaagggtttaatctccttttgtgagtttggtggggaagggaagggtatatagattgtattaaaaaaaaaaaggtatatatgcatatatctatatataatatgacgcagaaataaatctatgagaaatctatctacaaactaccctg

SEQ ID NO: 122190 - DNA, 2544 bp, Homo sapiens
  Payload ID: 3950
  Gene Symbol: COPS7B
  Gene Name: COP9 signalosome subunit 7B
  Uniprot ID: Q9H9Q2
  ENST ID: ENST00000350033
  CDS Start-End: 142-936
ggcgacgggtcggcggagacagaaaagcgccggacgccggggtgatcatggacgcttgacaacctgcgggcaggcgccgggaggccgagccagcgactaagaggaccgagaggtggcgtggacagatttcaaggccagagaatggcaggggaacagaaaccctcaagtaatctcctggagcagtttattttactagccaaaggtaccagtggctcagccctcactgctctcataagccaggtcttagaggctcccggagtgtatgtctttggagaacttctggagctggccaacgtgcaggagcttgcggaaggagctaatgctgcttatttgcagttgttgaacctgtttgcctatgggacatacccagattacatagccaacaaggagagcctgccagaactgagcacagctcagcagaacaagctgaagcatcttaccatcgtgagcttggcatcaagaatgaagtgtatcccctactccgtgttgctgaaagacctggagatgcggaatctccgggaactagaagaccttatcattgaggctgtctacactgacatcatccagggcaagctggaccagcgaaaccagctgctggaagtggatttctgcattggccgtgacatccgaaagaaggatatcaataatattgtcaagaccctgcatgaatggtgtgatggctgtgaagcagttctactgggcatcgagcagcaagttctgagagccaaccagtacaaagagaaccacaaccgaactcagcagcaggtagaagcagaggttaccaacatcaagaagacactcaaagccaccgcatcctcctcggctcaggagatggagcagcagctggctgaacgggagtgtccccctcacgctgagcagaggcagcccaccaagaagatgtccaaagtgaaaggtctggtctccagccgccactagggccggctggggcagctggcactcaccaggcctgggtcaggtggggaggggacaccaagggcccatttcctcccctctctacctgcagtgagttccagacctgcccgtcccctcaccagcgcctccccaccctgttggtactgttccagaaaaactgttactccccctcacccactccctccttccccagttgttcccttcagactcaggggctccaccaatgccatcccaaaacagggtcagacactgcccagcttccctccaggaggttcttgtctctgtgtaagggcttgtctccctcccagtttttcttttgctccacgtcattttgtcaggctggttataagccggaggcagctttaaccagcccccagggatgattgtgaaggaggcccctccccttgtgaggagggggcactcctctccagcccctggtaccacagtcctcacgatggtgcagtgatttctagccaggcgtcaagatgcgctgctttccctctcctgcctcatcccttgttggcagctccagttcaggccgtggagggacgtgatgctgggctgtgtttactaaacccacgggttttcagcctcttaagcccagctccgatctccaattagttgagagcgctgggttgactaacctctggtatctgagcacagacagagggtgctgtgggtctgctgggtggcagaaatggttccttccggcttggcgttctctcctggccactcttcctgctgcctctgactactcagccttgttttcggtgtgtaggccccagctgcccactggaactgccggctaatgcttgctctcccaagatctttaactcctcctggctgcacctgggtagggatggtggcatcgatgcccctctgtctgctgaaggacctgttgctgcttctgtcttttcacccctccttggctgatgacccagagccctctgatgatggcattctcctggcaagagaaaaagacttaactagacttctgaacttgaacagtttcaggttatattttaatttttttttttttgtacaggttctgattctaatacatttcaacatgcttttgtcccccctcgtgtcaatatttgttatagactaatcgccggggatttttcacctggttggagggtgggggtggggtggggtgtgtgtgtgtgtgtgtgtgtgtgtgtgtgtgtgtgtgtgtgtttgtaggtcctggactgattaaagttcattgaggaaaaagcacattttacaacaaaaaaataaaagtgtagatttaatgtatgtgactggggtttggggttgcatacctggtggatcttgaggggctgggattagggtggttcaggaaaatgtgatgctgtttccccatgtttagccatggtcaaaaaatggatttctcctttttctaaaatgtccagcaactgcctactgttgatcaaatgttgaagtattcttgtttcccttttaagccaatccatgtgcccacataacattatgcccaagtggagagttcactttaatttccaaagtatgtttcatgcagccccctgtcagctgctctgtggaaaaggggttctgttatgaaataaatgttgcactccctgcatccca

SEQ ID NO: 122191 - DNA, 2563 bp, Homo sapiens
  Payload ID: 3950
  Gene Symbol: COPS7B
  Gene Name: COP9 signalosome subunit 7B
  Uniprot ID: Q9H9Q2
  ENST ID: ENST00000373608
  CDS Start-End: 108-929
cgccggggtgatcatggacgcttgacaacctgcgggcaggcgccgggaggccgagccagcgactaagaggaccgagaggtggcgtggacagatttcaaggccagagaatggcaggggaacagaaaccctcaagtaatctcctggagcagtttattttactagccaaaggtaccagtggctcagccctcactgctctcataagccaggtcttagaggctcccggagtgtatgtctttggagaacttctggagctggccaacgtgcaggagcttgcggaaggagctaatgctgcttatttgcagttgttgaacctgtttgcctatgggacatacccagattacatagccaacaaggagagcctgccagaactgagcacagctcagcagaacaagctgaagcatcttaccatcgtgagcttggcatcaagaatgaagtgtatcccctactccgtgttgctgaaagacctggagatgcggaatctccgggaactagaagaccttatcattgaggctgtctacactgacatcatccagggcaagctggaccagcgaaaccagctgctggaagtggatttctgcattggccgtgacatccgaaagaaggatatcaataatattgtcaagaccctgcatgaatggtgtgatggctgtgaagcagttctactgggcatcgagcagcaagttctgagagccaaccagtacaaagagaaccacaaccgaactcagcagcaggtagaagcagagagggaaaaacgtgatgtccccctcctgaatcttataacaacagctttcttctggttaccaacatcaagaagacactcaaagccaccgcatcctcctcggctcaggagatggagcagcagctggctgaacgggagtgtccccctcacgctgagcagaggcagcccaccaagaagatgtccaaagtgaaaggtctggtctccagccgccactagggccggctggggcagctggcactcaccaggcctgggtcaggtggggaggggacaccaagggcccatttcctcccctctctacctgcagtgagttccagacctgcccgtcccctcaccagcgcctccccaccctgttggtactgttccagaaaaactgttactccccctcacccactccctccttccccagttgttcccttcagactcaggggctccaccaatgccatcccaaaacagggtcagacactgcccagcttccctccaggaggttcttgtctctgtgtaagggcttgtctccctcccagtttttcttttgctccacgtcattttgtcaggctggttataagccggaggcagctttaaccagcccccagggatgattgtgaaggaggcccctccccttgtgaggagggggcactcctctccagcccctggtaccacagtcctcacgatggtgcagtgatttctagccaggcgtcaagatgcgctgctttccctctcctgcctcatcccttgttggcagctccagttcaggccgtggagggacgtgatgctgggctgtgtttactaaacccacgggttttcagcctcttaagcccagctccgatctccaattagttgagagcgctgggttgactaacctctggtatctgagcacagacagagggtgctgtgggtctgctgggtggcagaaatggttccttccggcttggcgttctctcctggccactcttcctgctgcctctgactactcagccttgttttcggtgtgtaggccccagctgcccactggaactgccggctaatgcttgctctcccaagatctttaactcctcctggctgcacctgggtagggatggtggcatcgatgcccctctgtctgctgaaggacctgttgctgcttctgtcttttcacccctccttggctgatgacccagagccctctgatgatggcattctcctggcaagagaaaaagacttaactagacttctgaacttgaacagtttcaggttatattttaatttttttttttttgtacaggttctgattctaatacatttcaacatgcttttgtcccccctcgtgtcaatatttgttatagactaatcgccggggatttttcacctggttggagggtgggggtggggtggggtgtgtgtgtgtgtgtgtgtgtgtgtgtgtgtgtgtgtgtgtgtttgtaggtcctggactgattaaagttcattgaggaaaaagcacattttacaacaaaaaaataaaagtgtagatttaatgtatgtgactggggtttggggttgcatacctggtggatcttgaggggctgggattagggtggttcaggaaaatgtgatgctgtttccccatgtttagccatggtcaaaaaatggatttctcctttttctaaaatgtccagcaactgcctactgttgatcaaatgttgaagtattcttgtttcccttttaagccaatccatgtgcccacataacattatgcccaagtggagagttcactttaatttccaaagtatgtttcatgcagccccctgtcagctgctctgtggaaaaggggttctgttatgaaataaatgttgcactccctgcatccca

SEQ ID NO: 122192 - DNA, 1009 bp, Homo sapiens
  Payload ID: 3950
  Gene Symbol: COPS7B
  Gene Name: COP9 signalosome subunit 7B
  ENST ID: ENST00000409295
  CDS Start-End: 147-839
atcccctgcactcggttcctctgtaacttagactccagtgtgccgcgcagtgtgcgcaaattcacaaacccgcccgctgagttggtcgtttcggaatcccgagacttgaaacccaacgggaagacccttctcaccctcaaaagaagatgacagcccgcagagagttaacttctgtttacatggaactcagacatctgcaaatcatgcttgcggaaggagctaatgctgcttatttgcagttgttgaacctgtttgcctatgggacatacccagattacatagccaacaaggagagcctgccagaactgagcacagctcagcagaacaagctgaagcatcttaccatcgtgagcttggcatcaagaatgaagtgtatcccctactccgtgttgctgaaagacctggagatgcggaatctccgggaactagaagaccttatcattgaggctgtctacactgacatcatccagggcaagctggaccagcgaaaccagctgctggaagtggatttctgcattggccgtgacatccgaaagaaggatatcaataatattgtcaagaccctgcatgaatggtgtgatggctgtgaagcagttctactgggcatcgagcagcaagttctgagagccaaccagtacaaagagaaccacaaccgaactcagcagcaggtagaagcagaggttaccaacatcaagaagacactcaaagccaccgcatcctcctcggctcaggagatggagcagcagctggctgaacgggagtgtccccctcacgctgagcagaggcagcccaccaagaagatgtccaaagtgaaaggtctggtctccagccgccactagggccggctggggcagctggcactcaccaggcctgggtcaggtggggaggggacaccaagggcccatttcctcccctctctacctgcagtgagttccagacctgcccgtcccctcaccagcgcctccccaccctgttggtactgttccagaaaaactgttactccccctca

SEQ ID NO: 122193 - DNA, 806 bp, Homo sapiens
  Payload ID: 3950
  Gene Symbol: COPS7B
  Gene Name: COP9 signalosome subunit 7B
  Uniprot ID: Q9H9Q2
  ENST ID: ENST00000409091
  CDS Start-End: 283-756
gcactcggttcctctgtaacttagactccagtgtgccgcgcagtgtgcgcaaattcacaaacccgcccgctgagttggtcgtttcggaatcccgagacttgaaacccaacgggaagacccttctcaccctcaaaagaagatgacagcccgcagagagttaacttctgtttacatggaactcagacatctgcaaatcatgccaacaaggagagcctgccagaactgagcacagctcagcagaacaagctgaagcatcttaccatcgtgagcttggcatcaagaatgaagtgtatcccctactccgtgttgctgaaagacctggagatgcggaatctccgggaactagaagaccttatcattgaggctgtctacactgacatcatccagggcaagctggaccagcgaaaccagctgctggaagtggatttctgcattggccgtgacatccgaaagaaggatatcaataatattgtcaagaccctgcatgaatggtgtgatggctgtgaagcagttctactgggcatcgagcagcaagttctgagagccaaccagtacaaagagaaccacaaccgaactcagcagcaggtagaagcagaggttaccaacatcaagaagacactcaaagccaccgcatcctcctcggctcaggagatggagcagcagctggctgaacgggagtgtccccctcacgctgagcagaggcagcccaccaagaagatgtccaaagtgaaaggtctggtctccagccgccactagggccggctggggcagctggcactcaccaggcctgggtcaggtggggaggg

SEQ ID NO: 122194 - DNA, 1103 bp, Homo sapiens
  Payload ID: 3950
  Gene Symbol: COPS7B
  Gene Name: COP9 signalosome subunit 7B
  Uniprot ID: Q9H9Q2
  ENST ID: ENST00000410024
  CDS Start-End: 230-1024
tcccagcatcccctgcactcggttcctctgtaacttagactccagtgtgccgcgcagtgtgcgcaaattcacaaacccgcccgctgagttggtcgtttcggaatcccgagacttgaaacccaacgggaagacccttctcaccctcaaaagaagatgacagcccgcagagagttaacttctgtttacatggaactcagacatctgcaaatcatgatttcaaggccagagaatggcaggggaacagaaaccctcaagtaatctcctggagcagtttattttactagccaaaggtaccagtggctcagccctcactgctctcataagccaggtcttagaggctcccggagtgtatgtctttggagaacttctggagctggccaacgtgcaggagcttgcggaaggagctaatgctgcttatttgcagttgttgaacctgtttgcctatgggacatacccagattacatagccaacaaggagagcctgccagaactgagcacagctcagcagaacaagctgaagcatcttaccatcgtgagcttggcatcaagaatgaagtgtatcccctactccgtgttgctgaaagacctggagatgcggaatctccgggaactagaagaccttatcattgaggctgtctacactgacatcatccagggcaagctggaccagcgaaaccagctgctggaagtggatttctgcattggccgtgacatccgaaagaaggatatcaataatattgtcaagaccctgcatgaatggtgtgatggctgtgaagcagttctactgggcatcgagcagcaagttctgagagccaaccagtacaaagagaaccacaaccgaactcagcagcaggtagaagcagaggttaccaacatcaagaagacactcaaagccaccgcatcctcctcggctcaggagatggagcagcagctggctgaacgggagtgtccccctcacgctgagcagaggcagcccaccaagaagatgtccaaagtgaaaggtctggtctccagccgccactagggccggctggggcagctggcactcaccaggcctgggtcaggtggggaggggacaccaagggcccatttcctcccctctc

SEQ ID NO: 122195 - DNA, 2051 bp, Homo sapiens
  Payload ID: 3950
  Gene Symbol: COPS7B
  Gene Name: COP9 signalosome subunit 7B
  ENST ID: ENST00000410017
  CDS Start-End: 111-947
ggacgccggggtgatcatggacgcttgacaacctgcgggcaggcgccgggaggccgagccagcgactaagaggaccgagaggtggcgtggacagatttcaaggccagagaatggcaggggaacagaaaccctcaagtaatctcctggagcagtttattttactagccaaaggtaccagtggctcagccctcactgctctcataagccaggtcttagaggctcccggagtgtatgtctttggagaacttctggagctggccaacgtgcaggagcttgcggaaggagctaatgctgcttatttgcagttgttgaacctgtttgcctatgggacatacccagattacatagccaacaaggagagcctgccagaactgagcacagctcagcagaacaagctgaagcatcttaccatcgtgagcttggcatcaagaatgaagtgtatcccctactccgtgttgctgaaagacctggagatgcggaatctccgggaactagaagaccttatcattgaggctgtctacactgacatcatccagggcaagctggaccagcgaaaccagctgctggaagtggatttctgcattggccgtgacatccgaaagaaggatatcaataatattgtcaagaccctgcatgaatggtgtgatggctgtgaagcagttctactgggcatcgagcagcaagttctgagagccaaccagtacaaagagaaccacaaccgaactcagcagcaggtagaagcagagattgcttgttttcagagggaaaaacgtgatgtccccctcctgaatcttataacaacagctttcttctggttaccaacatcaagaagacactcaaagccaccgcatcctcctcggctcaggagatggagcagcagctggctgaacgggagtgtccccctcacgctgagcagaggcagcccaccaagaagatgtccaaagtgaaaggtctggtctccagccgccactagggccggctggggcagctggcactcaccaggcctgggtcaggtggggaggggacaccaagggcccatttcctcccctctctacctgcagtgagttccagacctgcccgtcccctcaccagcgcctccccaccctgttggtactgttccagaaaaactgttactccccctcacccactccctccttccccagttgttcccttcagactcaggggctccaccaatgccatcccaaaacagggtcagacactgcccagcttccctccaggaggttcttgtctctgtgtaagggcttgtctccctcccagtttttcttttgctccacgtcattttgtcaggctggttataagccggaggcagctttaaccagcccccagggatgattgtgaaggaggcccctccccttgtgaggagggggcactcctctccagcccctggtaccacagtcctcacgatggtgcagtgatttctagccaggcgtcaagatgcgctgctttccctctcctgcctcatcccttgttggcagctccagttcaggccgtggagggacgtgatgctgggctgtgtttactaaacccacgggttttcagcctcttaagcccagctccgatctccaattagttgagagcgctgggttgactaacctctggtatctgagcacagacagagggtgctgtgggtctgctgggtggcagaaatggttccttccggcttggcgttctctcctggccactcttcctgctgcctctgactactcagccttgttttcggtgtgtaggccccagctgcccactggaactgccggctaatgcttgctctcccaagatctttaactcctcctggctgcacctgggtagggatggtggcatcgatgcccctctgtctgctgaaggacctgttgctgcttctgtcttttcacccctccttggctgatgacccagagccctctgatgatggcattctcctggcaagagaaaaagacttaactagacttctgaacttgaacagtttcaggttatattttaatttttttttttttgtacaggttctgattctaatacatttcaacatgcttttgtcc

SEQ ID NO: 122196 - DNA, 1935 bp, Homo sapiens
  Payload ID: 3950
  Gene Symbol: COPS7B
  Gene Name: COP9 signalosome subunit 7B
  ENST ID: ENST00000412922
  CDS Start-End: 111-422
ggacgccggggtgatcatggacgcttgacaacctgcgggcaggcgccgggaggccgagccagcgactaagaggaccgagaggtggcgtggacagatttcaaggccagagaatggcaggggaacagaaaccctcaagtaatctcctggagcagtttattttactagccaaaggtaccagtggctcagccctcactgctctcataagccaggtcttagaggctcccggagtgtatgtctttggagaacttctggagctggccaacgtgcaggagcttgcggaaggagctaatgctgcttatttgcagttgttgaacctgtttgcctatgggacatacccagattacatagtgtatcccctactccgtgttgctgaaagacctggagatgcggaatctccgggaactagaagaccttatcattgaggctgtctacactgacatcatccagggcaagctggaccagcgaaaccagctgctggaagtggatttctgcattggccgtgacatccgaaagaaggatatcaataatattgtcaagaccctgcatgaatggtgtgatggctgtgaagcagttctactgggcatcgagcagcaagttctgagagccaaccagtacaaagagaaccacaaccgaactcagcagcaggtagaagcagaggttaccaacatcaagaagacactcaaagccaccgcatcctcctcggctcaggagatggagcagcagctggctgaacgggagtgtccccctcacgctgagcagaggcagcccaccaagaagatgtccaaagtgaaaggtctggtctccagccgccactagggccggctggggcagctggcactcaccaggcctgggtcaggtggggaggggacaccaagggcccatttcctcccctctctacctgcagtgagttccagacctgcccgtcccctcaccagcgcctccccaccctgttggtactgttccagaaaaactgttactccccctcacccactccctccttccccagttgttcccttcagactcaggggctccaccaatgccatcccaaaacagggtcagacactgcccagcttccctccaggaggttcttgtctctgtgtaagggcttgtctccctcccagtttttcttttgctccacgtcattttgtcaggctggttataagccggaggcagctttaaccagcccccagggatgattgtgaaggaggcccctccccttgtgaggagggggcactcctctccagcccctggtaccacagtcctcacgatggtgcagtgatttctagccaggcgtcaagatgcgctgctttccctctcctgcctcatcccttgttggcagctccagttcaggccgtggagggacgtgatgctgggctgtgtttactaaacccacgggttttcagcctcttaagcccagctccgatctccaattagttgagagcgctgggttgactaacctctggtatctgagcacagacagagggtgctgtgggtctgctgggtggcagaaatggttccttccggcttggcgttctctcctggccactcttcctgctgcctctgactactcagccttgttttcggtgtgtaggccccagctgcccactggaactgccggctaatgcttgctctcccaagatctttaactcctcctggctgcacctgggtagggatggtggcatcgatgcccctctgtctgctgaaggacctgttgctgcttctgtcttttcacccctccttggctgatgacccagagccctctgatgatggcattctcctggcaagagaaaaagacttaactagacttctgaacttgaacagtttcaggttatattttaatttttttttttttgtacaggttctgattctaatacatttcaacatgcttttgtcccccctcgtgtcaatatttgttatagactaatcgccggggat

SEQ ID NO: 122197 - DNA, 584 bp, Homo sapiens
  Payload ID: 3950
  Gene Symbol: COPS7B
  Gene Name: COP9 signalosome subunit 7B
  ENST ID: ENST00000432387
  CDS Start-End: 120-356
aaaagcgccggacgccggggtgatcatggacgcttgacaacctgcgggcaggcgccgggaggccgagccagcgactaagaggaccgagaggtggcgtggacagatttcaaggccagagaatggcaggggaacagaaaccctcaagtaatctcctggagcagtttattttactagccaaaggtaccagtggctcagccctcactgctctcataagccaggtcttagaggctcccggagtgtatgtctttggagaacttctggagctggccaacgtgcaggagccaggatggtctcgatctcctgacctcatgatccacccgcctcggcctcccaaagtgctgggattacaggcgtgagccaccgcgcccggcccacgtttgtgatttaaacaacaacaacaacaacaacaaccagttaacgtaattgacagcagagaagttccaggcagaacagtggctctttcgtttttcttctacacatggctttttgccatcagcatcagtgaagacttgcggaaggagctaatgctgcttatttgcagttgttgaacctgtttgcctatgggacatacccagattacatag

SEQ ID NO: 122198 - DNA, 474 bp, Homo sapiens
  Payload ID: 3950
  Gene Symbol: COPS7B
  Gene Name: COP9 signalosome subunit 7B
  ENST ID: ENST00000436564
  CDS Start-End: 1-149
tgtatgtctttggagaacttctggagctggccaacgtgcaggagcttgcggaaggagctaatgctgcttatttgcagttgttgaacctgtttgcctatgggacatacccagattacatagatgagattcttgaggactggtgtttgtagggctcttggagtgctgtgaagtgcagaatacccacctgtagaatgtttcaacattttaaatattatcaaaataataccagcatattgaagaaaatttggaaaatagactttttaaaagtcactcataggctgggcgcggtggctcatgcctgtaatcccagcactttgggaggccgaggcaggcagatcacttgagccaacaaggagagcctgccagaactgagcacagctcagcagaacaagctgaagcatcttaccatcgtgagcttggcatcaagaatgaagtgtatcccctactccgtgttgctgaaagacctggagatgc

SEQ ID NO: 122199 - DNA, 559 bp, Homo sapiens
  Payload ID: 3950
  Gene Symbol: COPS7B
  Gene Name: COP9 signalosome subunit 7B
  ENST ID: ENST00000450501
  CDS Start-End: 121-309
gaaaagcgccggacgccggggtgatcatggacgcttgacaacctgcgggcaggcgccgggaggccgagccagcgactaagaggaccgagaggtggcgtggacagatttcaaggccagagaatggcaggggaacagaaaccctcaagtaatctcctggagcagtttattttactagccaaaggtaccagtggctcagccctcactgctctcataagccaggtcttagaggctcccggagtgtatgtctttggagaacttctggagctggccaacgtgcaggaggatggtctcgatctcctgacctcatgatccacccgcctcggcctcccaaagtgctgggattacaggcgtgagccaccgcgcccggcccacgtttgtgatttaaacaacaacaacaacaacaacaaccagttaacgtaattgacagcagagaagttccaggcagaacagtggctctttcgtttttcttctacacatggctttttgccatcagcatcagtgaagacttgcggaaggagctaatgctgcttatttgcagttgttgaacctgtttgcctat

SEQ ID NO: 122200 - DNA, 2442 bp, Homo sapiens
  Payload ID: 3950
  Gene Symbol: COPS7B
  Gene Name: COP9 signalosome subunit 7B
  ENST ID: ENST00000413197
  CDS Start-End: 122-310
agaaaagcgccggacgccggggtgatcatggacgcttgacaacctgcgggcaggcgccgggaggccgagccagcgactaagaggaccgagaggtggcgtggacagatttcaaggccagagaatggcaggggaacagaaaccctcaagtaatctcctggagcagtttattttactagccaaaggtaccagtggctcagccctcactgctctcataagccaggtcttagaggctcccggagtgtatgtctttggagaacttctggagctggccaacgtgcaggagccaacaaggagagcctgccagaactgagcacagctcagcagaacaagctgaagcatcttaccatcgtgagcttggcatcaagaatgaagtgtatcccctactccgtgttgctgaaagacctggagatgcggaatctccgggaactagaagaccttatcattgaggctgtctacactgacatcatccagggcaagctggaccagcgaaaccagctgctggaagtggatttctgcattggccgtgacatccgaaagaaggatatcaataatattgtcaagaccctgcatgaatggtgtgatggctgtgaagcagttctactgggcatcgagcagcaagttctgagagccaaccagtacaaagagaaccacaaccgaactcagcagcaggtagaagcagaggttaccaacatcaagaagacactcaaagccaccgcatcctcctcggctcaggagatggagcagcagctggctgaacgggagtgtccccctcacgctgagcagaggcagcccaccaagaagatgtccaaagtgaaaggtctggtctccagccgccactagggccggctggggcagctggcactcaccaggcctgggtcaggtggggaggggacaccaagggcccatttcctcccctctctacctgcagtgagttccagacctgcccgtcccctcaccagcgcctccccaccctgttggtactgttccagaaaaactgttactccccctcacccactccctccttccccagttgttcccttcagactcaggggctccaccaatgccatcccaaaacagggtcagacactgcccagcttccctccaggaggttcttgtctctgtgtaagggcttgtctccctcccagtttttcttttgctccacgtcattttgtcaggctggttataagccggaggcagctttaaccagcccccagggatgattgtgaaggaggcccctccccttgtgaggagggggcactcctctccagcccctggtaccacagtcctcacgatggtgcagtgatttctagccaggcgtcaagatgcgctgctttccctctcctgcctcatcccttgttggcagctccagttcaggccgtggagggacgtgatgctgggctgtgtttactaaacccacgggttttcagcctcttaagcccagctccgatctccaattagttgagagcgctgggttgactaacctctggtatctgagcacagacagagggtgctgtgggtctgctgggtggcagaaatggttccttccggcttggcgttctctcctggccactcttcctgctgcctctgactactcagccttgttttcggtgtgtaggccccagctgcccactggaactgccggctaatgcttgctctcccaagatctttaactcctcctggctgcacctgggtagggatggtggcatcgatgcccctctgtctgctgaaggacctgttgctgcttctgtcttttcacccctccttggctgatgacccagagccctctgatgatggcattctcctggcaagagaaaaagacttaactagacttctgaacttgaacagtttcaggttatattttaatttttttttttttgtacaggttctgattctaatacatttcaacatgcttttgtcccccctcgtgtcaatatttgttatagactaatcgccggggatttttcacctggttggagggtgggggtggggtggggtgtgtgtgtgtgtgtgtgtgtgtgtgtgtgtgtgtgtgtgtgtttgtaggtcctggactgattaaagttcattgaggaaaaagcacattttacaacaaaaaaataaaagtgtagatttaatgtatgtgactggggtttggggttgcatacctggtggatcttgaggggctgggattagggtggttcaggaaaatgtgatgctgtttccccatgtttagccatggtcaaaaaatggatttctcctttttctaaaatgtccagcaactgcctactgttgatcaaatgttgaagtattcttgtttcccttttaagccaatccatgtgcccacataacattatgcccaagtggagagttcactttaatttccaaagtatgtttcatgcagccccctgtcagctgctctgtggaaaaggggttctgttatgaaataaatgttgcactccctgc

SEQ ID NO: 122201 - DNA, 978 bp, Homo sapiens
  Payload ID: 3950
  Gene Symbol: COPS7B
  Gene Name: COP9 signalosome subunit 7B
  ENST ID: ENST00000449784
  CDS Start-End: 194-358
agactccagtgtgccgcgcagtgtgcgcaaattcacaaacccgcccgctgagttggtcgtttcggaatcccgagacttgaaacccaacgggaagacccttctcaccctcaaaagaagatgacagcccgcagagagttaacttctgtttacatggaactcagacatctgcaaatcatgatttcaaggccagagaatggcaggggaacagaaaccctcaagtaatctcctggagcagtttattttactagccaaaggtaccagtggctcagccctcactgctctcataagccaggtcttagaggctcccggagtgtatgtctttggagaacttctggagctggccaacgtgcaggagtagagacggggtttcaccttgttagccaggatggtctcgatctcctgacctcatgatccacccgcctcggcctcccaaagtgctgggattacaggcgtgagccaccgcgcccggcccacgtttgtgatttaaacaacaacaacaacaacaacaaccagttaacgtaattgacagcagagaagttccaggcagaacagtggctctttcgtttttcttctacacatggctttttgccatcagcatcagtgaagacttgcggaaggagctaatgctgcttatttgcagttgttgaacctgtttgcctatgggacatacccagattacatagccaacaaggagagcctgccagaactgagcacagctcagcagaacaagctgaagcatcttaccatcgtgagcttggcatcaagaatgaagtgtatcccctactccgtgttgctgaaagacctggagatgcggaatctccgggaactagaagaccttatcattgaggctgtctacactgacatcatccagggcaagctggaccagcgaaaccagctgctggaagtggatttctgcattggccgtgacatccgaaagaaggatatcaataatattgtcaagaccctgcatgaatggtg

SEQ ID NO: 122202 - DNA, 600 bp, Homo sapiens
  Payload ID: 3950
  Gene Symbol: COPS7B
  Gene Name: COP9 signalosome subunit 7B
  ENST ID: ENST00000452375
  CDS Start-End: 194-400
agactccagtgtgccgcgcagtgtgcgcaaattcacaaacccgcccgctgagttggtcgtttcggaatcccgagacttgaaacccaacgggaagacccttctcaccctcaaaagaagatgacagcccgcagagagttaacttctgtttacatggaactcagacatctgcaaatcatgatttcaaggccagagaatggcaggggaacagaaaccctcaagtaatctcctggagcagtttattttactagccaaaggtaccagtggctcagccctcactgctctcataagccaggtcttagaggctcccggagtgtatgtctttggagaacttctggagctggccaacgtgcaggagagacggggtttcaccttgttagccaggatggtctcgatctcctgacctcatgatccacccgcctcggcctcccaaagtgctgggattacaggcgtgagccaccgcgcccggcccacgtttgtgatttaaacaacaacaacaacaacaacaaccagttaacgtaattgacagcagagaagttccaggcagaacagtggctctttcgtttttcttctacacatggctttttgccatcagcatcagtg

SEQ ID NO: 122203 - DNA, 668 bp, Homo sapiens
  Payload ID: 3950
  Gene Symbol: COPS7B
  Gene Name: COP9 signalosome subunit 7B
  ENST ID: ENST00000449174
  CDS Start-End: 1-519
tacactgacatcatccagggcaagctggaccagcgaaaccagctgctggaagtggatttctgcattggccgtgacatccgaaagaaggatatcaataatattgtcaagaccctgcatgaatggtgtgatggctgtgaagcagttctactgggcatcgagcagcaagttctgagagccaaccagtacaaagagaaccacaaccgaactcagcagcaggtagaagcagaggttaccaacatcaagaagacactcaaagccaccgcatcctcctcggctcaggagatggagcagcagctggctgaacgggagtgtccccctcacgctgagcagaggcagcccaccaagaagatgtccaaagtgaaaggccccagctgcccactggaactgccggctaatgcttgctctcccaagatctttaactcctcctggctgcacctgggtagggatggtggcatcgatgcccctctgtctgctgaaggacctgttgctgcttctgtcttttcacccctccttggctgatgacccagagccctctgatgatggcattctcctggcaagagaaaaagacttaactagacttctgaacttgaacagtttcaggttatattttaatttttttttttttgtacaggttctgattctaatacatttcaacatgcttttgtccc

SEQ ID NO: 122204 - DNA, 563 bp, Homo sapiens
  Payload ID: 3950
  Gene Symbol: COPS7B
  Gene Name: COP9 signalosome subunit 7B
  ENST ID: ENST00000357490
  CDS Start-End: 120-284
aaaagcgccggacgccggggtgatcatggacgcttgacaacctgcgggcaggcgccgggaggccgagccagcgactaagaggaccgagaggtggcgtggacagatttcaaggccagagaatggcaggggaacagaaaccctcaagtaatctcctggagcagtttattttactagccaaaggtaccagtggctcagccctcactgctctcataagccaggtcttagaggctcccggagtgtatgtctttggagaacttctggagctggccaacgtgcaggagtagagacggggtttcaccttgttagccaggatggtctcgatctcctgacctcatgatccacccgcctcggcctcccaaagtgctgggattacaggcgtgagccaccgcgcccggcccacgtttgtgatttaaacaacaacaacaacaacaacaaccagttaacgtaattgacagcagagaagttccaggcagaacagtggctctttcgtttttcttctacacatggctttttgccatcagcatcagtgaagacttgcggaaggagctaatgctgcttatttg

SEQ ID NO: 122205 - DNA, 571 bp, Homo sapiens
  Payload ID: 3950
  Gene Symbol: COPS7B
  Gene Name: COP9 signalosome subunit 7B
  ENST ID: ENST00000412591
  CDS Start-End: 122-571
agaaaagcgccggacgccggggtgatcatggacgcttgacaacctgcgggcaggcgccgggaggccgagccagcgactaagaggaccgagaggtggcgtggacagatttcaaggccagagaatggcaggggaacagaaaccctcaagtaatctcctggagcagtttattttactagccaaaggtaccagtggctcagccctcactgctctcataagccaggtcttagaggctcccggagtgtatgtctttggagaacttctggagctggccaacgtgcaggagtgtatcccctactccgtgttgctgaaagacctggagatgcggaatctccgggaactagaagaccttatcattgaggctgtctacactgacatcatccagggcaagctggaccagcgaaaccagctgctggaagtggatttctgcattggccgtgacatccgaaagaaggatatcaataatattgtcaagaccctgcatgaatggtgtgatggctgtgaagcagttctactgggcatcgagcagcaagttctgagagccaaccagtacaaagagaaccacaaccgaact

SEQ ID NO: 122206 - DNA, 2468 bp, Homo sapiens
  Payload ID: 3950
  Gene Symbol: COPS7B
  Gene Name: COP9 signalosome subunit 7B
  ENST ID: ENST00000611614
  CDS Start-End: 230-859
tcccagcatcccctgcactcggttcctctgtaacttagactccagtgtgccgcgcagtgtgcgcaaattcacaaacccgcccgctgagttggtcgtttcggaatcccgagacttgaaacccaacgggaagacccttctcaccctcaaaagaagatgacagcccgcagagagttaacttctgtttacatggaactcagacatctgcaaatcatgatttcaaggccagagaatggcaggggaacagaaaccctcaagtaatctcctggagcagtttattttactagccaaaggtaccagtggctcagccctcactgctctcataagccaggtcttagaggctcccggagtgtatgtctttggagaacttctggagctggccaacgtgcaggagtgtatcccctactccgtgttgctgaaagacctggagatgcggaatctccgggaactagaagaccttatcattgaggctgtctacactgacatcatccagggcaagctggaccagcgaaaccagctgctggaagtggatttctgcattggccgtgacatccgaaagaaggatatcaataatattgtcaagaccctgcatgaatggtgtgatggctgtgaagcagttctactgggcatcgagcagcaagttctgagagccaaccagtacaaagagaaccacaaccgaactcagcagcaggtagaagcagaggttaccaacatcaagaagacactcaaagccaccgcatcctcctcggctcaggagatggagcagcagctggctgaacgggagtgtccccctcacgctgagcagaggcagcccaccaagaagatgtccaaagtgaaaggtctggtctccagccgccactagggccggctggggcagctggcactcaccaggcctgggtcaggtggggaggggacaccaagggcccatttcctcccctctctacctgcagtgagttccagacctgcccgtcccctcaccagcgcctccccaccctgttggtactgttccagaaaaactgttactccccctcacccactccctccttccccagttgttcccttcagactcaggggctccaccaatgccatcccaaaacagggtcagacactgcccagcttccctccaggaggttcttgtctctgtgtaagggcttgtctccctcccagtttttcttttgctccacgtcattttgtcaggctggttataagccggaggcagctttaaccagcccccagggatgattgtgaaggaggcccctccccttgtgaggagggggcactcctctccagcccctggtaccacagtcctcacgatggtgcagtgatttctagccaggcgtcaagatgcgctgctttccctctcctgcctcatcccttgttggcagctccagttcaggccgtggagggacgtgatgctgggctgtgtttactaaacccacgggttttcagcctcttaagcccagctccgatctccaattagttgagagcgctgggttgactaacctctggtatctgagcacagacagagggtgctgtgggtctgctgggtggcagaaatggttccttccggcttggcgttctctcctggccactcttcctgctgcctctgactactcagccttgttttcggtgtgtaggccccagctgcccactggaactgccggctaatgcttgctctcccaagatctttaactcctcctggctgcacctgggtagggatggtggcatcgatgcccctctgtctgctgaaggacctgttgctgcttctgtcttttcacccctccttggctgatgacccagagccctctgatgatggcattctcctggcaagagaaaaagacttaactagacttctgaacttgaacagtttcaggttatattttaatttttttttttttgtacaggttctgattctaatacatttcaacatgcttttgtcccccctcgtgtcaatatttgttatagactaatcgccggggatttttcacctggttggagggtgggggtggggtggggtgtgtgtgtgtgtgtgtgtgtgtgtgtgtgtgtgtgtgtgtgtttgtaggtcctggactgattaaagttcattgaggaaaaagcacattttacaacaaaaaaataaaagtgtagatttaatgtatgtgactggggtttggggttgcatacctggtggatcttgaggggctgggattagggtggttcaggaaaatgtgatgctgtttccccatgtttagccatggtcaaaaaatggatttctcctttttctaaaatgtccagcaactgcctactgttgatcaaatgttgaagtattcttgtttcccttttaagccaatccatgtgcccacataacattatgcccaagtggagagttcactttaatttccaaagtatgtttcatgcagccccctgtcagctgctctgtggaaaaggggttctgttatgaaataaatgttgcactccctgcatcccat

SEQ ID NO: 122207 - DNA, 2500 bp, Homo sapiens
  Payload ID: 3950
  Gene Symbol: COPS7B
  Gene Name: COP9 signalosome subunit 7B
  Uniprot ID: Q9H9Q2
  ENST ID: ENST00000620578
  CDS Start-End: 418-891
agcggtgggaggcttccgggggagctgcacgggcgacgggtcggcggagacagaaaagcgccggacgccggggtgatcatggacgcttgacaacctgcgggcaggcgccgggaggccgagccagcgactaagaggaccgagaggtggcgtggacagatttcaaggccagagaatggcaggggaacagaaaccctcaagtaatctcctggagcagtttattttactagccaaaggtaccagtggctcagccctcactgctctcataagccaggtcttagaggctcccggagtgtatgtctttggagaacttctggagctggccaacgtgcaggagccaacaaggagagcctgccagaactgagcacagctcagcagaacaagctgaagcatcttaccatcgtgagcttggcatcaagaatgaagtgtatcccctactccgtgttgctgaaagacctggagatgcggaatctccgggaactagaagaccttatcattgaggctgtctacactgacatcatccagggcaagctggaccagcgaaaccagctgctggaagtggatttctgcattggccgtgacatccgaaagaaggatatcaataatattgtcaagaccctgcatgaatggtgtgatggctgtgaagcagttctactgggcatcgagcagcaagttctgagagccaaccagtacaaagagaaccacaaccgaactcagcagcaggtagaagcagaggttaccaacatcaagaagacactcaaagccaccgcatcctcctcggctcaggagatggagcagcagctggctgaacgggagtgtccccctcacgctgagcagaggcagcccaccaagaagatgtccaaagtgaaaggtctggtctccagccgccactagggccggctggggcagctggcactcaccaggcctgggtcaggtggggaggggacaccaagggcccatttcctcccctctctacctgcagtgagttccagacctgcccgtcccctcaccagcgcctccccaccctgttggtactgttccagaaaaactgttactccccctcacccactccctccttccccagttgttcccttcagactcaggggctccaccaatgccatcccaaaacagggtcagacactgcccagcttccctccaggaggttcttgtctctgtgtaagggcttgtctccctcccagtttttcttttgctccacgtcattttgtcaggctggttataagccggaggcagctttaaccagcccccagggatgattgtgaaggaggcccctccccttgtgaggagggggcactcctctccagcccctggtaccacagtcctcacgatggtgcagtgatttctagccaggcgtcaagatgcgctgctttccctctcctgcctcatcccttgttggcagctccagttcaggccgtggagggacgtgatgctgggctgtgtttactaaacccacgggttttcagcctcttaagcccagctccgatctccaattagttgagagcgctgggttgactaacctctggtatctgagcacagacagagggtgctgtgggtctgctgggtggcagaaatggttccttccggcttggcgttctctcctggccactcttcctgctgcctctgactactcagccttgttttcggtgtgtaggccccagctgcccactggaactgccggctaatgcttgctctcccaagatctttaactcctcctggctgcacctgggtagggatggtggcatcgatgcccctctgtctgctgaaggacctgttgctgcttctgtcttttcacccctccttggctgatgacccagagccctctgatgatggcattctcctggcaagagaaaaagacttaactagacttctgaacttgaacagtttcaggttatattttaatttttttttttttgtacaggttctgattctaatacatttcaacatgcttttgtcccccctcgtgtcaatatttgttatagactaatcgccggggatttttcacctggttggagggtgggggtggggtggggtgtgtgtgtgtgtgtgtgtgtgtgtgtgtgtgtgtgtgtgtgtttgtaggtcctggactgattaaagttcattgaggaaaaagcacattttacaacaaaaaaataaaagtgtagatttaatgtatgtgactggggtttggggttgcatacctggtggatcttgaggggctgggattagggtggttcaggaaaatgtgatgctgtttccccatgtttagccatggtcaaaaaatggatttctcctttttctaaaatgtccagcaactgcctactgttgatcaaatgttgaagtattcttgtttcccttttaagccaatccatgtgcccacataacattatgcccaagtggagagttcactttaatttccaaagtatgtttcatgcagccccctgtcagctgctctgtggaaaaggggttctgttatgaaataaatgttgcactccctgcatcccat

SEQ ID NO: 122208 - DNA, 189 bp, Homo sapiens
  Payload ID: 3950
  Gene Symbol: COPS7B
  Gene Name: COP9 signalosome subunit 7B
  ENST ID: ENST00000631349
  CDS Start-End: 1-189
atggcaggggaacagaaaccctcaagtaatctcctggagcagtttattttactagccaaaggtaccagtggctcagccctcactgctctcataagccaggtcttagaggctcccggagtgtatgtctttggagaacttctggagctggccaacgtgcaggaggatggtctcgatctcctgacctcatga

SEQ ID NO: 122209 - DNA, 4007 bp, Homo sapiens
  Payload ID: 3951
  Gene Symbol: COPS8
  Gene Name: COP9 signalosome subunit 8
  Uniprot ID: Q99627
  ENST ID: ENST00000354371
  CDS Start-End: 654-1283
attccctctggctgcggttccgagaatagcctggaaggaggcaggggtcccggctggagaagcgtggctccggggtggggcgtgcagggctagcccgggcgggggacgctgcccaacaagcaggtttgcggagactcacaccttagattctgagtttttaagcttgtttcctcagagcagggaactcacgaacgtttcgtgagcacctacggtatgcagggtacggtgcggagccctagcgtcactgacgaccgggacagccgagcagctgcaggatccgtcgtgttccccagcaattttaatatttaaaaattcgttactgttgctgttacttgttttctatgtattggatgtcttcgtgaagaaccctcaaaagtgcaacgaactcctccctgccagagggcggccgcgcgctctgagtacagcttcccgcggagccggccaggtcctccagggcaccgagaaagccggccagaacggcggcgccctatcccggccgcagcgatgtctgacggcgccccggaactgacggtctggtacgcaggggcgctcggcggcaacggcggctttaaacgtcatcgcgggcgcgacgcctgagggacagtctggggtttggctgtccggacggtgcagcggcgaggccggccgcgaagatgccagtggcggtgatggcggaaagcgcctttagtttcaaaaagttgctggatcagtgcgagaaccaggagctcgaggcccctggaggaattgctacacccccagtgtatggtcagcttctagctttatatttgctccataatgacatgaataatgcaagatatctttggaaaagaataccacctgctataaaatctgcaaattctgaacttgggggaatttggtcagtaggacaaagaatctggcagagagatttccctgggatctatacaaccatcaacgctcaccagtggtctgagacggtccagccaattatggaagcacttagagatgcaacaaggagacgcgcctttgccctggtctctcaagcgtatacttcaatcatcgccgatgattttgcagcctttgttggacttcctgtagaagaggctgtgaaaggcatattagaacaaggatggcaagctgattccaccacaagaatggttctgcccagaaagccagttgcaggggccctggatgtttcctttaacaagtttattcccttatcagagcctgctccagttcccccaatacccaatgaacagcagttagccagactgacggattatgtggctttccttgaaaactgatttatcactctgagttcaagattcatcttcagaatcctgtatactgacaaacgtagaaatgtaaagtttgtattttcaatttattggatggcttaagcacctcagcattccttactatgtgataaaatacatatagaatataagatatactatatacattttgtccataaacgttatgctgaatagttgttgaaacagttctcattttgtagtatttaataatctggatggagcctgtcagtattacagttagttttctagtgactcataaaataagatttcctgtttcatgtagaatagtgtttgtcaactgtcttttctctgtcccagcacatgccgtactcttatatgtaccattggttgataattataatgattcatttggacttgaagaaagattgtccccaggcacagtatctgaatcactggggattatgattcaccctctttggagaacatgctctcttttcaccccccacctcctgagagccactaatgtaagatacagaaacatagctgaggaacaaatagaccatttccatactaaaccagtttgttaactttagattttttccaatagtgtgagtatatccattgctggcagtggagggcttgccatgaaaatgcaacttatttaagacatttatgagacatattaacttgtgctgtcgccttttagaaggagaaacttaagtgtggaatgcattatatgggcaaagaagctatgaagatacatgatacactttgtacaactatcctgcagcccattggttgcttatatttatcgcttggctcaagttctgccctttggagaaatactgagcaagtctttcattctctgtgtgacagccctctgaatatttgaagttgtttgttgtaacttaaggttataacagcccttagttcatttactctgcatttgttcaataaatatttaactgaattcttcaattatttcatctaagatagtttctggaaatttcactctcgatctttctgtggacacaatctattttgtcattgtgtctatatgaatctcttaagtagaaatgagttgtatggtgaatctgtgtagtgataattatataatttatttattttgaatgcattttagtggctatttcagtttttcttaacatatatgggaatactttttgaattgcaattttatttaacccggataggtaagtcatattaaaattccttgttttacagttgaggaaatgggaattcaagaagtcagaggatcaggagagtgatcaagagaatgacagtgccagtttttttaacttccaggtattaagtacaaattgtatccatggttattttttaaaagcagattagagtcaatccaaatattcattaataggggattgtttgaataaacagcagtgtagactacgcaggtgtaaaaggagtgaagatctctatactaaactggaatgatctccagagtgagaacatagaaagcacatgtagtttatatggttattttgagggtaacaaaaggagaatgattacaattatatatatgtacatatttccttatatttcaaaactaagcaattgggggatatatacaaaatgaatataatagttccctaaagaggaaggagaggacagtgaactactacatagagaaaaaataatctcaagtgatcaaacacaatatttcaattttacattgtcagtgggatatacactaaggacagaaaaaaatcttagactaatgaatgtggtttttcatgattaatttcacaaaatcttgatatcttttttattattaaaagtatagattaaattaataatcatgtaacattagaccccagtaatcttaaatttgacatggaaacctcattatatgctttatttttctttgtaaacagtaaatatttcccactcctgtctacatgaaaaggtctagagtaattacagttcagtaacaatgagcaccactagtacccagatggtgttctttcattttcatttgcaattaaaaggaatcagaacttatttgcaaaacagctaatagttccagggcagtaagtgtacaagttcatatctggtacaagatgtccaggattcaaggaggctcttaaagacttgggattctgtcaaagggttatacaagccaacttgaagggatttctacaggccatgtaaaaatgagacagtttgagcatgaaatatttgtatatgtgtctgtttttaactcttaataacctcatcactgtacaagaaaggcagggtaagtgcttgatttcacttccctttattatcagttctcaggacaaattgatatgctgccaatctctaaagcaacaaaatcgaacctgtagggtagtcaaaaagctcatgctggaaaattccaccgaataaagataaaagttagaaaaacggtacttgcagcccttaatgaaacaaagaagggatcatggaaatatatatcaatgctgttgagaccacagggtaagaaattgagattgagcatgaaatatgtccagtacatccatcagcctgtctttgtgctctggctatttctgagccagccatctgtgtacaagtgtagcctgacagcaccctgtttcagatccattggatatctctaaaatttgctctgggacttaccctggcactactatcaggatgcccacacaaacctgattgggcagcccatcagcagttgtgaacatgacatggtgaataaacactctcttccttgtc

SEQ ID NO: 122210 - DNA, 1654 bp, Homo sapiens
  Payload ID: 3951
  Gene Symbol: COPS8
  Gene Name: COP9 signalosome subunit 8
  Uniprot ID: Q99627
  ENST ID: ENST00000392008
  CDS Start-End: 296-778
aaacgtcatcgcgggcgcgacgcctgagggacagtctggggtttggctgtccggacggtgcagcggcgaggccggccgcgaagatgccagtggcggtgatggcggaaagcgcctttagtttcaaaaagttgctggatcagtgcgagaaccaggagctcgaggacgcttgatgtaatgggcagaatcagaatgcttcaggaatctgtcgaatttgtttcttataatagcccctggaggaattgctacacccccagtgtatggtcagcttctagctttatatttgctccataatgacatgaataatgcaagatatctttggaaaagaataccacctgctataaaatctgcaaattctgaacttgggggaatttggtcagtaggacaaagaatctggcagagagatttccctgggatctatacaaccatcaacgctcaccagtggtctgagacggtccagccaattatggaagcacttagagatgcaacaaggagacgcgcctttgccctggtctctcaagcgtatacttcaatcatcgccgatgattttgcagcctttgttggacttcctgtagaagaggctgtgaaaggcatattagaacaaggatggcaagctgattccaccacaagaatggttctgcccagaaagccagttgcaggggccctggatgtttcctttaacaagtttattcccttatcagagcctgctccagttcccccaatacccaatgaacagcagttagccagactgacggattatgtggctttccttgaaaactgatttatcactctgagttcaagattcatcttcagaatcctgtatactgacaaacgtagaaatgtaaagtttgtattttcaatttattggatggcttaagcacctcagcattccttactatgtgataaaatacatatagaatataagatatactatatacattttgtccataaacgttatgctgaatagttgttgaaacagttctcattttgtagtatttaataatctggatggagcctgtcagtattacagttagttttctagtgactcataaaataagatttcctgtttcatgtagaatagtgtttgtcaactgtcttttctctgtcccagcacatgccgtactcttatatgtaccattggttgataattataatgattcatttggacttgaagaaagattgtccccaggcacagtatctgaatcactggggattatgattcaccctctttggagaacatgctctcttttcaccccccacctcctgagagccactaatgtaagatacagaaacatagctgaggaacaaatagaccatttccatactaaaccagtttgttaactttagattttttccaatagtgtgagtatatccattgctggcagtggagggcttgccatgaaaatgcaacttatttaagacatttatgagacatattaacttgtgctgtcgccttttagaaggagaaacttaagtgtggaatgcattatatgggcaaagaagctatgaagatacatgatacactttgtacaactatcctgcagcccattggttgcttatatttatcgcttggctcaagttctgccctttggagaaatactgagcaagtctttcattctctgtgtgacagccctctgaatatttgaagttgtttgtt

SEQ ID NO: 122211 - DNA, 794 bp, Homo sapiens
  Payload ID: 3951
  Gene Symbol: COPS8
  Gene Name: COP9 signalosome subunit 8
  ENST ID: ENST00000409334
  CDS Start-End: 82-603
acgtcatcgcgggcgcgacgcctgagggacagtctggggtttggctgtccggacggtgcagcggcgaggccggccgcgaagatgccagtggcggtgatggcggaaagcgcctttagtttcaaaaagttgctggatcagtgcgagaaccaggagctcgaggcccctggaggaattgctacacccccagtgtatggtcagcttctagctttatatttgctccataatgacatgaataatgcaagatatctttggaaaagaataccacctgctataaaatctgcaaattctgaacttgggggaatttggtcagtaggacaaagaatctggcagagagatttccctgggatctatacaaccatcaacgctcaccagtggtctgagacggtccagccaattatggaagcacttagaggcatattagaacaaggatggcaagctgattccaccacaagaatggttctgcccagaaagccagttgcaggggccctggatgtttcctttaacaagtttattcccttatcagagcctgctccagttcccccaatacccaatgaacagcagttagccagactgacggattatgtggctttccttgaaaactgatttatcactctgagttcaagattcatcttcagaatcctgtatactgacaaacgtagaaatgtaaagtttgtattttcaatttattggatggcttaagcacctcagcattccttactatgtgataaaatacatatagaatataagatatactatatacattttgtccataaacgttatgctgaatagttgtt

SEQ ID NO: 122212 - DNA, 584 bp, Homo sapiens
  Payload ID: 3951
  Gene Symbol: COPS8
  Gene Name: COP9 signalosome subunit 8
  ENST ID: ENST00000419015
  CDS Start-End: 57-251
gggacagtctggggtttggctgtccggacggtgcagcggcgaggccggccgcgaagatgccagtggcggtgatggcggaaagcgcctttagtttcaaaaagttgctggatcagtgcgagaaccaggagctcgaggcccctggaggaattgctacacccccagtgtatggtcagcttctagctttatatttgctccataatgacataaacttttatgacctctatttacttaacttcatatataatcaataaaacaaaagaagtgaaaagagaagattgcagccaagaggaattcgttacaaacatgaataatgcaagatatctttggaaaagaataccacctgctataaaatctgcaaattctgaacttgggggaatttggtcagtaggacaaagaatctggcagagagatttccctgggatctatacaaccatcaacgctcaccagtggtctgagacggtccagccaattatggaagcacttagagatgcaacaaggagacgcgcctttgccctggtctctcaagcgtatacttcaatcatcgccgatgattttgcagcctttgttggacttcctgtagaaga

SEQ ID NO: 122213 - DNA, 496 bp, Homo sapiens
  Payload ID: 3951
  Gene Symbol: COPS8
  Gene Name: COP9 signalosome subunit 8
  ENST ID: ENST00000447464
  CDS Start-End: 1-250
aatcatcgccgatgattttgcagcctttgttggacttcctgtagaagaggctgtgaaaggcatattagaacaaggatggcaagctgattccaccacaagaatggttctgcccagaaagccagttgcaggggccctggatgtttcctttaacaagtttattcccttatcagagcctgctccagttcccccaatacccaatgaacagcagttagccagactgacggattatgtggctttccttgaaaactgatttatcactctgagttcaagattcatcttcagaatcctgtatactgacaaacgtagaaatttgaggaaatgggaattcaagaagtcagaggatcaggagagtgatcaagagaatgacagtgccagtttttttaacttccaggtattaagtacaaattgtatccatggttattttttaaaagcagattagagtcaatccaaatattcattaataggggattgtttgaataaacagcagtgtagacta

SEQ ID NO: 122214 - DNA, 588 bp, Homo sapiens
  Payload ID: 3952
  Gene Symbol: CPNE9
  Gene Name: copine family member IX
  ENST ID: ENST00000273027
  CDS Start-End: 1-588
ccagaaccagttcacagtatatgaggttcttaaccctcggaagaaatgtaagaagaagaaatatgtcaactcaggaactgacacagctgaacttcacagtagccattgacttcacggcttccaatgggaatcctctgcagcctacctccctgcactacatgagtccctaccagctcagcgcctatgccatggccctcaaggcagtgggagagatcatccaggactatgacagtgataagctcttcccagcttatggctttggggccaagctgcccccagagggacggatctcccaccagttccccctgaacaacaatgatgaggaccccaactgtgcgggcatcgagggtgtgctggagagctatttccagagcctgcgcacagtgcagctctatgggcccacctactttgctcctgtcatcaaccaagtggccagggctgcagccaagatctctgatggctcccagtactatgttctgctcatcatcactgatggggtcatctctgacatgacgcagaccaaggaggccatcgtcagcgcctcctcattgcccatgtctatcattatcgtcggtgtaggaccagcca

SEQ ID NO: 122215 - DNA, 1751 bp, Homo sapiens
  Payload ID: 3952
  Gene Symbol: CPNE9
  Gene Name: copine family member IX
  Uniprot ID: Q8IYJ1
  ENST ID: ENST00000383831
  CDS Start-End: 172-1683
ggcggccactgtcagggcgcgagcggctggagcgcacgcagggctggagcgagtgcagccgccgccgccgccgacaccgcggcacatgggccggccccgccgctgccgtcgcccctagccccagcagccctggtctcgcagcctcctgcggctctggtcgcccgaccagccatgtctctcggcggagcctccgagcgcagcgtcccggccaccaagattgaaattaccgtgtcctgccggaacctgctagaccttgataccttctccaagtccgaccccatggtggtgctttacacgcagagccgggccagccaggagtggcgggagttcggacggaccgaggtgattgataacacgctgaacccagacttcgtgcgcaaattcgtcctcgactatttctttgaggaaaagcaaaatctgcgcttcgatgtgtacaacgtggactccaaaaccaacatctccaaaccgaaggatttcctgggacaagcgttcctggccctgggagaggtgattggaggccagggcagccgagtagagcgaaccctcacgggtgtaccaggcaagaagtgtgggaccatattgctgactgcagaagagcttagcaattgtcgggacattgccaccatgcagctgtgtgcaaacaagctggacaagaaggacttctttgggaaatcagaccccttccttgtgttctacaggagcaatgaggatggcacgttcaccatctgccacaagacagaggttgtgaaaaacacgctgaatcctgtgtggcagcccttcagcatccctgtgcgggctctgtgcaatggagactatgacagaacggtgaagattgatgtgtacgactgggaccgggatggaagccacgatttcattggtgagttcaccaccagctaccgggagctgagcaaggcccagaaccagttcacagtatatgaggttcttaaccctcggaagaaatgtaagaagaagaaatatgtcaactcaggaactgtgacgctgctctccttctctgtggactctgaattcacttttgttgattacatcaagggagggacacagctgaacttcacagtagccattgacttcacggcttccaatgggaatcctctgcagcctacctccctgcactacatgagtccctaccagctcagcgcctatgccatggccctcaaggcagtgggagagatcatccaggactatgacagtgataagctcttcccagcttatggctttggggccaagctgcccccagagggacggatctcccaccagttccccctgaacaacaatgatgaggaccccaactgtgcgggcatcgagggtgtgctggagagctatttccagagcctgcgcacagtgcagctctatgggcccacctactttgctcctgtcatcaaccaagtggccagggctgcagccaagatctctgatggctcccagtactatgttctgctcatcatcactgatggggtcatctctgacatgacgcagaccaaggaggccatcgtcagcgcctcctcattgcccatgtctatcattatcgtcggtgtaggaccagccatgtttgaggcaatggaagagttggacggtgatgatgtgcgcgtgtcctctaggggacgctacgcagagcgggacatcgttcaggaaggttgctgcagccttggcacatccgtggtgtaggtcgggaggtccccaaggcccctgccctctagtggagacaaccaacaataaataatcacacaaagaaa

SEQ ID NO: 122216 - DNA, 2068 bp, Homo sapiens
  Payload ID: 3952
  Gene Symbol: CPNE9
  Gene Name: copine family member IX
  Uniprot ID: Q8IYJ1
  ENST ID: ENST00000383832
  CDS Start-End: 191-1852
atctggagccgctgccgccggcggccactgtcagggcgcgagcggctggagcgcacgcagggctggagcgagtgcagccgccgccgccgccgacaccgcggcacatgggccggccccgccgctgccgtcgcccctagccccagcagccctggtctcgcagcctcctgcggctctggtcgcccgaccagccatgtctctcggcggagcctccgagcgcagcgtcccggccaccaagattgaaattaccgtgtcctgccggaacctgctagaccttgataccttctccaagtccgaccccatggtggtgctttacacgcagagccgggccagccaggagtggcgggagttcggacggaccgaggtgattgataacacgctgaacccagacttcgtgcgcaaattcgtcctcgactatttctttgaggaaaagcaaaatctgcgcttcgatgtgtacaacgtggactccaaaaccaacatctccaaaccgaaggatttcctgggacaagcgttcctggccctgggagaggtgattggaggccagggcagccgagtagagcgaaccctcacgggtgtaccaggcaagaagtgtgggaccatattgctgactgcagaagagcttagcaattgtcgggacattgccaccatgcagctgtgtgcaaacaagctggacaagaaggacttctttgggaaatcagaccccttccttgtgttctacaggagcaatgaggatggcacgttcaccatctgccacaagacagaggttgtgaaaaacacgctgaatcctgtgtggcagcccttcagcatccctgtgcgggctctgtgcaatggagactatgacagaacggtgaagattgatgtgtacgactgggaccgggatggaagccacgatttcattggtgagttcaccaccagctaccgggagctgagcaaggcccagaaccagttcacagtatatgaggttcttaaccctcggaagaaatgtaagaagaagaaatatgtcaactcaggaactgtgacgctgctctccttctctgtggactctgaattcacttttgttgattacatcaagggagggacacagctgaacttcacagtagccattgacttcacggcttccaatgggaatcctctgcagcctacctccctgcactacatgagtccctaccagctcagcgcctatgccatggccctcaaggcagtgggagagatcatccaggactatgacagtgataagctcttcccagcttatggctttggggccaagctgcccccagagggacggatctcccaccagttccccctgaacaacaatgatgaggaccccaactgtgcgggcatcgagggtgtgctggagagctatttccagagcctgcgcacagtgcagctctatgggcccacctactttgctcctgtcatcaaccaagtggccagggctgcagccaagatctctgatggctcccagtactatgttctgctcatcatcactgatggggtcatctctgacatgacgcagaccaaggaggccatcgtcagcgcctcctcattgcccatgtctatcattatcgtcggtgtaggaccagccatgtttgaggcaatggaagagttggacggtgatgatgtgcgcgtgtcctctaggggacgctacgcagagcgggacatcgttcagttcgtcccattccgagactatgttgaccggtcggggaaccaggtgttgagcatggcccgactggccaaggatgtgctggccgagatcccggagcagctgctgtcctatatgcgcaccagagacatccagcctcggcccccaccccctgccaaccccagcccgatcccagctccagagcagccctgaggattccacatatccaatgcctcacagtctgcaagcctgctcacccactgcttctgctttaagccagaggcacctggaaccctggacttcactgggagggccaacttggaggatcagtgctggctgacaagccctccgcctccttgcctgcagagggcctggcactatcaccacctctctgccttcatgccaataataaagctgatctttattcca

SEQ ID NO: 122217 - DNA, 1742 bp, Homo sapiens
  Payload ID: 3952
  Gene Symbol: CPNE9
  Gene Name: copine family member IX
  ENST ID: ENST00000613455
  CDS Start-End: 172-1683
ggcggccactgtcagggcgcgagcggctggagcgcacgcagggctggagcgagtgcagccgccgccgccgccgacaccgcggcacatgggccggccccgccgctgccgtcgcccctagccccagcagccctggtctcgcagcctcctgcggctctggtcgcccgaccagccatgtctctcggcggagcctccgagcgcagcgtcccggccaccaagattgaaattaccgtgtcctgccggaacctgctagaccttgataccttctccaagtccgaccccatggtggtgctttacacgcagagccgggccagccaggagtggcgggagttcggacggaccgaggtgattgataacacgctgaacccagacttcgtgcgcaaattcgtcctcgactatttctttgaggaaaagcaaaatctgcgcttcgatgtgtacaacgtggactccaaaaccaacatctccaaaccggaggatttcctgggacaagcgttcctggccctgggagaggtgattggaggccagggcagccgagtagagcgaaccctcacgggtgtaccaggcaagaagtgtgggaccatattgctgactgcagaagagcttagcaattgtcgggacattgccaccatgcagctgtgtgcaaacaagctggacaagaaggacttctttgggaaatcagaccccttccttgtgttctacaggagcaatgaggatggcacgttcaccatctgccacaagacagaggttgtgaaaaacacgctgaatcctgtgtggcagcccttcagcatccctgtgcgggctctgtgcaatggagactatgacagaacggtgaagattgatgtgtacgactgggaccgggatggaagccacgatttcattggtgagttcaccaccagctaccgggagctgagcaaggcccagaaccagttcacagtatatgaggttcttaaccctcggaagaaatgtaagaagaagaaatatgtcaactcaggaactgtgacgctgctctccttctctgtggactctgaattcacttttgttgattacatcaagggagggacacagctgaacttcacagtagccattgacttcacggcttccaatgggaatcctctgcagcctacctccctgcactacatgagtccctaccagctcagcgcctatgccatggccctcaaggcagtgggagagatcatccaggactatgacagtgataagctcttcccagcttatggctttggggccaagctgcccccagagggacggatctcccaccagttccccctgaacaacaatgatgaggaccccaactgtgcgggcatcgagggtgtgctggagagctatttccagagcctgcgcacagtgcagctctatgggcccacctactttgctcctgtcatcaaccaagtggccagggctgcagccaagatctctgatggctcccagtactatgttctgctcatcatcactgatggggtcatctctgacatgacgcagaccaaggaggccatcgtcagcgcctcctcattgcccatgtctatcattatcgtcggtgtaggaccagccatgtttgaggcaatggaagagttggacggtgatgatgtgcgcgtgtcctctaggggacgctacgcagagcgggacatcgttcaggaaggttgctgcagccttggcacatccgtggtgtaggtcgggaggtccccaaggcccctgccctctagtggagacaaccaacaataaataatcac

SEQ ID NO: 122218 - DNA, 1961 bp, Homo sapiens
  Payload ID: 3953
  Gene Symbol: CPNE1
  Gene Name: copine I
  ENST ID: ENST00000317677
  CDS Start-End: 136-1764
caaatattccattcagcattacaaagatggatgttcttcagttcctagaaggaatcccagtggatgaaaatgctgtacatgttcttgttgataacaatgggcaaggtctaggacaggcattggttcagtttaaaaatgaagatgatgcacatggcccactgcgtgaccttggttcagctgtccatttcctgtgaccatctcattgacaaggacatcggctccaagtctgacccactctgcgtccttttacaggatgtgggagggggcagctgggctgagcttggccggactgaacgggtgcggaactgctcaagccctgagttctccaagactctacagcttgagtaccgctttgagacagtccagaagctacgctttggaatctatgacatagacaacaagacgccagagctgagggatgatgacttcctagggggtgctgagtgttccctaggacagattgtgtccagccaggtactgactctccccttgatgctgaagcctggaaaacctgctgggcgggggaccatcacggtctcagctcaggaattaaaggacaatcgtgtagtaaccatggaggtagaggccagaaacctagataagaaggacttcctgggaaaatcagatccatttctggagttcttccgccagggtgatgggaaatggcacctggtgtacagatctgaggtcatcaagaacaacctgaaccctacatggaagcgtttctcagtccccgttcagcatttctgtggtgggaaccccagcacacccatccaggtgcaatgctccgattatgacagtgacgggtcacatgatctcatcggtaccttccacaccagcttggcccagctgcaggcagtcccggctgagtttgaatgcatccaccctgagaagcagcagaaaaagaaaagctacaagaactctggaactatccgtgtcaagatttgtcgggtagaaacagagtactcctttctggactatgtgatgggaggctgtcagatcaacttcactgtgggcgtggacttcactggctccaatggagacccctcctcacctgactccctacactacctgagtccaacaggggtcaatgagtacctgatggcactgtggagtgtgggcagcgtggttcaggactatgactcagacaagctgttccctgcatttggatttggggcccaggttccccctgactggcaggtctcgcatgaatttgccttgaatttcaaccccagtaacccctactgtgcaggcatccagggcattgtggatgcctaccgccaagccctgccccaagttcgcctctatggccctaccaactttgcacccatcatcaaccatgtggccaggtttgcagcccaggctgcacatcaggggactgcctcgcaatacttcatgctgttgctgctgactgatggtgctgtgacggatgtggaagccacacgtgaggctgtggtgcgtgcctcgaacctgcccatgtcagtgatcattgtgggtgtgggtggtgctgactttgaggccatggagcagctggacgctgatggtggacccctgcatacacgttctgggcaggctgctgcccgcgacattgtgcagtttgtaccctaccgccggttccagaatgcccctcgggaggcattggcacagaccgtgctcgcagaagtgcccacacaactggtctcatacttcagggcccagggttgggccccgctcaagccacttccaccctcagccaaggatcctgcacaggccccccaggcctaggttcccttggaggctgtggcaagtcctcaatcctgtgtcccagaggtccctctgggccacaacccaacccttctcactctcctcagtgctagcactttgtattttttgatacttttatacttgtttctgcttttgctgctcttgatcccacctttgctcctgacaaccctcattcaataaagaccagtgaagaccaa

SEQ ID NO: 122219 - DNA, 2147 bp, Homo sapiens
  Payload ID: 3953
  Gene Symbol: CPNE1
  Gene Name: copine I
  Uniprot ID: Q99829
  ENST ID: ENST00000352393
  CDS Start-End: 324-1937
cgaaggaggtggtggctgcgttgggctccgggaagccgttcgggctggggctgtcggccgcggggcggaggcactcgcgcggggggtaattcggggtctgggttctggtgccgcgcagctttccccggattgacttggcctctacttcttgttaaggaaattcatctcttgttttatcaggtgtgtgtggtttcagcgcagcatggctgtggtcatccgtttgcaaggtctcccaattgtggcggggaccatggacattcgccacttcttctctggattgaccattcctgatgggggcgtgcatattgtagggggtgaactggatggcccactgcgtgaccttggttcagctgtccatttcctgtgaccatctcattgacaaggacatcggctccaagtctgacccactctgcgtccttttacaggatgtgggagggggcagctgggctgagcttggccggactgaacgggtgcggaactgctcaagccctgagttctccaagactctacagcttgagtaccgctttgagacagtccagaagctacgctttggaatctatgacatagacaacaagacgccagagctgagggatgatgacttcctagggggtgctgagtgttccctaggacagattgtgtccagccaggtactgactctccccttgatgctgaagcctggaaaacctgctgggcgggggaccatcacggtctcagctcaggaattaaaggacaatcgtgtagtaaccatggaggtagaggccagaaacctagataagaaggacttcctgggaaaatcagatccatttctggagttcttccgccagggtgatgggaaatggcacctggtgtacagatctgaggtcatcaagaacaacctgaaccctacatggaagcgtttctcagtccccgttcagcatttctgtggtgggaaccccagcacacccatccaggtgcaatgctccgattatgacagtgacgggtcacatgatctcatcggtaccttccacaccagcttggcccagctgcaggcagtcccggctgagtttgaatgcatccaccctgagaagcagcagaaaaagaaaagctacaagaactctggaactatccgtgtcaagatttgtcgggtagaaacagagtactcctttctggactatgtgatgggaggctgtcagatcaacttcactgtgggcgtggacttcactggctccaatggagacccctcctcacctgactccctacactacctgagtccaacaggggtcaatgagtacctgatggcactgtggagtgtgggcagcgtggttcaggactatgactcagacaagctgttccctgcatttggatttggggcccaggttccccctgactggcaggtctcgcatgaatttgccttgaatttcaaccccagtaacccctactgtgcaggcatccagggcattgtggatgcctaccgccaagccctgccccaagttcgcctctatggccctaccaactttgcacccatcatcaaccatgtggccaggtttgcagcccaggctgcacatcaggggactgcctcgcaatacttcatgctgttgctgctgactgatggtgctgtgacggatgtggaagccacacgtgaggctgtggtgcgtgcctcgaacctgcccatgtcagtgatcattgtgggtgtgggtggtgctgactttgaggccatggagcagctggacgctgatggtggacccctgcatacacgttctgggcaggctgctgcccgcgacattgtgcagtttgtaccctaccgccggttccagaatgcccctcgggaggcattggcacagaccgtgctcgcagaagtgcccacacaactggtctcatacttcagggcccagggttgggccccgctcaagccacttccaccctcagccaaggatcctgcacaggccccccaggcctaggttcccttggaggctgtggcaagtcctcaatcctgtgtcccagaggtccctctgggccacaacccaacccttctcactctcctcagtgctagcactttgtattttttgatacttttatacttgtttctgcttttgctgctcttgatcccacctttgctcctgacaaccctcattcaataaagaccagtgaagaccaatgctttgccacca

SEQ ID NO: 122220 - DNA, 1695 bp, Homo sapiens
  Payload ID: 3953
  Gene Symbol: CPNE1
  Gene Name: copine I
  ENST ID: ENST00000397442
  CDS Start-End: 75-1520
gtggctgcgttgggctccgggaagccgttcgggctggggctgtcggccgcggggcggaggcactcgcgcgggggatggcccactgcgtgaccttggttcagctgtccatttcctgtgaccatctcattgacaaggacatcggctccaagtctgacccactctgcgtccttttacaggatgtgggagggggcagctgggctgagcttggccggactgaacgggtgcggaactgctcaagccctgagttctccaagactctacagcttgagtaccgctttgagacagtccagaagctacgctttggaatctatgacatagacaacaagacgccagagctgagggatgatgacttcctagggggtgctgagtgttccctaggacagattgtgtccagccaggtactgactctccccttgatgctgaagcctggaaaacctgctgggcgggggaccatcacggtctcagctcaggaattaaaggacaatcgtgtagtaaccatggaggtagaggccagaaacctagataagaaggacttcctgggaaaatcagatccatttctggagttcttccgccagggtgatgggaaatggcacctggtgtacagatctgaggtcatcaagaacaacctgaaccctacatggaagcgtttctcagtccccgttcagcatttctgtggtgggaaccccagcacacccatccaggtgcaatgctccgattatgacagtgacgggtcacatgatctcatcggtaccttccacaccagcttggcccagctgcaggcagtcccggctgagtttgaatgcatccaccctgagaagcagcagaaaaagaaaagctacaagaactctggaactatccgtgtcaagatttgtcgggtagaaacagagtactcctttctggactatgtgatgggaggctgtcagatcaacttcactgtgggcgtggacttcactggctccaatggagacccctcctcacctgactccctacactacctgagtccaacaggggtcaatgagtacctgatggcactgtggagtgtgggcagcgtggttcaggactatgactcagacaagctgttccctgcatttggatttggggcccaggttccccctgactggcaggtctcgcatgaatttgccttgaatttcaaccccagtaacccctactgtgcaggcatccagggcattgtggatgcctaccgccaagccctgccccaagttcgcctctatggccctaccaactttgcacccatcatcaaccatgtggccaggtttgcagcccaggctgcacatcaggggactgcctcgcaatacttcatgctgttgctgctgactgatggtgctgtgacggatgtggaagccacacgtgaggctgtggcccctcgggaggcattggcacagaccgtgctcgcagaagtgcccacacaactggtctcatacttcagggcccagggttgggccccgctcaagccacttccaccctcagccaaggatcctgcacaggccccccaggcctaggttcccttggaggctgtggcaagtcctcaatcctgtgtcccagaggtccctctgggccacaacccaacccttctcactctcctcagtgctagcactttgtattttttgatacttttatacttgtttctgcttttgctgctcttgatcccacctttgctcctgacaaccctcattc

SEQ ID NO: 122221 - DNA, 1928 bp, Homo sapiens
  Payload ID: 3953
  Gene Symbol: CPNE1
  Gene Name: copine I
  Uniprot ID: Q99829
  ENST ID: ENST00000397443
  CDS Start-End: 118-1731
ggtggctgcgttgggctccgggaagccgttcgggctggggctgtcggccgcggggcggaggcactcgcgcggggggtaattcggggtctgggttctggtgccgcgcagctttccccgatggcccactgcgtgaccttggttcagctgtccatttcctgtgaccatctcattgacaaggacatcggctccaagtctgacccactctgcgtccttttacaggatgtgggagggggcagctgggctgagcttggccggactgaacgggtgcggaactgctcaagccctgagttctccaagactctacagcttgagtaccgctttgagacagtccagaagctacgctttggaatctatgacatagacaacaagacgccagagctgagggatgatgacttcctagggggtgctgagtgttccctaggacagattgtgtccagccaggtactgactctccccttgatgctgaagcctggaaaacctgctgggcgggggaccatcacggtctcagctcaggaattaaaggacaatcgtgtagtaaccatggaggtagaggccagaaacctagataagaaggacttcctgggaaaatcagatccatttctggagttcttccgccagggtgatgggaaatggcacctggtgtacagatctgaggtcatcaagaacaacctgaaccctacatggaagcgtttctcagtccccgttcagcatttctgtggtgggaaccccagcacacccatccaggtgcaatgctccgattatgacagtgacgggtcacatgatctcatcggtaccttccacaccagcttggcccagctgcaggcagtcccggctgagtttgaatgcatccaccctgagaagcagcagaaaaagaaaagctacaagaactctggaactatccgtgtcaagatttgtcgggtagaaacagagtactcctttctggactatgtgatgggaggctgtcagatcaacttcactgtgggcgtggacttcactggctccaatggagacccctcctcacctgactccctacactacctgagtccaacaggggtcaatgagtacctgatggcactgtggagtgtgggcagcgtggttcaggactatgactcagacaagctgttccctgcatttggatttggggcccaggttccccctgactggcaggtctcgcatgaatttgccttgaatttcaaccccagtaacccctactgtgcaggcatccagggcattgtggatgcctaccgccaagccctgccccaagttcgcctctatggccctaccaactttgcacccatcatcaaccatgtggccaggtttgcagcccaggctgcacatcaggggactgcctcgcaatacttcatgctgttgctgctgactgatggtgctgtgacggatgtggaagccacacgtgaggctgtggtgcgtgcctcgaacctgcccatgtcagtgatcattgtgggtgtgggtggtgctgactttgaggccatggagcagctggacgctgatggtggacccctgcatacacgttctgggcaggctgctgcccgcgacattgtgcagtttgtaccctaccgccggttccagaatgcccctcgggaggcattggcacagaccgtgctcgcagaagtgcccacacaactggtctcatacttcagggcccagggttgggccccgctcaagccacttccaccctcagccaaggatcctgcacaggccccccaggcctaggttcccttggaggctgtggcaagtcctcaatcctgtgtcccagaggtccctctgggccacaacccaacccttctcactctcctcagtgctagcactttgtattttttgatacttttatacttgtttctgcttttgctgctcttgatcccacctttgctcctgacaaccctcattcaataaagaccagtgaagaccaa

SEQ ID NO: 122222 - DNA, 1795 bp, Homo sapiens
  Payload ID: 3953
  Gene Symbol: CPNE1
  Gene Name: copine I
  ENST ID: ENST00000401607
  CDS Start-End: 77-1360
tggtggctgcgttgggctccgggaagccgttcgggctggggctgtcggccgcggggcggaggcactcgcgcgggggatggcccactgcgtgaccttggttcagctgtccatttcctgtgaccatctcattgacaaggacatcggctccaagtctgacccactctgcgtccttttacaggatgtgggagggggcagctgggctgagcttggccggactgaacgggtgcggaactgctcaagccctgagttctccaagactctacagcttgagtaccgctttgagacagtccagaagctacgctttggaatctatgacatagacaacaagacgccagagctgagggatgatgacttcctagggggtgctgagtgttccctaggacagattgtgtccagccaggtactgactctccccttgatgctgaagcctggaaaacctgctgggcgggggaccatcacggtctcagctcaggaattaaaggacaatcgtgtagtaaccatggaggtagaggccagaaacctagataagaaggacttcctgggaaaatcagatccatttctggagttcttccgccagggtgatgggaaatggcacctggtgtacagatctgaggtcatcaagaacaacctgaaccctacatggaagcgtttctcagtccccgttcagcatttctgtggtgggaaccccagcacacccatccaggtgcaatgctccgattatgacagtgacgggtcacatgatctcatcggtaccttccacaccagcttggcccagctgcaggcagtcccggctgagtttgaatgcatccaccctgagaagcagcagaaaaagaaaagctacaagaactctggaactatccgtgtcaagatttgtcgggtagaaacagagtactcctttctggactatgtgatgggaggctgtcagatcaacttcactgtgggcgtggacttcactggctccaatggagacccctcctcacctgactccctacactacctgagtccaacaggggtcaatgagtacctgatggcactgtggagtgtgggcagcgtggttcaggactatgactcagacaagctgttccctgcatttggatttggggcccaggttccccctgactggcaggtctcgcatgaatttgccttgaatttcaaccccagtaacccctactgtgcaggcatccagggcattgtggatgcctaccgccaagccctgccccaagttcgcctctatggccctaccaactttgcacccatcatcaaccatgtggccaggtttgcagcccaggctgcacatcaggggactgcctcggacatgaatgggcttgtccccagcaatacttcatgctgttgctgctgactgatggtgctgtgacggatgtggaagccacacgtgaggctgtggtgcgtgcctcgaacctgcccatgtcagtgatcattgtgggtgtgggtggtgctgactttgaggccatggagcagctggacgctgatggtggacccctgcatacacgttctgggcaggctgctgcccgcgacattgtgcagtttgtaccctaccgccggttccagaatgcccctcgggaggcattggcacagaccgtgctcgcagaagtgcccacacaactggtctcatacttcagggcccagggttgggccccgctcaagccacttccaccctcagccaaggatcctgcacaggccccccaggcctaggttcccttggaggctgtggcaagtcctcaatcctgtgtcccagaggtccctctgggccacaacccaacccttctcactctcc

SEQ ID NO: 122223 - DNA, 748 bp, Homo sapiens
  Payload ID: 3953
  Gene Symbol: CPNE1
  Gene Name: copine I
  ENST ID: ENST00000439806
  CDS Start-End: 55-748
ggaacgcggagccgctgagcgggccgacggccattttgtgaagcggcgaaggagatggcccactgcgtgaccttggttcagctgtccatttcctgtgaccatctcattgacaaggacatcggctccaagtctgacccactctgcgtccttttacaggatgtgggagggggcagctgggctgagcttggccggactgaacgggtgcggaactgctcaagccctgagttctccaagactctacagcttgagtaccgctttgagacagtccagaagctacgctttggaatctatgacatagacaacaagacgccagagctgagggatgatgacttcctagggggtgctgagtgttccctaggacagattgtgtccagccaggtactgactctccccttgatgctgaagcctggaaaacctgctgggcgggggaccatcacggtctcagctcaggaattaaaggacaatcgtgtagtaaccatggaggtagaggccagaaacctagataagaaggacttcctgggaaaatcagatccatttctggagttcttccgccagggtgatgggaaatggcacctggtgtacagatctgaggtcatcaagaacaacctgaaccctacatggaagcgtttctcagtccccgttcagcatttctgtggtgggaaccccagcacacccatccaggtgcaatgctccgattatgacagtgacgggtcacatgatctcatcggtaccttccacaccagcttgg

SEQ ID NO: 122224 - DNA, 744 bp, Homo sapiens
  Payload ID: 3953
  Gene Symbol: CPNE1
  Gene Name: copine I
  ENST ID: ENST00000416778
  CDS Start-End: 105-744
ggctccgggaagccgttcgggctggggctgtcggccgcggggcggaggcactcgcgcggggggtaattcggggtctgggttctggtgccgcgcagctttccccgatggcccactgcgtgaccttggttcagctgtccatttcctgtgaccatctcattgacaaggacatcggctccaagtctgacccactctgcgtccttttacaggatgtgggagggggcagctgggctgagcttggccggactgaacgggtgcggaactgctcaagccctgagttctccaagactctacagcttgagtaccgctttgagacagtccagaagctacgctttggaatctatgacatagacaacaagacgccagagctgagggatgatgacttcctagggggtgctgagtgttccctaggacagattgtgtccagccaggtactgactctccccttgatgctgaagcctggaaaacctgctgggcgggggaccatcacggacttcctgggaaaatcagatccatttctggagttcttccgccagggtgatgggaaatggcacctggtgtacagatctgaggtcatcaagaacaacctgaaccctacatggaagcgtttctcagtccccgttcagcatttctgtggtgggaaccccagcacacccatccaggtgcaatgctccgattatgacagtgacgggtcacatgatctcatcggtaccttccacaccagcttggcccagctgcaggcagtcc

SEQ ID NO: 122225 - DNA, 596 bp, Homo sapiens
  Payload ID: 3953
  Gene Symbol: CPNE1
  Gene Name: copine I
  ENST ID: ENST00000458038
  CDS Start-End: 184-596
cggcgaaggaggtggtggctgcgttgggctccgggaagccgttcgggctggggctgtcggccgcggggcggaggcactcgcgcggggggtaattcggggtctgggttctggtgccgcgcagctttccccggattgacttggcctctacttcttgttaaggaaattcatctcttgttttatcagatggcccactgcgtgaccttggttcagctgtccatttcctgtgaccatctcattgacaaggacatcggctccaagtctgacccactctgcgtccttttacaggatgtgggagggggcagctgggctgagcttggccggactgaacgggtgcggaactgctcaagccctgagttctccaagactctacagcttgagtaccgctttgagacagtccagaagctacgctttggaatctatgacatagacaacaagacgccagagctgagggatgatgacttcctagggggtgctgagtgttccctaggacagattgtgtccagccaggtactgactctccccttgatgctgaagcctggaaaacctgctgggcgggggaccatcacggacttcctgggaaaatcagatccatttct

SEQ ID NO: 122226 - DNA, 1332 bp, Homo sapiens
  Payload ID: 3953
  Gene Symbol: CPNE1
  Gene Name: copine I
  ENST ID: ENST00000430570
  CDS Start-End: 174-1332
ggaacgcggagccgctgagcgggccgacggccattttgtgaagcggcgaaggaggtggtggctgcgttgggctccgggaagccgttcgggctggggctgtcggccgcggggcggaggcactcgcgcggggggtaattcggggtctgggttctggtgccgcgcagctttccccgatggcccactgcgtgaccttggttcagctgtccatttcctgtgaccatctcattgacaaggacatcggctccaagtctgacccactctgcgtccttttacaggatgtgggagggggcagctgggctgagcttggccggactgaacgggtgcggaactgctcaagccctgagttctccaagactctacagcttgagtaccgctttgagacagtccagaagctacgctttggaatctatgacatagacaacaagacgccagagctgagggatgatgacttcctagggggtgctgagtgttccctaggacagattgtgtccagccaggtactgactctccccttgatgctgaagcctggaaaacctgctgggcgggggaccatcacggacttcctgggaaaatcagatccatttctggagttcttccgccagggtgatgggaaatggcacctggtgtacagatctgaggtcatcaagaacaacctgaaccctacatggaagcgtttctcagtccccgttcagcatttctgtggtgggaaccccagcacacccatccaggtgcaatgctccgattatgacagtgacgggtcacatgatctcatcggtaccttccacaccagcttggcccagctgcaggcagtcccggctgagtttgaatgcatccaccctgagaagcagcagaaaaagaaaagctacaagaactctggaactatccgtgtcaagatttgtcgggtagaaacagagtactcctttctggactatgtgatgggaggctgtcagatcaacttcactgtgggcgtggacttcactggctccaatggagacccctcctcacctgactccctacactacctgagtccaacaggggtcaatgagtacctgatggcactgtggagtgtgggcagcgtggttcaggactatgactcagacaagctgttccctgcatttggatttggggcccaggttccccctgactggcaggtctcgcatgaatttgccttgaatttcaaccccagtaacccctactgtgcaggcatccagggcattgtggatgcctaccgccaagccctgccccaagttcgcctctatggccctaccaactttgcacccatcatcaaccatgtggccaggtttgcagcccaggctgcacatcaggggactg

SEQ ID NO: 122227 - DNA, 826 bp, Homo sapiens
  Payload ID: 3953
  Gene Symbol: CPNE1
  Gene Name: copine I
  ENST ID: ENST00000437100
  CDS Start-End: 371-826
cattttgtgaagcggcgaaggaggtggtggctgcgttgggctccgggaagccgttcgggctggggctgtcggccgcggggcggaggcactcgcgcggggggtaattcggggtctgggttctggtgccgcgcagctttccccgtctaaaagttggttttaattggttgcccacaggattgacttggcctctacttcttgttaaggaaattcatctcttgttttatcaggtgtgtgtggtttcagcgcagcatggctgtggtcatccgtttgcaaggtctcccaattgtggcggggaccatggacattcgccacttcttctctggattgaccattcctgatgggggcgtgcatattgtagggggtgaactggatggcccactgcgtgaccttggttcagctgtccatttcctgtgaccatctcattgacaaggacatcggctccaagtctgacccactctgcgtccttttacaggatgtgggagggggcagctgggctgagcttggccggactgaacgggtgcggaactgctcaagccctgagttctccaagactctacagcttgagtaccgctttgagacagtccagaagctacgctttggaatctatgacatagacaacaagacgccagagctgagggatgatgacttcctagggggtgctgagtgttccctaggacagattgtgtccagccaggtactgactctccccttgatgctgaagcctggaaaacctgctgggcgggggaccatcacggtctcagctcaggaattaaaggacaatcgtgtagtaaccatggaggtagaggccagaaacctagataagaag

SEQ ID NO: 122228 - DNA, 731 bp, Homo sapiens
  Payload ID: 3953
  Gene Symbol: CPNE1
  Gene Name: copine I
  ENST ID: ENST00000415920
  CDS Start-End: 1-626
gtaacccctactgtgcaggcatccagggcattgtggatgcctaccgccaagccctgccccaagttcgcctctatggccctaccaactttgcacccatcatcaaccatgtggccaggtttgcagcccaggctgcacatcaggggactgcctcgcaatacttcatgctgttgctgctgactgatggtgctgtgacggatgtggaagccacacgtgaggctgtggtgcgtgcctcgaacctgcccatgtcagtgatcattgtgggtgtgggtggtgctgactttgaggccatggagcagctggacgctgatggtggacccctgcatacacgttctgggcaggctgctgcccgcgacattgtgcagtttgtaccctaccgccggttccagaatgtgagcccctcgggaggcattggcacagaccgtgctcgcagaagtgcccacacaactggtctcatacttcagggcccagggttgggccccgctcaagccacttccaccctcagccaaggatcctgcacaggccccccaggcctaggttcccttggaggctgtggcaagtcctcaatcctgtgtcccagaggtccctctgggccacaacccaacccttctcactctcctcagtgctagcactttgtattttttgatacttttatacttgtttctgcttttgctgctcttgatcccacctttgctcctgacaaccctcattcaataaagaccagtgaagaccaa

SEQ ID NO: 122229 - DNA, 746 bp, Homo sapiens
  Payload ID: 3953
  Gene Symbol: CPNE1
  Gene Name: copine I
  ENST ID: ENST00000440240
  CDS Start-End: 225-746
ggaggtggtggctgcgttgggctccgggaagccgttcgggctggggctgtcggccgcggggcggaggcactcgcgcggggggtgtgtgtggtttcagcgcagcatggctgtggtcatccgtttgcaaggtctcccaattgtggcggggaccatggacattcgccacttcttctctggattgaccattcctgatgggggcgtgcatattgtagggggtgaactggatggcccactgcgtgaccttggttcagctgtccatttcctgtgaccatctcattgacaaggacatcggctccaagtctgacccactctgcgtccttttacaggatgtgggagggggcagctgggctgagcttggccggactgaacgggtgcggaactgctcaagccctgagttctccaagactctacagcttgagtaccgctttgagacagtccagaagctacgctttggaatctatgacatagacaacaagacgccagagctgagggatgatgacttcctagggggtgctgagtgttccctaggacagattgtgtccagccaggtactgactctccccttgatgctgaagcctggaaaacctgctgggcgggggaccatcacggtctcagctcaggaattaaaggacaatcgtgtagtaaccatggaggtagaggccagaaacctagataagaaggacttcctgggaaaatcagatccatttctggagttcttccgccagggtgatgggaaatggcacctg

SEQ ID NO: 122230 - DNA, 821 bp, Homo sapiens
  Payload ID: 3953
  Gene Symbol: CPNE1
  Gene Name: copine I
  ENST ID: ENST00000420363
  CDS Start-End: 195-821
attttgtgaagcggcgaaggaggtggtggctgcgttgggctccgggaagccgttcgggctggggctgtcggccgcggggcggaggcactcgcgcggggggtaattcggggtctgggttctggtgccgcgcagctttccccggattgacttggcctctacttcttgttaaggaaattcatctcttgttttatcagatggcccactgcgtgaccttggttcagctgtccatttcctgtgaccatctcattgacaaggacatcggctccaagtctgacccactctgcgtccttttacaggatgtgggagggggcagctgggctgagcttggccggactgaacgggtgcggaactgctcaagccctgagttctccaagactctacagcttgagtaccgctttgagacagtccagaagctacgctttggaatctatgacatagacaacaagacgccagagctgagggatgatgacttcctagggggtgctgagtgttccctaggacagattgtgtccagccaggtactgactctccccttgatgctgaagcctggaaaacctgctgggcgggggaccatcacggtctcagctcaggaattaaaggacaatcgtgtagtaaccatggaggtagaggccagaaacctagataagaaggacttcctgggaaaatcagatccatttctggagttcttccgccagggtgatgggaaatggcacctggtgtacagatctgaggtcatcaagaacaacctgaaccctacatggaagcgtttctcagtccccgttcagcatttctgtggtgggaaccccagcacacccatccag

SEQ ID NO: 122231 - DNA, 1070 bp, Homo sapiens
  Payload ID: 3953
  Gene Symbol: CPNE1
  Gene Name: copine I
  ENST ID: ENST00000414664
  CDS Start-End: 158-1070
gagcgggccgacggccattttgtgaagcggcgaaggaggtggtggctgcgttgggctccgggaagccgttcgggctggggctgtcggccgcggggcggaggcactcgcgcggggggtaattcggggtctgggttctggtgccgcgcagctttccccgatggcccactgcgtgaccttggttcagctgtccatttcctgtgaccatctcattgacaaggacatcggctccaagtctgacccactctgcgtccttttacaggatgtgggagggggcagctgggctgagcttggccggactgaacgggtgcggaactgctcaagccctgagttctccaagactctacagcttgagtaccgctttgagacagtccagaagctacgctttggaatctatgacatagacaacaagacgccagagctgagggatgatgacttcctagggggtgctgagtgttccctaggacagattgtgtccagccaggtactgactctccccttgatgctgaagcctggaaaacctgctgggcgggggaccatcacggtctcagctcaggaattaaaggacaatcgtgtagtaaccatggaggtagaggccagaaacctagataagaaggacttcctgggaaaatcagatccatttctggagttcttccgccagggtgatgggaaatggcacctggtgtacagatctgaggtcatcaagaacaacctgaaccctacatggaagcgtttctcagtccccgttcagcatttctgtggtgggaaccccagcacacccatccaggtgcaatgctccgattatgacagtgacgggtcacatgatctcatcggtaccttccacaccagcttggcccagctgcaggcagtcccggctgagtttgaatgcatccaccctgagaagcagcagaaaaagaaaagctacaagaactctggaactatccgtgtcaagatttgtcgggtagaaacagagtactcctttctggactatgtgatgggaggctgtcagatcaacttcactgtgggcgtggacttcactggctccaatggagacccctcctcacctgactccc

SEQ ID NO: 122232 - DNA, 784 bp, Homo sapiens
  Payload ID: 3953
  Gene Symbol: CPNE1
  Gene Name: copine I
  ENST ID: ENST00000439669
  CDS Start-End: 124-540
ggaggtggtggctgcgttgggctccgggaagccgttcgggctggggctgtcggccgcggggcggaggcactcgcgcggggggtaattcggggtctgggttctggtgccgcgcagctttccccgatggcccactgcgtgaccttggttcagctgtccatttcctgtgaccatctcattgacaaggacatcggctccaagtctgacccactctgcgtccttttacaggatgtgggagggggcagctgggctgagcttggccggactgaacgggtgcggaactgctcaagccctgagttctccaagactctacagcttgagtaccgctttgagacagtccagaagctacgctttggaatctatgacatagacaacaagacgccagagctgagggatgatgacttcctagggggtgctgagtgttccctaggacagattgtgtccagccaggtactgactctccccttgatgctgaagcctggaaaacctgctgggcgggggaccatcacgtctcccctacctaggtctcagctcaggaattaaaggacaatcgtgtagtaaccatggaggtagaggccagaaacctagataagaaggacttcctgggaaaatcagatccatttctggagttcttccgccagggtgatgggaaatggcacctggtgtacagatctgaggtcatcaagaacaacctgaaccctacatggaagcgtttctcagtccccgttcagcatttctgtggtgggaaccccagcacacccatccaggtgcaatgctccgattatga

SEQ ID NO: 122233 - DNA, 831 bp, Homo sapiens
  Payload ID: 3953
  Gene Symbol: CPNE1
  Gene Name: copine I
  ENST ID: ENST00000434795
  CDS Start-End: 227-831
attttgtgaagcggcgaaggaggtggtggctgcgttgggctccgggaagccgttcgggctggggctgtcggccgcggggcggaggcactcgcgcggggggtaattcggggtctgggttctggtgccgcgcagctttccccgtctaaaagttggttttaattggttgcccacaggattgacttggcctctacttcttgttaaggaaattcatctcttgttttatcagatggcccactgcgtgaccttggttcagctgtccatttcctgtgaccatctcattgacaaggacatcggctccaagtctgacccactctgcgtccttttacaggatgtgggagggggcagctgggctgagcttggccggactgaacgggtgcggaactgctcaagccctgagttctccaagactctacagcttgagtaccgctttgagacagtccagaagctacgctttggaatctatgacatagacaacaagacgccagagctgagggatgatgacttcctagggggtgctgagtgttccctaggacagattgtgtccagccaggtactgactctccccttgatgctgaagcctggaaaacctgctgggcgggggaccatcacggtctcagctcaggaattaaaggacaatcgtgtagtaaccatggaggtagaggccagaaacctagataagaaggacttcctgggaaaatcagatccatttctggagttcttccgccagggtgatgggaaatggcacctggtgtacagatctgaggtcatcaagaacaacctgaaccctacatggaagcgtttctcagtccccgttcagcatttctgtggtgg

SEQ ID NO: 122234 - DNA, 673 bp, Homo sapiens
  Payload ID: 3953
  Gene Symbol: CPNE1
  Gene Name: copine I
  ENST ID: ENST00000414711
  CDS Start-End: 265-673
gctgtcggccgcggggcggaggcactcgcgcgggggtctaaaagttggttttaattggttgcccacaggattgacttggcctctacttcttgttaaggaaattcatctcttgttttatcaggtgtgtgtggtttcagcgcagcatggctgtggtcatccgtttgcaaggtctcccaattgtggcggggaccatggacattcgccacttcttctctggattgaccattcctgatgggggcgtgcatattgtagggggtgaactggatggcccactgcgtgaccttggttcagctgtccatttcctgtgaccatctcattgacaaggacatcggctccaagtctgacccactctgcgtccttttacaggatgtgggagggggcagctgggctgagcttggccggactgaacgggtgcggaactgctcaagccctgagttctccaagactctacagcttgagtaccgctttgagacagtccagaagctacgctttggaatctatgacatagacaacaagacgccagagctgagggatgatgacttcctagggggtgctgagtgttccctaggacagattgtgtccagccaggtactgactctccccttgatgctgaagcctggaaaacctgctgggcgggggaccatcacggtctcagctcaggaattaaaggaca

SEQ ID NO: 122235 - DNA, 400 bp, Homo sapiens
  Payload ID: 3953
  Gene Symbol: CPNE1
  Gene Name: copine I
  ENST ID: ENST00000435747
  CDS Start-End: 201-400
tgagcctgcgtaccgaagtggggacgaggccatagcgaggactcccccgtggtctgagagggggcaggccagagctggctggctcagcggcctgcgagctaacggggactgcagtaaaaacacgcctacatcccgagtacggaggatttcttgtctcccccagtgaagcagaggttataactacatctctgtgcctggagatggcccactgcgtgaccttggttcagctgtccatttcctgtgaccatctcattgacaaggacatcggctccaagtctgacccactctgcgtccttttacaggatgtgggagggggcagctgggctgagcttggccggactgaacgggtgcggaactgctcaagccctgagttctccaagactctacagcttgagtaccg

SEQ ID NO: 122236 - DNA, 1755 bp, Homo sapiens
  Payload ID: 3953
  Gene Symbol: CPNE1
  Gene Name: copine I
  ENST ID: ENST00000437340
  CDS Start-End: 156-1755
aaccacgccgttcctcccccttctggaacgcggagccgctgagcgggccgacggccattttgtgaagcggcgaaggaggtggtggctgcgttgggctccgggaagccgttcgggctggggctgtcggccgcggggcggaggcactcgcgcgggggatggcccactgcgtgaccttggttcagctgtccatttcctgtgaccatctcattgacaaggacatcggctccaagtctgacccactctgcgtccttttacaggatgtgggagggggcagctgggctgagcttggccggactgaacgggtgcggaactgctcaagccctgagttctccaagactctacagcttgagtaccgctttgagacagtccagaagctacgctttggaatctatgacatagacaacaagacgccagagctgagggatgatgacttcctagggggtgctgagtgttccctaggacagattgtgtccagccaggtactgactctccccttgatgctgaagcctggaaaacctgctgggcgggggaccatcacggtctcagctcaggaattaaaggacaatcgtgtagtaaccatggaggtagaggccagaaacctagataagaaggacttcctgggaaaatcagatccatttctggagttcttccgccagggtgatgggaaatggcacctggtgtacagatctgaggtcatcaagaacaacctgaaccctacatggaagcgtttctcagtccccgttcagcatttctgtggtgggaaccccagcacacccatccaggtgcaatgctccgattatgacagtgacgggtcacatgatctcatcggtaccttccacaccagcttggcccagctgcaggcagtcccggctgagtttgaatgcatccaccctgagaagcagcagaaaaagaaaagctacaagaactctggaactatccgtgtcaagatttgtcgggtagaaacagagtactcctttctggactatgtgatgggaggctgtcagatcaacttcactgtgggcgtggacttcactggctccaatggagacccctcctcacctgactccctacactacctgagtccaacaggggtcaatgagtacctgatggcactgtggagtgtgggcagcgtggttcaggactatgactcagacaagctgttccctgcatttggatttggggcccaggttccccctgactggcaggtctcgcatgaatttgccttgaatttcaaccccagtaacccctactgtgcaggcatccagggcattgtggatgcctaccgccaagccctgccccaagttcgcctctatggccctaccaactttgcacccatcatcaaccatgtggccaggtttgcagcccaggctgcacatcaggggactgcctcgtacttcatgctgttgctgctgactgatggtgctgtgacggatgtggaagccacacgtgaggctgtggtgcgtgcctcgaacctgcccatgtcagtgatcattgtgggtgtgggtggtgctgactttgaggccatggagcagctggacgctgatggtggacccctgcatacacgttctgggcaggctgctgcccgcgacattgtgcagtttgtaccctaccgccggttccagaatgcccctcgggaggcattggcacagaccgtgctcgcagaagtgcccacacaactggtctcatacttcagggcccagggttgggccccgctcaagccacttccaccctcagccaaggatcctgcacaggccc

SEQ ID NO: 122237 - DNA, 998 bp, Homo sapiens
  Payload ID: 3953
  Gene Symbol: CPNE1
  Gene Name: copine I
  ENST ID: ENST00000412056
  CDS Start-End: 83-998
aggaggtggtggctgcgttgggctccgggaagccgttcgggctggggctgtcggccgcggggcggaggcactcgcgcgggggatggcccactgcgtgaccttggttcagctgtccatttcctgtgaccatctcattgacaaggacatcggctccaagtctgacccactctgcgtccttttacaggatgtgggagggggcagctgggctgagcttggccggactgaacgggtgcggaactgctcaagccctgagttctccaagactctacagcttgagtaccgctttgagacagtccagaagctacgctttggaatctatgacatagacaacaagacgccagagctgagggatgatgacttcctagggggtgctgagtgttccctaggacagattgtgtccagccaggtactgactctccccttgatgctgaagcctggaaaacctgctgggcgggggaccatcacggacttcctgggaaaatcagatccatttctggagttcttccgccagggtgatgggaaatggcacctggtgtacagatctgaggtcatcaagaacaacctgaaccctacatggaagcgtttctcagtccccgttcagcatttctgtggtgggaaccccagcacacccatccaggtgcaatgctccgattatgacagtgacgggtcacatgatctcatcggtaccttccacaccagcttggcccagctgcaggcagtcccggctgagtttgaatgcatccaccctgagaagcagcagaaaaagaaaagctacaagaactctggaactatccgtgtcaagatttgtcgggtagaaacagagtactcctttctggactatgtgatgggaggctgtcagatcaacttcactgtgggcgtggacttcactggctccaatggagacccctcctcacctgactccctacactacctgagtccaacaggggtcaatgagtacctgatggcactgtggagtgtgggcagcgtggttcaggact

SEQ ID NO: 122238 - DNA, 2645 bp, Homo sapiens
  Payload ID: 3954
  Gene Symbol: CPNE2
  Gene Name: copine II
  Uniprot ID: Q96FN4
  ENST ID: ENST00000290776
  CDS Start-End: 290-1936
ccctcctcggccggagggaggagcccgagccgccgccgccgccgccgcccgcccgcccggcccgggaggaggaccggaccccgagcggctgggagcgcacgcgagcgggccgtggccgcgcgggcagcgccctgagcctgtcccgcgcccgcgggcccggccgagcaggagcagctcccggggatgcccgggcggctcggagcgcgggcagcggcagccgtgcggtgagggcggtggcgcccgcgggacctgcgactgccaggaactcctgccaccgccaccggctcccatggcccacatacccagtgggggtgccccagcagcgggggcagcccccatgggcccccagtattgcgtgtgcaaggtggagctgtcagtgagtggccagaacctactggaccgggatgttacctccaagtccgaccccttctgtgtcctctttacagagaacaatggcagatggatcgagtacgacaggacagaaaccgcgatcaacaacctcaaccccgccttctccaagaagttcgtgcttgactaccacttcgaggaggtacagaagctcaagttcgcgctctttgaccaggacaagtccagtatgcggctggacgagcatgacttcctgggccagttctcctgcagcctgggcacgatcgtctccagcaagaagatcactaggcctctgctgctgctgaatgacaagcctgcggggaagggcttgattacgatcgctgcccaggagctgtccgacaaccgcgtcatcacactaagcctggcgggcaggaggctggacaagaaggacctctttgggaagtcagacccctttctggagttttataagccaggagacgatggcaagtggatgctggtccacaggactgaggtgatcaagtacacactggaccctgtgtggaagccattcacagtgcccttggtgtccctgtgtgatggggacatggagaagcccatccaggtcatgtgctacgactatgacaatgacgggggccatgacttcatcggcgagttccagacctcagtgtcacagatgtgtgaggctcgagacagcgtcccgctggagttcgagtgcatcaaccccaagaagcagaggaagaagaagaactataaaaactcgggcatcatcatcctgcgatcctgcaagataaaccgagactactccttccttgactacatcctgggaggctgccagctcatgttcaccgttggaatagactttacagcctccaacgggaatcccctcgacccttcctctttgcactatatcaaccctatgggcaccaacgaatatctgtcggccatctgggctgttgggcagatcattcaggactacgacagtgataagatgtttccagctctgggattcggggcccagttacccccagactggaaggtctcccatgagtttgccatcaacttcaaccccaccaaccccttctgctcaggtgtggatggtattgcccaggcgtactcagcttgcctgccccacatccgcttctacggtcctaccaatttctcccccatcgtcaaccacgtggcccggtttgcggcccaggccacacaacagcggacggccacgcagtacttcatcctcctcatcatcacggacggggtcatcagtgacatggaggagacacggcatgccgtggtgcaggcttccaagctgcccatgtccatcatcatcgtgggcgtgggcaatgcggacttcgctgccatggagttcctggatggggacagccgcatgctgcgctcccacacgggggaggaggcagcccgcgatattgtgcagttcgttccctttcgagagttccgcaacgcagcaaaagagaccttggccaaagctgtgctggcggagctgccccaacaagttgtgcagtatttcaagcataaaaacctgccccccaccaactcggagcccgcctgagctccagtgcccagcagcagcatgtcagctgagcctcctgccctcccccaggaacatgcacgctcactctgcttccttgtgggtggcctttttttaccgatccccttttttattttttacaaccggacctccacccccaacttcctccagcccagctgggcttcctttgttggagtcaactgttgatgcttccaggccaaactggcttcctctcctcctctccccacctttgccattcttaagtattgaatgtactttgtataattttagtggaattgttattgagaataaaatttttacaatcataactggctttttccaagtaactagctgcagactctgatgaaagaaacatgtccttggtgcatacgtgtcgtagcctgcacctaattaattcctgctgtttttttaatactgtgactgtgttctatttgttatatgctcagggtaacaaatgagtttcagacgtccctgcgtcagctccttcctcagcagggacctgacgggctcactgatctaagaaaggaaatggaaaatgaaaatccaccccacaagtctaataagttggtgtagtcacttctgcatggggacatgcattccagatgataacctgttaaatcactgccagttaacagtgataacctgttaaactggcacagaacctggcacattgtacaaactcaataaatattcatggatgaatagaatg

SEQ ID NO: 122239 - DNA, 2316 bp, Homo sapiens
  Payload ID: 3954
  Gene Symbol: CPNE2
  Gene Name: copine II
  Uniprot ID: Q96FN4
  ENST ID: ENST00000535318
  CDS Start-End: 362-2008
ggaccggaccccgagcggctgggagcgcacgcgagcgggccgtggccgcgcgggcagcgccctgagcctgtcccgcgcccgcgggcccggccgagcaggagcagctcccggggatgcccgggcggctcggagcgcgggcagcggcagccgtgcggtgagggcggtggcgcccgcgggacctgcgggaacttggcccagaccctccccccctgtggccctctgggtcaccatctgtgaaatgggctgatgttccggggcctgcctcctggagaatggacacagcatgaaggcgtggttttatggcattccgcctggcataggtccagactgccaggaactcctgccaccgccaccggctcccatggcccacatacccagtgggggtgccccagcagcgggggcagcccccatgggcccccagtattgcgtgtgcaaggtggagctgtcagtgagtggccagaacctactggaccgggatgttacctccaagtccgaccccttctgtgtcctctttacagagaacaatggcagatggatcgagtacgacaggacagaaaccgcgatcaacaacctcaaccccgccttctccaagaagttcgtgcttgactaccacttcgaggaggtacagaagctcaagttcgcgctctttgaccaggacaagtccagtatgcggctggacgagcatgacttcctgggccagttctcctgcagcctgggcacgatcgtctccagcaagaagatcactaggcctctgctgctgctgaatgacaagcctgcggggaagggcttgattacgatcgctgcccaggagctgtccgacaaccgcgtcatcacactaagcctggcgggcaggaggctggacaagaaggacctctttgggaagtcagacccctttctggagttttataagccaggagacgatggcaagtggatgctggtccacaggactgaggtgatcaagtacacactggaccctgtgtggaagccattcacagtgcccttggtgtccctgtgtgatggggacatggagaagcccatccaggtcatgtgctacgactatgacaatgacgggggccatgacttcatcggcgagttccagacctcagtgtcacagatgtgtgaggctcgagacagcgtcccgctggagttcgagtgcatcaaccccaagaagcagaggaagaagaagaactataaaaactcgggcatcatcatcctgcgatcctgcaagataaaccgagactactccttccttgactacatcctgggaggctgccagctcatgttcaccgttggaatagactttacagcctccaacgggaatcccctcgacccttcctctttgcactatatcaaccctatgggcaccaacgaatatctgtcggccatctgggctgttgggcagatcattcaggactacgacagtgataagatgtttccagctctgggattcggggcccagttacccccagactggaaggtctcccatgagtttgccatcaacttcaaccccaccaaccccttctgctcaggtgtggatggtattgcccaggcgtactcagcttgcctgccccacatccgcttctacggtcctaccaatttctcccccatcgtcaaccacgtggcccggtttgcggcccaggccacacaacagcggacggccacgcagtacttcatcctcctcatcatcacggacggggtcatcagtgacatggaggagacacggcatgccgtggtgcaggcttccaagctgcccatgtccatcatcatcgtgggcgtgggcaatgcggacttcgctgccatggagttcctggatggggacagccgcatgctgcgctcccacacgggggaggaggcagcccgcgatattgtgcagttcgttccctttcgagagttccgcaacgcagcaaaagagaccttggccaaagctgtgctggcggagctgccccaacaagttgtgcagtatttcaagcataaaaacctgccccccaccaactcggagcccgcctgagctccagtgcccagcagcagcatgtcagctgagcctcctgccctcccccaggaacatgcacgctcactctgcttccttgtgggtggcctttttttaccgatccccttttttattttttacaaccggacctccacccccaacttcctccagcccagctgggcttcctttgttggagtcaactgttgatgcttccaggccaaactggcttcctctcctcctctccccacctttgccattcttaagtattgaatgtactttgtataattttagtggaattgttattgagaataaaatttttacaatcataa

SEQ ID NO: 122240 - DNA, 936 bp, Homo sapiens
  Payload ID: 3954
  Gene Symbol: CPNE2
  Gene Name: copine II
  ENST ID: ENST00000567487
  CDS Start-End: 573-936
tttgaaaaagggttttcccaaaataaaaagtgaaaaccgcaagtagtcaaatcctttccctttacagaggtggaaacggaggcccagatggggaaagggccttgtcctccatctcttacccaggcaggggcagggcctgagctcttaccctggcacctgggtagggagccagggccaaagaattaagagtgtgggtagcagagtcagacctcggtttcaaatctcggccctgctccacaagctgtccagccctggggaagtcacttaacctctctgtgcttcagtgtccttgtctgtgagctggggatagtgagtcactgacgatgaccacaagagcctggcacagagtaggcattgtacaagttagcagaatgatttccagcagcctgcgaggtcttggaccagctgccttgactctgacttccattttcctgcccctctgctagtacgacaggacagaaaccgcgatcaacaacctcaaccccgccttctccaagaagttcgtgcttgactaccacttcgaggaggtacagaagctcaagttcgcgctctttgaccaggacaagtccagtatgcggctggacgagcatgacttcctgggccagttctcctgcagcctgggcacgatcgtctccagcaagaagatcactaggcctctgctgctgctgaatgacaagcctgcggggaagggcttgattacgatcgctgcccaggagctgtccgacaaccgcgtcatcacactaagcctggcgggcaggaggctggacaagaaggacctctttgggaagtcagacccctttctggagttttataagccaggagacgatggcaagtggatgctggtccacaggactgaggtgatcaagtacacactggaccctgtgtggaagccattcacagtgcccttggtgtccctgtgtgatggggacatggaga

SEQ ID NO: 122241 - DNA, 404 bp, Homo sapiens
  Payload ID: 3954
  Gene Symbol: CPNE2
  Gene Name: copine II
  ENST ID: ENST00000566259
  CDS Start-End: 160-404
cagggtccagtacgcctggctgctgctgggctggcgcagagggacccactcttccccccgcctgccccaactccagacatcatgtgctccccgtttcggggatccagaagcttccagccagaggactgccaggaactcctgccaccgccaccggctcccatggcccacatacccagtgggggtgccccagcagcgggggcagcccccatgggcccccagtattgcgtgtgcaaggtggagctgtcagtgagtggccagaacctactggaccgggatgttacctccaagtccgaccccttctgtgtcctctttacagagaacaatggcagatggatcgagtacgacaggacagaaaccgcgatcaacaacctcaaccccgccttctccaagaagttcgtgcttga

SEQ ID NO: 122242 - DNA, 1976 bp, Homo sapiens
  Payload ID: 3954
  Gene Symbol: CPNE2
  Gene Name: copine II
  Uniprot ID: Q96FN4
  ENST ID: ENST00000565874
  CDS Start-End: 193-1839
tttcttcaaacctttgcctatgttatttgacaacccgcctcaatttgccttccatctctccactcacctcttaaaggccaggtggtaatgcctccctatggtggggcagcatagcaggtgtctgtccactctctgaccctcacttctgttcccctagactgccaggaactcctgccaccgccaccggctcccatggcccacatacccagtgggggtgccccagcagcgggggcagcccccatgggcccccagtattgcgtgtgcaaggtggagctgtcagtgagtggccagaacctactggaccgggatgttacctccaagtccgaccccttctgtgtcctctttacagagaacaatggcagatggatcgagtacgacaggacagaaaccgcgatcaacaacctcaaccccgccttctccaagaagttcgtgcttgactaccacttcgaggaggtacagaagctcaagttcgcgctctttgaccaggacaagtccagtatgcggctggacgagcatgacttcctgggccagttctcctgcagcctgggcacgatcgtctccagcaagaagatcactaggcctctgctgctgctgaatgacaagcctgcggggaagggcttgattacgatcgctgcccaggagctgtccgacaaccgcgtcatcacactaagcctggcgggcaggaggctggacaagaaggacctctttgggaagtcagacccctttctggagttttataagccaggagacgatggcaagtggatgctggtccacaggactgaggtgatcaagtacacactggaccctgtgtggaagccattcacagtgcccttggtgtccctgtgtgatggggacatggagaagcccatccaggtcatgtgctacgactatgacaatgacgggggccatgacttcatcggcgagttccagacctcagtgtcacagatgtgtgaggctcgagacagcgtcccgctggagttcgagtgcatcaaccccaagaagcagaggaagaagaagaactataaaaactcgggcatcatcatcctgcgatcctgcaagataaaccgagactactccttccttgactacatcctgggaggctgccagctcatgttcaccgttggaatagactttacagcctccaacgggaatcccctcgacccttcctctttgcactatatcaaccctatgggcaccaacgaatatctgtcggccatctgggctgttgggcagatcattcaggactacgacagtgataagatgtttccagctctgggattcggggcccagttacccccagactggaaggtctcccatgagtttgccatcaacttcaaccccaccaaccccttctgctcaggtgtggatggtattgcccaggcgtactcagcttgcctgccccacatccgcttctacggtcctaccaatttctcccccatcgtcaaccacgtggcccggtttgcggcccaggccacacaacagcggacggccacgcagtacttcatcctcctcatcatcacggacggggtcatcagtgacatggaggagacacggcatgccgtggtgcaggcttccaagctgcccatgtccatcatcatcgtgggcgtgggcaatgcggacttcgctgccatggagttcctggatggggacagccgcatgctgcgctcccacacgggggaggaggcagcccgcgatattgtgcagttcgttccctttcgagagttccgcaacgcagcaaaagagaccttggccaaagctgtgctggcggagctgccccaacaagttgtgcagtatttcaagcataaaaacctgccccccaccaactcggagcccgcctgagctccagtgcccagcagcagcatgtcagctgagcctcctgccctcccccaggaacatgcacgctcactctgcttccttgtgggtggcctttttttaccgatccccttttttattttttacaaccggacctccacccc

SEQ ID NO: 122243 - DNA, 844 bp, Homo sapiens
  Payload ID: 3954
  Gene Symbol: CPNE2
  Gene Name: copine II
  ENST ID: ENST00000565766
  CDS Start-End: 1-844
tctttgggaagtcagacccctttctggagttttataagccaggagacgatggcaagtggatgctggtccacaggactgaggtgatcaagtacacactggaccctgtgtggaagccattcacagtgcccttggtgtccctgtgtgatggggacatggagaagcccatccaggtcatgtgctacgactatgacaatgacgggggccatgacttcatcggcgagttccagacctcagtgtcacagatgtgtgaggctcgagacagcgtcccgctggagttcgagtgcatcaaccccaagaagcagaggaagaagaagaactataaaaactcgggcatcatcatcctgcgatcctgcaagataaaccgagactactccttccttgactacatcctgggaggctgccagctcatgttcaccccctgggccaggcttctccagagtacgtgctgcggtgagctcccagctgatcggggagacgggcactgctctaccaggcaaccccaggttggaatagactttacagcctccaacgggaatcccctcgacccttcctctttgcactatatcaaccctatgggcaccaacgaatatctgtcggccatctgggctgttgggcagatcattcaggactacgacagtgataagatgtttccagctctgggattcggggcccagttacccccagactggaaggtctcccatgagtttgccatcaacttcaaccccaccaaccccttctgctcaggtgtggatggtattgcccaggcgtactcagcttgcctgccccacatccgcttctacggtcctaccaatttctcccccatcgtcaaccacgtggcccggtt

SEQ ID NO: 122244 - DNA, 4760 bp, Homo sapiens
  Payload ID: 3955
  Gene Symbol: CPNE3
  Gene Name: copine III
  Uniprot ID: O75131
  ENST ID: ENST00000198765
  CDS Start-End: 59-1672
tatgacttttaaaattcatgaatttgaataattcatcagttttctcagaactcaagacatggctgcccagtgtgtcacaaaggtggcgctgaatgtttcctgtgccaatcttttggataaagatatagggtcaaagtcagaccctttatgtgtgttgtttttgaatacaagtggtcaacagtggtatgaggttgagcgcacagaaaggattaagaattgcttgaatccccaattttccaagacatttattattgattactactttgaagtggttcagaaattgaaatttggggtttatgacatcgacaacaaaactattgagctgagtgatgatgacttcttaggggaatgtgaatgtacccttggacaaattgtttccagcaagaagctaactcgaccactggtgatgaaaactggcagacctgcaggaaaagggagcattacgatttcagctgaagaaataaaagataatagagtggtcttgtttgaaatggaagccagaaaactggataataaggatctatttggaaagtcagacccatacctggaattccacaagcagacatctgatggaaactggctaatggttcatcggacagaggttgttaaaaacaacttgaatcctgtttggaggcctttcaagatctctcttaactcactgtgttacggagatatggacaaaaccattaaggtggagtgttatgattatgacaatgatgggtcacatgatctcattggaacatttcagaccaccatgacaaaactgaaagaagcctccagaagctcacctgttgaatttgaatgcataaatgagaaaaaaaggcaaaagaaaaaaagctacaagaattcaggtgttatcagtgtgaaacagtgtgagattacagtagaatgcacattccttgactatataatgggaggatgtcagctgaattttactgtgggagtggacttcactggctccaatggtgacccaaggtctccagactcccttcattacatcagccccaatggcgttaatgagtatttgactgctctctggtctgtgggactggtcattcaagattatgatgctgataagatgtttccagcttttggttttggcgctcagatacctcctcagtggcaggtatcacatgaatttccaatgaacttcaacccatccaatccctactgcaatggaatccaaggcattgtagaggcgtatcggtcttgtcttcctcagataaaactctatggaccaactaatttttctccaatcataaatcacgtggccaggtttgctgctgcagccacgcaacagcagacagcttctcaatattttgtgcttttgattattactgatggtgtgatcacagaccttgatgaaaccagacaagctatagttaatgcctccaggctgcctatgtccatcataattgttggagttggaggtgctgacttcagcgccatggagtttctggatggtgatggtggaagtctccgctccccattgggcgaagtggccatcagagatattgtccagtttgtgcctttcagacagttccagaatgctccaaaagaagcacttgctcagtgtgtcttggcagagattccccagcaggtggtgggctacttcaatacatacaaactccttcctcccaagaacccagccacgaaacaacagaagcagtgaccacttcaacagaattcttttgtgttatgtggagcaatgccatctctcaccccaaatcgtgtatctgtcattctacgtactttttacccccagcatttatgatgtaaatctctttctctatggattatatctgtttaaagcattctttctaggttattttggggggacagtgccaagtccatctttgcccagtcaattcagtgattgatagcaatttacattaattgcagtaaagctctttggattagaaattagtgtggggaaagcttattctgttgttgtttttgtttactttcatatgatgaaaatgctgtgtttaagtgtttgtcaataggaagaatggaaaactgttgggatgatgtggtttgcaggttgctgtgcctgattcacagtgtatgttgtataagccaatgtccatacctgattatgagagcttcttaaattatatgatatcaaatttgttcctgtaactctgtatacagtgcttttctgcaaggtaaaaataacctgtctatgcatctgatttttgctacagtttagacactgtggtttacaaaacagcatgcactcaacttgggactttatgaaaagtactgaatgagcaggaaaaggcacatactcagttttttaaatgtacaatcaacaagtaaaaataacctcatgtaagtaagccatttttatttgcctttctagatattttattttattgtggaaaactgtaaacatggtcagatttggctttttttttcattaactgagcaagactttcaggatattgtagatgcacagatggtaggttgtcctgaattctacattattagattactttaattgagatttgttaaaacggttaggactgttttgtccaggaaagataagaggaccaaacatataaggtgaaattcagaattccgtttccttctaactaatgaaaaactgcttactaaaaaaaaattttatactttccttgctaaggtcccatatattgatttgtacagatccacttagtcattttctcctttttttaagaaccattttcatctgatttttaaactcacgataccagttatctgttaatcaaaattgcattttacaatttaataatgtgatatttcctatgtctacagcataccttattaggtataaaacctactgcaacttagaaaaaggaaagaaaaaagaaaacttttccaactgctgcattaagatagggtggattttatgtgctttttttttttaagagttgaatttcttttcctgacttttaccttttacagcgtattacttagtgaacattacattttcagaatagatcctaatattttattgagggcctatgtgctaaaaactatgcatatctatatattggccaattatctttaataatttaccttttgaaattgcatgtttatcatatatccttaagtggacacatacagtgccatgttgatgtgcctctcagttttattgaaaagctgccccacagcccatgtctcttgttctctgcaatgcctcaagggagtgagctctcaaccacagatagctgtggcttctcagaagcagctcattgccaaggccaggctgagaggggacctgcttgctgtggtggttgcctagcccagatgagcatttacctaccaccttcccacttggctagctgtcctttggatatgtgctgttaactggggaaggcatctaactagtagcctgctactccatagtatggctcaatagatgacacatcattttgacattatcaataggagaaaagaaaactaacccttcttctgattgtttggagccatagttgtctcagatgttctaattctctttgtatgcttggaaacagcatagatatgttgctgtggttttcagaattttctcttttaatcacaagaagccttttaaaaaatgacttacacatattctcaatgtacagtaaaacagacagaagtgagcttatctgtttgatgctgtggcagggtcccagtcactgggcatatcctccttctccttaaccagctccacagcagcccctgagtcacctgcacaaggtgcttgggaactgctggttatgagcattcctggttttcttcagccaaataacaggtaatcactgtcaattggatttggtcttcattattttatattctgattttatcagaattattctattttaaaattgttttaaaatttaaaacatttaattcatgatcatgttcatcagtagatgctattattcataagaactgtgattccagcaaactagggtaattggtgcctttttacagttttgaataaaagcatttacaatttctaaattatcagttttcacagtttcagcactcaacctcatcatacgctgatttaatattgttttacattaaaatagtccttttccctgttgtgccaccattcatttaagtgctgtttgttcttaaaatgcatttaaagaaaaattacccatattgactttcacacctcatataatcagatctattacaaatatatatcggagtgacggtgcccaggatagatgtaatatttcttacagatgctggcacagaggaaataatataccagctaatctagtcacctaaccttgtggttagaattgcaattttaagaccagaaaaatttgaagtctgatcagagatttacaactgttcattatagtggtgccttaggcaatctttccaaagtaaattcagggccccattgctacttatgccatatttggacatactttttttttcttcaattttgtaaacttcctggaaagctgtcttcactaagtatcccctagtctctatatatgtggttagtagtcatggaaatgacacataaagtacgccagaagtttgatggaacgtgttagaaactgttttgtgcttttatggatgtcatacttgacaatacatgtgtaagttactaatatatgaattgatgctaaatatatcttacatttgaattccttttggataaagttatttcttgatgtgacagagtagtgtgttttcatttttattctttacatgtgaccaaaacaatagaaaagttaaaaataaaatatagtgttttaggtggc

SEQ ID NO: 122245 - DNA, 446 bp, Homo sapiens
  Payload ID: 3955
  Gene Symbol: CPNE3
  Gene Name: copine III
  ENST ID: ENST00000522240
  CDS Start-End: 210-446
gttcctgggccggtgaggcagcagcccagcaaccgtaccgcccgggggaaaaggaaagtcctggcctggaggatccgagcccgcaggctccgtgcggcaggtcccgccgggccctgctgctggaagtgctccgtgggcttcgcgcagctggggatcggcaggaaactcaggttgaataattcatcaaattacacaactgaactcaagacatggctgcccagtgtgtcacaaaggtggcgctgaatgtttcctgtgccaatcttttggataaagatatagggtcaaagtcagaccctttatgtgtgttgtttttgaatacaagtggtcaacagtggtatgaggttgagcgcacagaaaggattaagaattgcttgaatccccaattttccaagacatttattattgattactactttgaagtggttcagaaattgaaatttggggtt

SEQ ID NO: 122246 - DNA, 785 bp, Homo sapiens
  Payload ID: 3955
  Gene Symbol: CPNE3
  Gene Name: copine III
  ENST ID: ENST00000517391
  CDS Start-End: 1-785
acaaaactattgagctgagtgatgatgacttcttaggggaatgtgaatgtacccttggacaaattgtttccagcaagaagctaactcgaccactggtgatgaaaactggcagacctgcaggaaaagggagcattacgatttcagctgaagaaataaaagataatagagtggtcttgtttgaaatggaagccagaaaactggataataaggttgttaaaaacaacttgaatcctgtttggaggcctttcaagatctctcttaactcactgtgttacggagatatggacaaaaccattaaggtggagtgttatgattatgacaatgatgggtcacatgatctcattggaacatttcagaccaccatgacaaaactgaaagaagcctccagaagctcacctgttgaatttgaatgcataaatgagaaaaaaaggcaaaagaaaaaaagctacaagaattcaggtgttatcagtgtgaaacagtgtgagattacagtagaatgcacattccttgactatataatgggaggatgtcagctgaattttactgtgggagtggacttcactggctccaatggtgacccaaggtctccagactcccttcattacatcagccccaatggcgttaatgagtatttgactgctctctggtctgtgggactggtcattcaagattatgatgctgataagatgtttccagcttttggttttggcgctcagatacctcctcagtggcaggtatcacatgaatttccaatgaacttcaacccatccaatccctactgcaat

SEQ ID NO: 122247 - DNA, 656 bp, Homo sapiens
  Payload ID: 3955
  Gene Symbol: CPNE3
  Gene Name: copine III
  ENST ID: ENST00000523469
  CDS Start-End: 198-656
ctccaccgtcgctcgacttccacctctaagactcccacgaaactcaggttgaataattcatcaaattacacaactgctaattaactattaattagaggctttagtgctctgaagggattttggcataaaggggaaaatacctgggtttatgctgtggtggtgacacttactagctttgtgatcccataactcaagacatggctgcccagtgtgtcacaaaggtggcgctgaatgtttcctgtgccaatcttttggataaagatatagggtcaaagtcagaccctttatgtgtgttgtttttgaatacaagtggtcaacagtggtatgaggttgagcgcacagaaaggattaagaattgcttgaatccccaattttccaagacatttattattgattactactttgaagtggttcagaaattgaaatttggggtttatgacatcgacaacaaaactattgagctgagtgatgatgacttcttaggggaatgtgaatgtacccttggacaaattgtttccagcaagaagctaactcgaccactggtgatgaaaactggcagacctgcaggaaaagggagcattacgatttcagctgaagaaataaaagataatagagtggtcttgtttgaaatggaagccagaaaactggataataag

SEQ ID NO: 122248 - DNA, 4865 bp, Homo sapiens
  Payload ID: 3955
  Gene Symbol: CPNE3
  Gene Name: copine III
  Uniprot ID: O75131
  ENST ID: ENST00000517490
  CDS Start-End: 164-1777
cttgctctgccagtccagccctaggttctcctgaatccctgcggtcccagcgtcgctccggacgctgccaacctgttctccaccgtcgctcgacttccacctctaagactcccacgaaactcaggttgaataattcatcaaattacacaactgaactcaagacatggctgcccagtgtgtcacaaaggtggcgctgaatgtttcctgtgccaatcttttggataaagatatagggtcaaagtcagaccctttatgtgtgttgtttttgaatacaagtggtcaacagtggtatgaggttgagcgcacagaaaggattaagaattgcttgaatccccaattttccaagacatttattattgattactactttgaagtggttcagaaattgaaatttggggtttatgacatcgacaacaaaactattgagctgagtgatgatgacttcttaggggaatgtgaatgtacccttggacaaattgtttccagcaagaagctaactcgaccactggtgatgaaaactggcagacctgcaggaaaagggagcattacgatttcagctgaagaaataaaagataatagagtggtcttgtttgaaatggaagccagaaaactggataataaggatctatttggaaagtcagacccatacctggaattccacaagcagacatctgatggaaactggctaatggttcatcggacagaggttgttaaaaacaacttgaatcctgtttggaggcctttcaagatctctcttaactcactgtgttacggagatatggacaaaaccattaaggtggagtgttatgattatgacaatgatgggtcacatgatctcattggaacatttcagaccaccatgacaaaactgaaagaagcctccagaagctcacctgttgaatttgaatgcataaatgagaaaaaaaggcaaaagaaaaaaagctacaagaattcaggtgttatcagtgtgaaacagtgtgagattacagtagaatgcacattccttgactatataatgggaggatgtcagctgaattttactgtgggagtggacttcactggctccaatggtgacccaaggtctccagactcccttcattacatcagccccaatggcgttaatgagtatttgactgctctctggtctgtgggactggtcattcaagattatgatgctgataagatgtttccagcttttggttttggcgctcagatacctcctcagtggcaggtatcacatgaatttccaatgaacttcaacccatccaatccctactgcaatggaatccaaggcattgtagaggcgtatcggtcttgtcttcctcagataaaactctatggaccaactaatttttctccaatcataaatcacgtggccaggtttgctgctgcagccacgcaacagcagacagcttctcaatattttgtgcttttgattattactgatggtgtgatcacagaccttgatgaaaccagacaagctatagttaatgcctccaggctgcctatgtccatcataattgttggagttggaggtgctgacttcagcgccatggagtttctggatggtgatggtggaagtctccgctccccattgggcgaagtggccatcagagatattgtccagtttgtgcctttcagacagttccagaatgctccaaaagaagcacttgctcagtgtgtcttggcagagattccccagcaggtggtgggctacttcaatacatacaaactccttcctcccaagaacccagccacgaaacaacagaagcagtgaccacttcaacagaattcttttgtgttatgtggagcaatgccatctctcaccccaaatcgtgtatctgtcattctacgtactttttacccccagcatttatgatgtaaatctctttctctatggattatatctgtttaaagcattctttctaggttattttggggggacagtgccaagtccatctttgcccagtcaattcagtgattgatagcaatttacattaattgcagtaaagctctttggattagaaattagtgtggggaaagcttattctgttgttgtttttgtttactttcatatgatgaaaatgctgtgtttaagtgtttgtcaataggaagaatggaaaactgttgggatgatgtggtttgcaggttgctgtgcctgattcacagtgtatgttgtataagccaatgtccatacctgattatgagagcttcttaaattatatgatatcaaatttgttcctgtaactctgtatacagtgcttttctgcaaggtaaaaataacctgtctatgcatctgatttttgctacagtttagacactgtggtttacaaaacagcatgcactcaacttgggactttatgaaaagtactgaatgagcaggaaaaggcacatactcagttttttaaatgtacaatcaacaagtaaaaataacctcatgtaagtaagccatttttatttgcctttctagatattttattttattgtggaaaactgtaaacatggtcagatttggctttttttttcattaactgagcaagactttcaggatattgtagatgcacagatggtaggttgtcctgaattctacattattagattactttaattgagatttgttaaaacggttaggactgttttgtccaggaaagataagaggaccaaacatataaggtgaaattcagaattccgtttccttctaactaatgaaaaactgcttactaaaaaaaaattttatactttccttgctaaggtcccatatattgatttgtacagatccacttagtcattttctcctttttttaagaaccattttcatctgatttttaaactcacgataccagttatctgttaatcaaaattgcattttacaatttaataatgtgatatttcctatgtctacagcataccttattaggtataaaacctactgcaacttagaaaaaggaaagaaaaaagaaaacttttccaactgctgcattaagatagggtggattttatgtgctttttttttttaagagttgaatttcttttcctgacttttaccttttacagcgtattacttagtgaacattacattttcagaatagatcctaatattttattgagggcctatgtgctaaaaactatgcatatctatatattggccaattatctttaataatttaccttttgaaattgcatgtttatcatatatccttaagtggacacatacagtgccatgttgatgtgcctctcagttttattgaaaagctgccccacagcccatgtctcttgttctctgcaatgcctcaagggagtgagctctcaaccacagatagctgtggcttctcagaagcagctcattgccaaggccaggctgagaggggacctgcttgctgtggtggttgcctagcccagatgagcatttacctaccaccttcccacttggctagctgtcctttggatatgtgctgttaactggggaaggcatctaactagtagcctgctactccatagtatggctcaatagatgacacatcattttgacattatcaataggagaaaagaaaactaacccttcttctgattgtttggagccatagttgtctcagatgttctaattctctttgtatgcttggaaacagcatagatatgttgctgtggttttcagaattttctcttttaatcacaagaagccttttaaaaaatgacttacacatattctcaatgtacagtaaaacagacagaagtgagcttatctgtttgatgctgtggcagggtcccagtcactgggcatatcctccttctccttaaccagctccacagcagcccctgagtcacctgcacaaggtgcttgggaactgctggttatgagcattcctggttttcttcagccaaataacaggtaatcactgtcaattggatttggtcttcattattttatattctgattttatcagaattattctattttaaaattgttttaaaatttaaaacatttaattcatgatcatgttcatcagtagatgctattattcataagaactgtgattccagcaaactagggtaattggtgcctttttacagttttgaataaaagcatttacaatttctaaattatcagttttcacagtttcagcactcaacctcatcatacgctgatttaatattgttttacattaaaatagtccttttccctgttgtgccaccattcatttaagtgctgtttgttcttaaaatgcatttaaagaaaaattacccatattgactttcacacctcatataatcagatctattacaaatatatatcggagtgacggtgcccaggatagatgtaatatttcttacagatgctggcacagaggaaataatataccagctaatctagtcacctaaccttgtggttagaattgcaattttaagaccagaaaaatttgaagtctgatcagagatttacaactgttcattatagtggtgccttaggcaatctttccaaagtaaattcagggccccattgctacttatgccatatttggacatactttttttttcttcaattttgtaaacttcctggaaagctgtcttcactaagtatcccctagtctctatatatgtggttagtagtcatggaaatgacacataaagtacgccagaagtttgatggaacgtgttagaaactgttttgtgcttttatggatgtcatacttgacaatacatgtgtaagttactaatatatgaattgatgctaaatatatcttacatttgaattccttttggataaagttatttcttgatgtgacagagtagtgtgttttcatttttattctttacatgtgaccaaaacaatagaaaagttaaaaataaaatatagtgttttaggtggc

SEQ ID NO: 122249 - DNA, 680 bp, Homo sapiens
  Payload ID: 3955
  Gene Symbol: CPNE3
  Gene Name: copine III
  ENST ID: ENST00000620393
  CDS Start-End: 274-680
agtccagccctaggttctcctgaatccctgcggtcccagcgtcgctccggacgctgccaacctgttctccaccgtcgctcgacttccacctctaagactcccacgaaactcaggttgaataattcatcaaattacacaactgacggagtcttgctctgtcgcccaggttggaatgcaatggcgtgatctcactgaccgaaacctccgcctctgaggttcaagtgattctcctgcctcagcctcctgagtagctgggattacagaactcaagacatggctgcccagtgtgtcacaaaggtggcgctgaatgtttcctgtgccaatcttttggataaagatatagggtcaaagtcagaccctttatgtgtgttgtttttgaatacaagtggtcaacagtggtatgaggttgagcgcacagaaaggattaagaattgcttgaatccccaattttccaagacatttattattgattactactttgaagtggttcagaaattgaaatttggggtttatgacatcgacaacaaaactattgagctgagtgatgatgacttcttaggggaatgtgaatgtacccttggacaaattgtttccagcaagaagctaactcgaccactggtgatgaaaactggcagacctgcaggaaaagggagcattacgatttcagctgaagaaataaa

SEQ ID NO: 122250 - DNA, 279 bp, Homo sapiens
  Payload ID: 3955
  Gene Symbol: CPNE3
  Gene Name: copine III
  ENST ID: ENST00000621526
  CDS Start-End: 254-279
agccctaggttctcctgaatccctgcggtcccagcgtcgctccggacgctgccaacctgttctccaccgtcgctcgacttccacctctaagactcccacgaaactcaggttgaataattcatcaaattacacaactgggtcttgctctgtcacccaggctgcagtgcatagcttactgtggcctcgaactcctgaacttgagtgagcctcctgccttagcctactgagtagctgggactacagaactcaagacatggctgcccagtgtgtcacaaaggt

SEQ ID NO: 122251 - DNA, 581 bp, Homo sapiens
  Payload ID: 3955
  Gene Symbol: CPNE3
  Gene Name: copine III
  ENST ID: ENST00000621245
  CDS Start-End: 164-581
gaatccctgcggtcccagcgtcgctccggacgctgccaacctgttctccaccgtcgctcgacttccacctctaagactcccacgtgagtgcgggcgtctcccagttcctgggccggaaactcaggttgaataattcatcaaattacacaactgaactcaagacatggctgcccagtgtgtcacaaaggtggcgctgaatgtttcctgtgccaatcttttggataaagatatagggtcaaagtcagaccctttatgtgtgttgtttttgaatacaagtggtcaacagtggtatgaggttgagcgcacagaaaggattaagaattgcttgaatccccaattttccaagacatttattattgattactactttgaagtggttcagaaattgaaatttggggtttatgacatcgacaacaaaactattgagctgagtgatgatgacttcttaggggaatgtgaatgtacccttggacaaattgtttccagcaagaagctaactcgaccactggtgatgaaaactggcagacctgcaggaaaagggagcattacgatttcagctgaagaaataaaagataatagag

SEQ ID NO: 122252 - DNA, 817 bp, Homo sapiens
  Payload ID: 3955
  Gene Symbol: CPNE3
  Gene Name: copine III
  ENST ID: ENST00000621783
  CDS Start-End: 116-817
cagtccagccctaggttctcctgaatccctgcggtcccagcgtcgctccggacgctgccaacctgttctccaccgtcgctcgacttccacctctaagactcccacaactcaagacatggctgcccagtgtgtcacaaaggtggcgctgaatgtttcctgtgccaatcttttggataaagatatagggtcaaagtcagaccctttatgtgtgttgtttttgaatacaagtggtcaacagtggtatgaggttgagcgcacagaaaggattaagaattgcttgaatccccaattttccaagacatttattattgattactactttgaagtggttcagaaattgaaatttggggtttatgacatcgacaacaaaactattgagctgagtgatgatgacttcttaggggaatgtgaatgtacccttggacaaattgtttccagcaagaagctaactcgaccactggtgatgaaaactggcagacctgcaggaaaagggagcattacgatttcagctgaagaaataaaagataatagagtggtcttgtttgaaatggaagccagaaaactggataataaggatctatttggaaagtcagacccatacctggaattccacaagcagacatctgatggaaactggctaatggttcatcggacagaggttgttaaaaacaacttgaatcctgtttggaggcctttcaagatctctcttaactcactgtgttacggagatatggacaaaaccattaaggtggagtgttatgattatgacaatgatgggtcacatgatctcattggaacatttcagaccaccatgaca

SEQ ID NO: 122253 - DNA, 4184 bp, Homo sapiens
  Payload ID: 3956
  Gene Symbol: CPNE4
  Gene Name: copine IV
  Uniprot ID: Q96A23
  ENST ID: ENST00000429747
  CDS Start-End: 878-2551
gctcctgccatacgccagacagttttgtagacacgaaggatccagagattagcaacacctttaccatttttggtgacagttaagcacccatctaagaagttttctttggtgagtgccaaaaagtgtaactcccattccccccacacccgcgccgcgatacgaccgctccaccctagagtggagatggagaccaagcacttggagatctaaatcaagtgtccccaggagctcagttgagcgacaaagctgagcagaaagcccagactgcgggcgcggcaggaccacggagagcgccgccgccaaggcctgggcggggcctgagctcgggttcccggggcaatgctcgtctccgtcagcaacccccagggggcgctcgcgcggaggtttcggaaccagtctcttgccgggttgctgggtgcatgggattcgtcagaaggtggaaatctctctgtgagaagctgccatctccccgccacccgctcgtccccttctctttctgccaccctcctttccttcctccctcgctccactccactccctccctcttttctcagtaccctcctctttactctccgagttaactgagagccgacctgacatctccaacattttcaccctcttcccccacccccatcaccgagaatggagtcagggtttccggagagaccgaactctgctctcagcacctttcccagccgctgttgctaaactgacctcggaggacgagaggggaaggaggtgcgacgccccttacatcagtacaaaactaccacaccaaccacctccacttcaaagccggattttgcatcctgggggcgggacagacctcgtcccgggctgaattctctctccactcttcgagattggcacacccagaatgaagaagatgagcaacatttatgagtccgctgccaacacactgggaatctttaacagcccctgcctgaccaaagttgagctgcgtgtggcgtgcaaaggcatttctgacagagatgccctttccaaaccagacccctgtgtcatcctcaagatgcagtctcatgggcagtggtttgaggttgacaggactgaggtgattcgcacctgcataaacccagtgtactcaaaactgtttactgtggacttttactttgaggaggtgcagcgcctgcggtttgaagtccatgacatcagcagcaaccacaatgggctgaaggaggccgacttccttggtggcatggagtgcacacttggccagattgtttcccagagaaagctgtccaaatccttgctgaagcatgggaacacagcagggaaatcttccatcacggtgattgctgaagaattatctggcaatgacgactatgttgagcttgcattcaatgcacggaaattggatgacaaggatttcttcagtaaatctgacccatttctggaaatttttcgtatgaatgatgatgcaactcagcagctggtgcaccgaactgaggttgtgatgaataacttaagcccagcctggaaatcattcaaagtatctgtaaattctctatgcagcggagacccagaccgccggctaaagtgcatagtatgggactgggactccaatggcaagcatgacttcattggagaattcacctcgacattcaaggagatgagaggagcaatggaagggaaacaggtgcagtgggagtgcatcaatcccaagtacaaagccaagaagaagaattacaagaactcaggcactgtgattctgaatctgtgcaagattcacaagatgcattctttcttggactacatcatgggtggctgccaaatccagtttacagtagctatagatttcactgcctcaaacggggaccccaggaacagctgttccttgcactacatccacccttaccaacccaatgagtatctgaaagctttggtagctgtgggggagatttgccaagactatgacagtgacaaaatgttccctgcctttgggtttggcgccaggatacctccagagtacacggtctctcatgactttgcaatcaactttaatgaagacaacccagaatgtgcaggaattcaaggagttgtggaagcctatcagagctgtcttcctaagctccaactctacggtcccaccaacattgcccccatcatccagaaggttgccaagtcagcgtcagaggaaactaacaccaaggaggcatcgcaatacttcatcctgctgatcctgacagatggtgttatcacagacatggccgacacccgggaggccattgtccatgcctcccacctccccatgtcagtcatcatcgtgggagtagggaacgctgacttcagtgacatgcagatgctggacggtgatgatgggattctgaggtcacccaagggagagcctgttcttcgagacatcgtccagttcgtgcccttcaggaacttcaaacacgcatctccagctgccctggcaaagagcgtgctggctgaagtcccaaaccaagttgtggactattacaatggcaaaggaattaaaccaaaatgttcatcagaaatgtatgaatcttccagaacactagcaccatgaactccccacacagttttacagagttctgaaatactattcctgctaatatttcatatttaatacttctactactcctgtactttaaaaaaccaacaacatatacacatttaaaaatagcacgttttggtgatttttaactatctgacaattttttttgcatgtgtagccctgaggcctggatctgttaagcccttgtattgttaactttttacaaagaaacacagataacaataacttactatttacattacagcatgtcgccttgaaataaaatggtatctgtatccattttttatacaggtttgttgaaattttgctaaatttcttatctttacactctaaagcattttgaaacatttactgaatgttgatagacgaaatatacttggttttatctgctataggatgagagactttttaaaatggcagatgcatggactgtattttgcatgtttaaaataaaaaaagaaaaacccacatggtttttgcagttgttatctctaattcctccctgctgagaatggtctctctactaaagaagaggtttatttacttcttctttctgaggtgagtctttttgaggtaagtctgggtcatctagcccagcacctctcatactttatactgtgtacacaaatcacctgagagtcttattaaaattcagattgtgatacataggtctgtgtgggacccaagattctgcatctttaactaggtcccaggtgatgctaatgcagtccctggactataccaagaggagtgaggatctagactttagggtgtcatgatggagaccatcaaaaacagcgtggcttctagtctgcttgagaatggcacctcttcctgacagtagcacaaaagtcctgcctgtctccagaggtgacagtagaaagtaatgagactgactccagaagctgcacacctcaaatcagtctcgctgctttatactcacacctcttccttagataagactagaaagtgctcctcctggccagtccctgccctcttaaaagtggcatcacacaccactgcatggatggtgtcaatccctagaagtgatctcaaagcgtcttcactggaaccacaacaatagaaacttacacatggcaaatggctatgcagtacagctcccgatatctggtccactaaattgacctttgagcttagtgtgggaatttcttgcctcctttctatcacttctgagaacaaattctataagcagaaatgcctggaattattgtctggggtcgaggtgttttgtttcaatataagctggccagtctggaaccaaaaggacgaatgtttaacttgtataatcttcttgcagggaaacaggcaagtgtttttgcaagcataaaaggcacaaagtggagtttatttttggtcagagagatgaagaagtaaatcacaaggcaaaatttgttgtttgtttgaagaggggagcagtattaacaagcaaataaaatgccttctatgatttccacagttacaattatagatcctaatcttgcaaatacatgtcaccaaatgcacaacattttgggaatgatggtaaaattgtatgactgaaaaaatcataaatatttaagctatattgttttattaataaattgggtacttacagaattcttct

SEQ ID NO: 122254 - DNA, 577 bp, Homo sapiens
  Payload ID: 3956
  Gene Symbol: CPNE4
  Gene Name: copine IV
  ENST ID: ENST00000505957
  CDS Start-End: 358-577
atcaaacagaaacccggcgagtgaatctacccagagctgaagcttcctttgcaacttgggaacaccagggccacagtgactttgtggcttggctttagataaatttgaccatggctgtagaacccagcagctcagaatccattaaaaggagagctgggaggagcacctttcccagccgctgttgctaaactgacctcggaggacgagaggggaaggaggtgcgacgccccttacatcagtacaaaactaccacaccaaccacctccacttcaaagccggattttgcatcctgggggcgggacagacctcgtcccgggctgaattctctctccactcttcgagattggcacacccagaatgaagaagatgagcaacatttatgagtccgctgccaacacactgggaatctttaacagcccctgcctgaccaaagttgagctgcgtgtggcgtgcaaaggcatttctgacagagatgccctttccaaaccagacccctgtgtcatcctcaagatgcagtctcatgggcagtggtttgaggttgacaggactgaggtgattcgcacctgcataaacccag

SEQ ID NO: 122255 - DNA, 2120 bp, Homo sapiens
  Payload ID: 3956
  Gene Symbol: CPNE4
  Gene Name: copine IV
  Uniprot ID: Q96A23
  ENST ID: ENST00000502818
  CDS Start-End: 221-1948
aatgctcaccctgactcattcagggaaggatccaaggtttttgatgcagggcactgactctctgcctgtttttccccttcatcatctgctccccttaaaaaatggtatcaactgcattgaaacccggcgagtgaatctacccagagctgaagcttcctttgcaacttgggaacaccagggccacagtgactttgtggcttggctttagataaatttgaccatggctgtagaacccagcagctcagaatccattaaaaggagagctgggaggagaatgaagaagatgagcaacatttatgagtccgctgccaacacactgggaatctttaacagcccctgcctgaccaaagttgagctgcgtgtggcgtgcaaaggcatttctgacagagatgccctttccaaaccagacccctgtgtcatcctcaagatgcagtctcatgggcagtggtttgaggttgacaggactgaggtgattcgcacctgcataaacccagtgtactcaaaactgtttactgtggacttttactttgaggaggtgcagcgcctgcggtttgaagtccatgacatcagcagcaaccacaatgggctgaaggaggccgacttccttggtggcatggagtgcacacttggccagattgtttcccagagaaagctgtccaaatccttgctgaagcatgggaacacagcagggaaatcttccatcacggtgattgctgaagaattatctggcaatgacgactatgttgagcttgcattcaatgcacggaaattggatgacaaggatttcttcagtaaatctgacccatttctggaaatttttcgtatgaatgatgatgcaactcagcagctggtgcaccgaactgaggttgtgatgaataacttaagcccagcctggaaatcattcaaagtatctgtaaattctctatgcagcggagacccagaccgccggctaaagtgcatagtatgggactgggactccaatggcaagcatgacttcattggagaattcacctcgacattcaaggagatgagaggagcaatggaagggaaacaggtgcagtgggagtgcatcaatcccaagtacaaagccaagaagaagaattacaagaactcaggcactgtgattctgaatctgtgcaagattcacaagatgcattctttcttggactacatcatgggtggctgccaaatccagtttacagtagctatagatttcactgcctcaaacggggaccccaggaacagctgttccttgcactacatccacccttaccaacccaatgagtatctgaaagctttggtagctgtgggggagatttgccaagactatgacagtgacaaaatgttccctgcctttgggtttggcgccaggatacctccagagtacacggtctctcatgactttgcaatcaactttaatgaagacaacccagaatgtgcaggaattcaaggagttgtggaagcctatcagagctgtcttcctaagctccaactctacggtcccaccaacattgcccccatcatccagaaggttgccaagtcagcgtcagaggaaactaacaccaaggaggcatcgcaatacttcatcctgctgatcctgacagatggtgttatcacagacatggccgacacccgggaggccattgtccatgcctcccacctccccatgtcagtcatcatcgtgggagtagggaacgctgacttcagtgacatgcagatgctggacggtgatgatgggattctgaggtcacccaagggagagcctgttcttcgagacatcgtccagttcgtgcccttcaggaacttcaaacacgcatctccagctgccctggcaaagagcgtgctggctgaagtcccaaaccaagttgtggactattacaatggcaaaggaattaaaccaaaatgttcatcagaaatgtatgaatcttccagaacactagcaccatgaactccccacacagttttacagagttctgaaatactattcctgctaatatttcatatttaatacttctactactcctgtactttaaaaaaccaacaacatatacacatttaaaaatagcacgttttggtgatttttaactatctgacaattttttttgcatgtgtagccctga

SEQ ID NO: 122256 - DNA, 5431 bp, Homo sapiens
  Payload ID: 3956
  Gene Symbol: CPNE4
  Gene Name: copine IV
  Uniprot ID: Q96A23
  ENST ID: ENST00000512055
  CDS Start-End: 2128-3801
acaccagcggctggacattgagaggatcacagcagtggaaaaagacacaagcacctagccgttgagaggaacgcactggcctaagaacatactgacagacgccggtaggccagcagggcggcaggccatcaacccgcggaaggacacggactttggccagggcggtataaggagcctaaaggacgtcatacccatgggccagacctaacattcctttctgctgatcccaagtttttagacaaagtttcccttccttaaccaattgcgaatcagaaaatcctcgaatccaccaatgacctataccagtaaagatgtcatctggccaatttgtgtgaaaaaagagaataattctcatccaaaccgcctgtctctggaaataagaaaagctctgagggtctccaaagttaccagaggaaggctgaattttatggtgattgataatatttccaagcttatggagaaaaaaatatcattagtcttttccatggtagaaaagagtaaagcctgtaacaaaaaaagtgatacagtggatgggatgatgagacccttgaaataagcaaggatggaccagaaactggtaacactcacccatggaatttcattatgaagtcgtggcaagggccaagccgacctggatttgaaacccatctcttcaacgatgtagattttgacaacatatttgatttctctgggcctcagtttgttatctgcacaaaagggagatatgagtggttacgttattggattgtcatgaacattaaataggataatgtcaaatcattcagccaagtttctagcatatagtacaggttcaaatattatcttttttttcccaccaacctcttttccaggaaaatgcaaagctactctttagccaaattttaaaacaggggatatttattttgggaatcattaatacccatctgccccttttttggtccattggacatattgaaatgaatgattaatacttatcacttcatggtgtacacattgttttgtttcttatatccagagtctagtcctcaactctaaccaaagtaaaggaaactggaaagacacacgctttttcagtcattaatagaaagttgtccagaaacccggcgagtgaatctacccagagctgaagcttcctttgcaacttgggaacaccagggccacagtgactttgtggcttggctttagataaatttgaccatggctgtagaacccagcagctcagaatccattaaaaggagagctgggaggaggctcctgccatacgccagacagttttgtagacacgaaggatccagagattagcaacacctttaccatttttggtgacagttaagcacccatctaagaagttttctttggtgagtgccaaaaagtgtaactcccattccccccacacccgcgccgcgatacgaccgctccaccctagagtggagatggagaccaagcacttggagatctaaatcaagtgtccccaggagctcagttgagcgacaaagctgagcagaaagcccagactgcgggcgcggcaggaccacggagagcgccgccgccaaggcctgggcggggcctgagctcgggttcccggggcaatgctcgtctccgtcagcaacccccagggggcgctcgcgcggaggtttcggaaccagtctcttgccgggttgctgggtgcatgggattcgtcagaaggtggaaatctctctgtgagaagctgccatctccccgccacccgctcgtccccttctctttctgccaccctcctttccttcctccctcgctccactccactccctccctcttttctcagtaccctcctctttactctccgagttaactgagagccgacctgacatctccaacattttcaccctcttcccccacccccatcaccgagaatggagtcagggtttccggagagaccgaactctgctctcagcacctttcccagccgctgttgctaaactgacctcggaggacgagaggggaaggaggtgcgacgccccttacatcagtacaaaactaccacaccaaccacctccacttcaaagccggattttgcatcctgggggcgggacagacctcgtcccgggctgaattctctctccactcttcgagattggcacacccagaatgaagaagatgagcaacatttatgagtccgctgccaacacactgggaatctttaacagcccctgcctgaccaaagttgagctgcgtgtggcgtgcaaaggcatttctgacagagatgccctttccaaaccagacccctgtgtcatcctcaagatgcagtctcatgggcagtggtttgaggttgacaggactgaggtgattcgcacctgcataaacccagtgtactcaaaactgtttactgtggacttttactttgaggaggtgcagcgcctgcggtttgaagtccatgacatcagcagcaaccacaatgggctgaaggaggccgacttccttggtggcatggagtgcacacttggccagattgtttcccagagaaagctgtccaaatccttgctgaagcatgggaacacagcagggaaatcttccatcacggtgattgctgaagaattatctggcaatgacgactatgttgagcttgcattcaatgcacggaaattggatgacaaggatttcttcagtaaatctgacccatttctggaaatttttcgtatgaatgatgatgcaactcagcagctggtgcaccgaactgaggttgtgatgaataacttaagcccagcctggaaatcattcaaagtatctgtaaattctctatgcagcggagacccagaccgccggctaaagtgcatagtatgggactgggactccaatggcaagcatgacttcattggagaattcacctcgacattcaaggagatgagaggagcaatggaagggaaacaggtgcagtgggagtgcatcaatcccaagtacaaagccaagaagaagaattacaagaactcaggcactgtgattctgaatctgtgcaagattcacaagatgcattctttcttggactacatcatgggtggctgccaaatccagtttacagtagctatagatttcactgcctcaaacggggaccccaggaacagctgttccttgcactacatccacccttaccaacccaatgagtatctgaaagctttggtagctgtgggggagatttgccaagactatgacagtgacaaaatgttccctgcctttgggtttggcgccaggatacctccagagtacacggtctctcatgactttgcaatcaactttaatgaagacaacccagaatgtgcaggaattcaaggagttgtggaagcctatcagagctgtcttcctaagctccaactctacggtcccaccaacattgcccccatcatccagaaggttgccaagtcagcgtcagaggaaactaacaccaaggaggcatcgcaatacttcatcctgctgatcctgacagatggtgttatcacagacatggccgacacccgggaggccattgtccatgcctcccacctccccatgtcagtcatcatcgtgggagtagggaacgctgacttcagtgacatgcagatgctggacggtgatgatgggattctgaggtcacccaagggagagcctgttcttcgagacatcgtccagttcgtgcccttcaggaacttcaaacacgcatctccagctgccctggcaaagagcgtgctggctgaagtcccaaaccaagttgtggactattacaatggcaaaggaattaaaccaaaatgttcatcagaaatgtatgaatcttccagaacactagcaccatgaactccccacacagttttacagagttctgaaatactattcctgctaatatttcatatttaatacttctactactcctgtactttaaaaaaccaacaacatatacacatttaaaaatagcacgttttggtgatttttaactatctgacaattttttttgcatgtgtagccctgaggcctggatctgttaagcccttgtattgttaactttttacaaagaaacacagataacaataacttactatttacattacagcatgtcgccttgaaataaaatggtatctgtatccattttttatacaggtttgttgaaattttgctaaatttcttatctttacactctaaagcattttgaaacatttactgaatgttgatagacgaaatatacttggttttatctgctataggatgagagactttttaaaatggcagatgcatggactgtattttgcatgtttaaaataaaaaaagaaaaacccacatggtttttgcagttgttatctctaattcctccctgctgagaatggtctctctactaaagaagaggtttatttacttcttctttctgaggtgagtctttttgaggtaagtctgggtcatctagcccagcacctctcatactttatactgtgtacacaaatcacctgagagtcttattaaaattcagattgtgatacataggtctgtgtgggacccaagattctgcatctttaactaggtcccaggtgatgctaatgcagtccctggactataccaagaggagtgaggatctagactttagggtgtcatgatggagaccatcaaaaacagcgtggcttctagtctgcttgagaatggcacctcttcctgacagtagcacaaaagtcctgcctgtctccagaggtgacagtagaaagtaatgagactgactccagaagctgcacacctcaaatcagtctcgctgctttatactcacacctcttccttagataagactagaaagtgctcctcctggccagtccctgccctcttaaaagtggcatcacacaccactgcatggatggtgtcaatccctagaagtgatctcaaagcgtcttcactggaaccacaacaatagaaacttacacatggcaaatggctatgcagtacagctcccgatatctggtccactaaattgacctttgagcttagtgtgggaatttcttgcctcctttctatcacttctgagaacaaattctataagcagaaatgcctggaattattgtctggggtcgaggtgttttgtttcaatataagctggccagtctggaaccaaaaggacgaatgtttaacttgtataatcttcttgcagggaaacaggcaagtgtttttgcaagcataaaaggcacaaagtggagtttatttttggtcagagagatgaagaagtaaatcacaaggcaaaatttgttgtttgtttgaagaggggagcagtattaacaagcaaataaaatgccttctatgatttccacagttacaattatagatcctaatcttgcaaatacatgtcaccaaatgcacaacattttgggaatgatggtaaaattgtatgactgaaaaaatcataaatatttaagctatattgttttattaataaattgggtacttacagaattct

SEQ ID NO: 122257 - DNA, 2503 bp, Homo sapiens
  Payload ID: 3956
  Gene Symbol: CPNE4
  Gene Name: copine IV
  Uniprot ID: Q96A23
  ENST ID: ENST00000511604
  CDS Start-End: 578-2251
gagtctagtcctcaactctaaccaaagtaaaggaaactggaaagacacacgctttttcagtcattaatagaaagttgtccagaaacccggcgagtgaatctacccagagctgaagcttcctttgcaacttgggaacaccagggccacagtgactttgtggcttggctttagataaatttgaccatggctgtagaacccagcagctcagaatccattaaaaggagagctgggaggaggctcctgccatacgccagacagttttgtagacacgaaggatccagagattagcaacacctttaccatttttggtgacagttaagcacccatctaagaagttttctttgggagtcagggtttccggagagaccgaactctgctctcagcacctttcccagccgctgttgctaaactgacctcggaggacgagaggggaaggaggtgcgacgccccttacatcagtacaaaactaccacaccaaccacctccacttcaaagccggattttgcatcctgggggcgggacagacctcgtcccgggctgaattctctctccactcttcgagattggcacacccagaatgaagaagatgagcaacatttatgagtccgctgccaacacactgggaatctttaacagcccctgcctgaccaaagttgagctgcgtgtggcgtgcaaaggcatttctgacagagatgccctttccaaaccagacccctgtgtcatcctcaagatgcagtctcatgggcagtggtttgaggttgacaggactgaggtgattcgcacctgcataaacccagtgtactcaaaactgtttactgtggacttttactttgaggaggtgcagcgcctgcggtttgaagtccatgacatcagcagcaaccacaatgggctgaaggaggccgacttccttggtggcatggagtgcacacttggccagattgtttcccagagaaagctgtccaaatccttgctgaagcatgggaacacagcagggaaatcttccatcacggtgattgctgaagaattatctggcaatgacgactatgttgagcttgcattcaatgcacggaaattggatgacaaggatttcttcagtaaatctgacccatttctggaaatttttcgtatgaatgatgatgcaactcagcagctggtgcaccgaactgaggttgtgatgaataacttaagcccagcctggaaatcattcaaagtatctgtaaattctctatgcagcggagacccagaccgccggctaaagtgcatagtatgggactgggactccaatggcaagcatgacttcattggagaattcacctcgacattcaaggagatgagaggagcaatggaagggaaacaggtgcagtgggagtgcatcaatcccaagtacaaagccaagaagaagaattacaagaactcaggcactgtgattctgaatctgtgcaagattcacaagatgcattctttcttggactacatcatgggtggctgccaaatccagtttacagtagctatagatttcactgcctcaaacggggaccccaggaacagctgttccttgcactacatccacccttaccaacccaatgagtatctgaaagctttggtagctgtgggggagatttgccaagactatgacagtgacaaaatgttccctgcctttgggtttggcgccaggatacctccagagtacacggtctctcatgactttgcaatcaactttaatgaagacaacccagaatgtgcaggaattcaaggagttgtggaagcctatcagagctgtcttcctaagctccaactctacggtcccaccaacattgcccccatcatccagaaggttgccaagtcagcgtcagaggaaactaacaccaaggaggcatcgcaatacttcatcctgctgatcctgacagatggtgttatcacagacatggccgacacccgggaggccattgtccatgcctcccacctccccatgtcagtcatcatcgtgggagtagggaacgctgacttcagtgacatgcagatgctggacggtgatgatgggattctgaggtcacccaagggagagcctgttcttcgagacatcgtccagttcgtgcccttcaggaacttcaaacacgcatctccagctgccctggcaaagagcgtgctggctgaagtcccaaaccaagttgtggactattacaatggcaaaggaattaaaccaaaatgttcatcagaaatgtatgaatcttccagaacactagcaccatgaactccccacacagttttacagagttctgaaatactattcctgctaatatttcatatttaatacttctactactcctgtactttaaaaaaccaacaacatatacacatttaaaaatagcacgttttggtgatttttaactatctgacaattttttttgcatgtgtagccctgaggcctggatctgttaagcccttgtattgttaactttttacaaagaaacacagataacaataacttactatttacattaca

SEQ ID NO: 122258 - DNA, 2230 bp, Homo sapiens
  Payload ID: 3956
  Gene Symbol: CPNE4
  Gene Name: copine IV
  Uniprot ID: Q96A23
  ENST ID: ENST00000512332
  CDS Start-End: 184-1911
gagtctagtcctcaactctaaccaaagtaaaggaaactggaaagacacacgctttttcagtcattaatagaaagttgtccagaaacccggcgagtgaatctacccagagctgaagcttcctttgcaacttgggaacaccagggccacagtgactttgtggcttggctttagataaatttgaccatggctgtagaacccagcagctcagaatccattaaaaggagagctgggaggagaatgaagaagatgagcaacatttatgagtccgctgccaacacactgggaatctttaacagcccctgcctgaccaaagttgagctgcgtgtggcgtgcaaaggcatttctgacagagatgccctttccaaaccagacccctgtgtcatcctcaagatgcagtctcatgggcagtggtttgaggttgacaggactgaggtgattcgcacctgcataaacccagtgtactcaaaactgtttactgtggacttttactttgaggaggtgcagcgcctgcggtttgaagtccatgacatcagcagcaaccacaatgggctgaaggaggccgacttccttggtggcatggagtgcacacttggccagattgtttcccagagaaagctgtccaaatccttgctgaagcatgggaacacagcagggaaatcttccatcacggtgattgctgaagaattatctggcaatgacgactatgttgagcttgcattcaatgcacggaaattggatgacaaggatttcttcagtaaatctgacccatttctggaaatttttcgtatgaatgatgatgcaactcagcagctggtgcaccgaactgaggttgtgatgaataacttaagcccagcctggaaatcattcaaagtatctgtaaattctctatgcagcggagacccagaccgccggctaaagtgcatagtatgggactgggactccaatggcaagcatgacttcattggagaattcacctcgacattcaaggagatgagaggagcaatggaagggaaacaggtgcagtgggagtgcatcaatcccaagtacaaagccaagaagaagaattacaagaactcaggcactgtgattctgaatctgtgcaagattcacaagatgcattctttcttggactacatcatgggtggctgccaaatccagtttacagtagctatagatttcactgcctcaaacggggaccccaggaacagctgttccttgcactacatccacccttaccaacccaatgagtatctgaaagctttggtagctgtgggggagatttgccaagactatgacagtgacaaaatgttccctgcctttgggtttggcgccaggatacctccagagtacacggtctctcatgactttgcaatcaactttaatgaagacaacccagaatgtgcaggaattcaaggagttgtggaagcctatcagagctgtcttcctaagctccaactctacggtcccaccaacattgcccccatcatccagaaggttgccaagtcagcgtcagaggaaactaacaccaaggaggcatcgcaatacttcatcctgctgatcctgacagatggtgttatcacagacatggccgacacccgggaggccattgtccatgcctcccacctccccatgtcagtcatcatcgtgggagtagggaacgctgacttcagtgacatgcagatgctggacggtgatgatgggattctgaggtcacccaagggagagcctgttcttcgagacatcgtccagttcgtgcccttcaggaacttcaaacacgcatctccagctgccctggcaaagagcgtgctggctgaagtcccaaaccaagttgtggactattacaatggcaaaggaattaaaccaaaatgttcatcagaaatgtatgaatcttccagaacactagcaccatgaactccccacacagttttacagagttctgaaatactattcctgctaatatttcatatttaatacttctactactcctgtactttaaaaaaccaacaacatatacacatttaaaaatagcacgttttggtgatttttaactatctgacaattttttttgcatgtgtagccctgaggcctggatctgttaagcccttgtattgttaactttttacaaagaaacacagataacaataacttactatttacattacagcatgtcgccttgaaataaaatggtatctgtatccattttttatacaggtttgttgaaattttgcta

SEQ ID NO: 122259 - DNA, 561 bp, Homo sapiens
  Payload ID: 3956
  Gene Symbol: CPNE4
  Gene Name: copine IV
  ENST ID: ENST00000505881
  CDS Start-End: 55-561
agaagggtacaaatcttttttctttctccaaggagaatcttttgagcacaatgaatgaagaagatgagcaacatttatgagtccgctgccaacacactgggaatctttaacagcccctgcctgaccaaagttgagctgcgtgtggcgtgcaaaggcatttctgacagagatgccctttccaaaccagacccctgtgtcatcctcaagatgcagtctcatgggcagtggtttgaggttgacaggactgaggtgattcgcacctgcataaacccagtgtactcaaaactgtttactgtggacttttactttgaggaggtgcagcgcctgcggtttgaagtccatgacatcagcagcaaccacaatgggctgaaggaggccgacttccttggtggcatggagtgcacacttggccagattgtttcccagagaaagctgtccaaatccttgctgaagcatgggaacacagcagggaaatcttccatcacggtgattgctgaagaattatctggcaatgacgactatgttgagcttgcattcaatgcacggaaattggatgacaag

SEQ ID NO: 122260 - DNA, 550 bp, Homo sapiens
  Payload ID: 3956
  Gene Symbol: CPNE4
  Gene Name: copine IV
  ENST ID: ENST00000514999
  CDS Start-End: 303-550
gttggagagccagtgacatcccaggcttttgcccaaatgtccttgagttctacaccctgagccttgaaatgcagcttttctggggctgacttcccaggatcggtggtgctgtactttcaggagatggtgtttgctggccagtgaagcacaaaatcagagtgaatgtggttcacatacagctttatgtaggtgcatcaacgagcctggaactaggtgccgggtgccctctaagacaccaagagctattttggaaatagaaagggaacaagtatataaaaatggaagatccagaaatacaaggaatgaagaagatgagcaacatttatgagtccgctgccaacacactgggaatctttaacagcccctgcctgaccaaagttgagctgcgtgtggcgtgcaaaggcatttctgacagagatgccctttccaaaccagacccctgtgtcatcctcaagatgcagtctcatgggcagtggtttgaggttgacaggactgaggtgattcgcacctgcataaacccagtgtactcaaaactgtttactgtggactt

SEQ ID NO: 122261 - DNA, 3556 bp, Homo sapiens
  Payload ID: 3956
  Gene Symbol: CPNE4
  Gene Name: copine IV
  Uniprot ID: Q96A23
  ENST ID: ENST00000617767
  CDS Start-End: 196-1923
attccaggatttcacttgtcacactgatgggtgagatgcctttcatattggcataagacactgagcggatgcctcctcttatcttatcaaacagaaacccggcgagtgaatctacccagagctgaagcttcctttgcaacttgggaacaccagggccacagtgactttgtggcttggctttagataaatttgaccatggctgtagaacccagcagctcagaatccattaaaaggagagctgggaggagaatgaagaagatgagcaacatttatgagtccgctgccaacacactgggaatctttaacagcccctgcctgaccaaagttgagctgcgtgtggcgtgcaaaggcatttctgacagagatgccctttccaaaccagacccctgtgtcatcctcaagatgcagtctcatgggcagtggtttgaggttgacaggactgaggtgattcgcacctgcataaacccagtgtactcaaaactgtttactgtggacttttactttgaggaggtgcagcgcctgcggtttgaagtccatgacatcagcagcaaccacaatgggctgaaggaggccgacttccttggtggcatggagtgcacacttggccagattgtttcccagagaaagctgtccaaatccttgctgaagcatgggaacacagcagggaaatcttccatcacggtgattgctgaagaattatctggcaatgacgactatgttgagcttgcattcaatgcacggaaattggatgacaaggatttcttcagtaaatctgacccatttctggaaatttttcgtatgaatgatgatgcaactcagcagctggtgcaccgaactgaggttgtgatgaataacttaagcccagcctggaaatcattcaaagtatctgtaaattctctatgcagcggagacccagaccgccggctaaagtgcatagtatgggactgggactccaatggcaagcatgacttcattggagaattcacctcgacattcaaggagatgagaggagcaatggaagggaaacaggtgcagtgggagtgcatcaatcccaagtacaaagccaagaagaagaattacaagaactcaggcactgtgattctgaatctgtgcaagattcacaagatgcattctttcttggactacatcatgggtggctgccaaatccagtttacagtagctatagatttcactgcctcaaacggggaccccaggaacagctgttccttgcactacatccacccttaccaacccaatgagtatctgaaagctttggtagctgtgggggagatttgccaagactatgacagtgacaaaatgttccctgcctttgggtttggcgccaggatacctccagagtacacggtctctcatgactttgcaatcaactttaatgaagacaacccagaatgtgcaggaattcaaggagttgtggaagcctatcagagctgtcttcctaagctccaactctacggtcccaccaacattgcccccatcatccagaaggttgccaagtcagcgtcagaggaaactaacaccaaggaggcatcgcaatacttcatcctgctgatcctgacagatggtgttatcacagacatggccgacacccgggaggccattgtccatgcctcccacctccccatgtcagtcatcatcgtgggagtagggaacgctgacttcagtgacatgcagatgctggacggtgatgatgggattctgaggtcacccaagggagagcctgttcttcgagacatcgtccagttcgtgcccttcaggaacttcaaacacgcatctccagctgccctggcaaagagcgtgctggctgaagtcccaaaccaagttgtggactattacaatggcaaaggaattaaaccaaaatgttcatcagaaatgtatgaatcttccagaacactagcaccatgaactccccacacagttttacagagttctgaaatactattcctgctaatatttcatatttaatacttctactactcctgtactttaaaaaaccaacaacatatacacatttaaaaatagcacgttttggtgatttttaactatctgacaattttttttgcatgtgtagccctgaggcctggatctgttaagcccttgtattgttaactttttacaaagaaacacagataacaataacttactatttacattacagcatgtcgccttgaaataaaatggtatctgtatccattttttatacaggtttgttgaaattttgctaaatttcttatctttacactctaaagcattttgaaacatttactgaatgttgatagacgaaatatacttggttttatctgctataggatgagagactttttaaaatggcagatgcatggactgtattttgcatgtttaaaataaaaaaagaaaaacccacatggtttttgcagttgttatctctaattcctccctgctgagaatggtctctctactaaagaagaggtttatttacttcttctttctgaggtgagtctttttgaggtaagtctgggtcatctagcccagcacctctcatactttatactgtgtacacaaatcacctgagagtcttattaaaattcagattgtgatacataggtctgtgtgggacccaagattctgcatctttaactaggtcccaggtgatgctaatgcagtccctggactataccaagaggagtgaggatctagactttagggtgtcatgatggagaccatcaaaaacagcgtggcttctagtctgcttgagaatggcacctcttcctgacagtagcacaaaagtcctgcctgtctccagaggtgacagtagaaagtaatgagactgactccagaagctgcacacctcaaatcagtctcgctgctttatactcacacctcttccttagataagactagaaagtgctcctcctggccagtccctgccctcttaaaagtggcatcacacaccactgcatggatggtgtcaatccctagaagtgatctcaaagcgtcttcactggaaccacaacaatagaaacttacacatggcaaatggctatgcagtacagctcccgatatctggtccactaaattgacctttgagcttagtgtgggaatttcttgcctcctttctatcacttctgagaacaaattctataagcagaaatgcctggaattattgtctggggtcgaggtgttttgtttcaatataagctggccagtctggaaccaaaaggacgaatgtttaacttgtataatcttcttgcagggaaacaggcaagtgtttttgcaagcataaaaggcacaaagtggagtttatttttggtcagagagatgaagaagtaaatcacaaggcaaaatttgttgtttgtttgaagaggggagcagtattaacaagcaaataaaatgccttctatgatttccacagttacaattatagatcctaatcttgcaaatacatgtcaccaaatgcacaacattttgggaatgatggtaaaattgtatgactgaaaaaatcataaatatttaagctatattgttttattaataaattgggtacttacagaattcttct

SEQ ID NO: 122262 - DNA, 3897 bp, Homo sapiens
  Payload ID: 3957
  Gene Symbol: CPNE5
  Gene Name: copine V
  Uniprot ID: Q9HCH3
  ENST ID: ENST00000244751
  CDS Start-End: 626-2407
gggcagatttgattttcccgcagcccgggcgccccggagccgaagcccgagccgaggaggtggcgctcgcagccgcgtctcagccccgtcgccgccggcgccaagacccagggagaggcggcgcagcccgggcgctcgggctccgcgctgccggcgccccgccacccccgccgccagcgccccatccggcgcctcccgctcctcacgcccctctccctgtcttctgcatcccctctacctctgcccacagacgcgcgtccctctcctggtgcccctctccacgactccgcgtttccctcccggtgccctctccccgagcccctctccccgcgcccctctctgccttccccgctgtgcccccgctccctgggctccttgcccttccccactgggcccctagcctcctcgcggcgtcacccgagccccctcctcgatccgcggcccccgctccctccgccctcttccctctctcacttcccacgccccctcttcgcgctcctctctcctccccttgccgcccagcccaggctctggagttgggggagagcccagggctccagtcgctccggaggaggcgtgaatcgcgcagggattgactaatttggggtggggggtgcggtgggcgatggagcagcctgaggacatggcgtcgctgagcgagttcgactccttggcgggcagcatcccggccaccaaggtggagatcaccgtgtcctgcaggaacctcctggacaaagacatgttttccaagtccgacccactgtgcgtcatgtatacccaagggatggagaacaagcagtggcgggagtttgggcgcaccgaagtcatcgacaacacgctcaatcctgacttcgtgcgcaagttcattgtggattactttttcgaggagaagcagaacctccgttttgatctatacgacgttgactctaagagtcctgatttatccaaacacgatttcctgggccaggccttctgcacccttggagagattgtggggtcccctgggagccgcctggaaaagcccctcacgataggcgcattcagcctgaattccaggacgggcaaacccatgccagctgtgtccaacggtggtgtcccaggaaagaaatgtggcaccatcatcctgtccgctgaggagctcagcaactgtagggatgtcgccaccatgcagttctgtgccaacaagctggacaagaaagatttctttgggaaatctgaccccttcttggtattctacagaagcaacgaggatggaacgttcaccatttgccacaagaccgaggtcatgaagaacaccctaaatccagtctggcaaactttctccattcccgtgagagccctctgcaacggcgactacgatcggaccatcaaggtggaggtgtacgactgggatcgggacggcagccatgacttcattggggagttcaccaccagttaccgggagctggcccgtgggcagagccaattcaacatctatgaggtggtaaacccgaaaaagaaaatgaagaaaaagaaatacgtgaattctggcacagtcaccctgctttcctttgctgtggagtcagagtgcaccttccttgactacatcaaaggagggacccagatcaacttcactgtggccattgatttcactgcctccaatgggaacccctcacagtccacatccctgcactacatgagcccctaccagctgaacgcctacgcgctggcgctgactgccgtcggagagatcatccagcactacgacagtgacaagatgttccctgccctgggcttcggggccaagctgcccccggatggcagagtgtcccacgagttcccactgaatggcaaccaggagaacccctcatgctgtggcatcgacggcatcctggaggcctaccaccgcagcctgcgcactgtgcagctgtacggccccaccaactttgcccccgtggtcacccacgtggccaggaatgcagcggccgtgcaggatggctcccagtactcggtgctgctcatcattactgatggggtcatctcggacatggcgcagaccaaggaggccattgtcaacgctgccaagctccccatgtccatcattatcgtcggcgtgggccaggcagagttcgacgccatggtggagctggatggcgacgacgtgcggatctcctcccgggggaagctggctgaacgcgacatcgtccagtttgtacccttccgggactacgtggaccgcacaggcaaccacgtgctgagcatggcccgcctggcccgagacgtgctggcagagatccctgaccaactggtgtcctacatgaaggcacagggcattcgcccgcgtcccccacccgcagcaccaacccactcgccctcgcagtccccagcccgcacgccccctgcgtcccccctgcacacgcacatctgaacctggtctcagcaggcaggtggctggggcctgggagaggccaggtgaatgggaggccagggccccagactccccgaagttggcctgcccggcctttgggacatctgtgtgcctgggaggctgccagggggtggggcttctgaagacccctcctcaatttcttggcctcacttattgcccaaacccagggagttaggggggtacgggtgaaagaggggtacacagggacccagcccttctcttcttccccaatacctggctctaacccagccaggaaggtgtaaacaataagggtgattggggtccctgtcgcccacccccggcaatcctatttgcttacctgtcaccctgaagcctgggcttggcctcctccagccccccatctccgtcccatcctcccatggtgtctactcctgtccctgagccccgccctgtggtctatcctgtgcccgatttccagtgaaccccatgaagctgatgggtttgcaggaaggcctgaacatgtgcaccctcccagggacactggatgcgctgggagccccggggaccccatggggtgctgtaatcatggaccgtaggccatgtgatgggcctgaagtggaggctgctcagcacagagccctttctggtgcctctcgaactcagtacgatgcaagttctagacacacagatggcctgtggaggcctctccctggtgtgggcccacaggtacttccatggttgactcctggcttcaggaatcccttcctccctccagaggcttcccagggccctcggtgcccacgcctctgcccatctggaggcctgagtaaggagtggctcagccccacgttcccacactgctcctgctctttgccctgtatcccatgaggctaggagacaggagtcctgggtttgagccctgcctccccccactgcctaatgtgggaacccaagcaaggcccttctaccttttgggcctcagtttccatgtctgtaccacaagagggttgaccagatggccccaggttttcctttaggtctgacatcctgagggtcattcatcccatgcccagttccccccatcctactcctaacagatgtgaccctacttgaggccgccttggcttttgggtcaccctgtctcatcccatcaccccaaacataccctagtccttcagcctggggctctggcatctgagcccgagctcctgcccctgctgtgggaaaggtggggaagaaggggatctccctcccgggcccacccagctgcccagcctttgcccactcggggagcagatcatgcatgccaatccctgttgccgcatggagctcctcagcccactgacctctccgtgcctggtgcaggccaggcccccgtcttccgcctgcctctgcttccccgtcatgcatggtggtggtgtttctacggtgtctggttctgtgcccgtctctgagacagtctctgtgtggaatttgccttaaactgaagtaaatttggttcttttagt

SEQ ID NO: 122263 - DNA, 2542 bp, Homo sapiens
  Payload ID: 3957
  Gene Symbol: CPNE5
  Gene Name: copine V
  Uniprot ID: Q9HCH3
  ENST ID: ENST00000393189
  CDS Start-End: 147-1052
gaagtagatagcaatactcacccagacagaagagaccacggtaaagatcagctgacggcctctgtgggaacaaagacagggaaaggggaaatgagttcaccagaaaccaacaggcagcacaggaggtggtaaacccgaaaaagaaaatgaagaaaaagaaatacgtgaattctggcacagtcaccctgctttcctttgctgtggagtcagagtgcaccttccttgactacatcaaaggagggacccagatcaacttcactgtggccattgatttcactgcctccaatgggaacccctcacagtccacatccctgcactacatgagcccctaccagctgaacgcctacgcgctggcgctgactgccgtcggagagatcatccagcactacgacagtgacaagatgttccctgccctgggcttcggggccaagctgcccccggatggcagagtgtcccacgagttcccactgaatggcaaccaggagaacccctcatgctgtggcatcgacggcatcctggaggcctaccaccgcagcctgcgcactgtgcagctgtacggccccaccaactttgcccccgtggtcacccacgtggccaggaatgcagcggccgtgcaggatggctcccagtactcggtgctgctcatcattactgatggggtcatctcggacatggcgcagaccaaggaggccattgtcaacgctgccaagctccccatgtccatcattatcgtcggcgtgggccaggcagagttcgacgccatggtggagctggatggcgacgacgtgcggatctcctcccgggggaagctggctgaacgcgacatcgtccagtttgtacccttccgggactacgtggaccgcacaggcaaccacgtgctgagcatggcccgcctggcccgagacgtgctggcagagatccctgaccaactggtgtcctacatgaaggcacagggcattcgcccgcgtcccccacccgcagcaccaacccactcgccctcgcagtccccagcccgcacgccccctgcgtcccccctgcacacgcacatctgaacctggtctcagcaggcaggtggctggggcctgggagaggccaggtgaatgggaggccagggccccagactccccgaagttggcctgcccggcctttgggacatctgtgtgcctgggaggctgccagggggtggggcttctgaagacccctcctcaatttcttggcctcacttattgcccaaacccagggagttaggggggtacgggtgaaagaggggtacacagggacccagcccttctcttcttccccaatacctggctctaacccagccaggaaggtgtaaacaataagggtgattggggtccctgtcgcccacccccggcaatcctatttgcttacctgtcaccctgaagcctgggcttggcctcctccagccccccatctccgtcccatcctcccatggtgtctactcctgtccctgagccccgccctgtggtctatcctgtgcccgatttccagtgaaccccatgaagctgatgggtttgcaggaaggcctgaacatgtgcaccctcccagggacactggatgcgctgggagccccggggaccccatggggtgctgtaatcatggaccgtaggccatgtgatgggcctgaagtggaggctgctcagcacagagccctttctggtgcctctcgaactcagtacgatgcaagttctagacacacagatggcctgtggaggcctctccctggtgtgggcccacaggtacttccatggttgactcctggcttcaggaatcccttcctccctccagaggcttcccagggccctcggtgcccacgcctctgcccatctggaggcctgagtaaggagtggctcagccccacgttcccacactgctcctgctctttgccctgtatcccatgaggctaggagacaggagtcctgggtttgagccctgcctccccccactgcctaatgtgggaacccaagcaaggcccttctaccttttgggcctcagtttccatgtctgtaccacaagagggttgaccagatggccccaggttttcctttaggtctgacatcctgagggtcattcatcccatgcccagttccccccatcctactcctaacagatgtgaccctacttgaggccgccttggcttttgggtcaccctgtctcatcccatcaccccaaacataccctagtccttcagcctggggctctggcatctgagcccgagctcctgcccctgctgtgggaaaggtggggaagaaggggatctccctcccgggcccacccagctgcccagcctttgcccactcggggagcagatcatgcatgccaatccctgttgccgcatggagctcctcagcccactgacctctccgtgcctggtgcaggccaggcccccgtcttccgcctgcctctgcttccccgtcatgcatggtggtggtgtttctacggtgtctggttctgtgcccgtctctgagacagtctctgtgtggaatttgccttaaactgaagtaaatttggttcttttagt

SEQ ID NO: 122264 - DNA, 870 bp, Homo sapiens
  Payload ID: 3957
  Gene Symbol: CPNE5
  Gene Name: copine V
  ENST ID: ENST00000633136
  CDS Start-End: 1-870
gcgggcagcatcccggccaccaaggtggagatcaccgtgtcctgcaggaacctcctggacaaagacatgttttccaagtccgacccactgtgcgtcatgtatacccaagggatggagaacaagcagtggcgggagtttgggcgcaccgaagtcatcgacaacacgctcaatcctgacttcgtgcgcaagttcattgtggattactttttcgaggagaagcagaacctccgttttgatctatacgacgttgactctaagagtcctgatttatccaaacacgatttcctgggccaggccttctgcacccttggagagattgtggggtcccctgggagccgcctggaaaagcccctcacgataggcgcattcagcctgaattccaggacgggcaaacccatgccagctgtgtccaacggaagtggtctttggatggaaagtttgagaaccactggtctggaagcctccggtggtgtcccaggaaagaaatgtggcaccatcatcctgtccgctgaggagctcagcaactgtagggatgtcgccaccatgcagttctgtgccaacaagctggacaagaaagatttctttgggaaatctgaccccttcttggtattctacagaagcaacgaggatggaacgttcaccatttgccacaagaccgaggtcatgaagaacaccctaaatccagtctggcaaactttctccattcccgtgagagccctctgcaacggcgactacgatcggaccatcaaggtggaggtgtacgactgggatcgggacggcagccatgacttcattggggagttcaccaccagttaccgggagctggcccgtgggcagagccaattcaacatctatgaggtggtaaacccg

SEQ ID NO: 122265 - DNA, 745 bp, Homo sapiens
  Payload ID: 3957
  Gene Symbol: CPNE5
  Gene Name: copine V
  ENST ID: ENST00000633280
  CDS Start-End: 68-745
agtcgctccggaggaggcgtgaatcgcgcagggattgactaatttggggtggggggtgcggtgggcgatggagcagcctgaggacatggcgtcgctgagcgagttcgactccttggcgggcagcatcccggccaccaaggtggagatcaccgtgtcctgcaggaacctcctggacaaagacatgttttccaagtccgacccactgtgcgtcatgtatacccaagggatggagaacaagcagtggcgggagtttgggcgcaccgaagtcatcgacaacacgctcaatcctgacttcgtgcgcaagttcattgtggattactttttcgaggagaagcagaacctccgttttgatctatacgacgttgactctaagagtcctgatttatccaaacacgatttcctgggccaggccttctgcacccttggagagattgtggggtcccctgggagccgcctggaaaagcccctcacgataggcgcattcagcctgaattccaggacgggcaaacccatgccagctgtgtccaacggtggtctttggatggaaagtttgagaaccactggtctggaagcctccggtggtgtcccaggaaagaaatgtggcaccatcatcctgtccgctgaggagctcagcaactgtagggatgtcgccaccatgcagttctgtgccaacaagctggacaagaaagatttctttgggaaatctgaccccttcttggtattctacagaagcaacgaggatgga

SEQ ID NO: 122266 - DNA, 2235 bp, Homo sapiens
  Payload ID: 3958
  Gene Symbol: CPNE6
  Gene Name: copine VI (neuronal)
  Uniprot ID: O95741
  ENST ID: ENST00000397016
  CDS Start-End: 312-1985
agtccttcagcagatgccctcatgtgaccaggatatgaggttgggtgtccttaagcaattatgtccatttcctgtgtctccttataaaatggtggctagggaactggacatcattctcaaagctatgacgttcagcaaggtatgtgatggcttttaaggagcacgggaagatcacatcctgctgtattccgggccccataaatagcagcagagccggagctggagccggcgccagcggctggagcagcaagggagtcagggccagggccagagagccggagagaggagcccccgaccgagagcccagtgacatgtcggaccctgagatgggatgggtgcctgagcccccaaccatgacgctgggggcctctcgggtggagctgcgggtgtcctgccatggcctcctggaccgggacacactcaccaaaccccacccctgcgtgctgctcaagctctactctgatgagcagtgggtggaggtagagcgcacagaggtgcttcgctcctgttccagccctgtcttctcccgggtgctggcccttgagtatttttttgaggagaagcagcccctgcagttccacgtgttcgatgccgaggacggagccaccagcccccgaaatgataccttcctcggctctacggagtgcaccttgggccagattgtgtcacaaaccaaggtcactaagccattattgctgaagaatgggaagactgcgggcaagtccaccatcacgatcgtggccgaggaggtatcaggcacaaacgactatgtgcaactcaccttcagagcctacaagctggacaacaaggatctgttcagcaagtctgaccctttcatggaaatctataagaccaacgaggaccaaagtgatcagctggtctggagaactgaggtggtgaagaacaacctgaaccccagctgggagccgttccgcctgtccctgcattccctatgcagctgtgatgttcaccgacctctcaagttcctggtgtatgactatgactccagtgggaagcatgacttcatcggcgagttcaccagcactttccaggagatgcaggaagggacggcaaaccctgggcaggagatgcagtgggactgtatcaaccccaagtatcgggacaagaagaagaattacaagagctcagggacggtagtgctggcccagtgcacggtggagaaggtgcacaccttcctggattacatcatgggtggctgccagatcagcttcacggtggccattgacttcaccgcctccaatggggacccgaggagcagccagtccctgcactgcctcagtccccgacagcccaaccactacctgcaggccctgcgtgcagtgggaggcatctgccaggactatgacagtgataagcggttcccagcttttggctttggggctcgaatcccccccaacttcgaggtgtcccatgactttgctatcaactttgacccggaaaatcctgaatgtgaagagatctcaggggtcatcgcctcctaccgtcgttgcctgccccagatccagctctacggccccaccaatgtggcccccatcatcaaccgtgtggctgagccggcccagcgggagcagagcaccggccaagccacgaagtactcggtgctgctggtgctcactgacggtgtggtgagcgacatggctgagactcgcactgctatcgtgcgtgcctcccgcctgcccatgtccatcatcatcgtaggcgtgggcaatgctgacttctctgacatgcggctgctggatggcgacgacggccccttgcgctgcccccgaggggtgcctgcagcccgagacattgtccagttcgtgcccttccgagacttcaaggatgctgccccctctgcactcgccaagtgtgtcctggctgaggtgccacggcaggtggtggagtactacgccagccagggcatcagccctggggctcccaggccctgcacactggctacgactcccagccctagcccgtgactgcctccctccggaccgacactccctcagcctctcagtgcctgtcctgaccctcgtgactccagtgaccaatgcctccacctcttggaccaggtgtgccccctgggttctggacgtgagtggtgggtcctgctcctatctctccaaaccccatacccttcaatgctgtggcccctcagtgacttccttgggtgatcctgactttctagccattaataaagagaactgctcctagcacctcagcctctaa

SEQ ID NO: 122267 - DNA, 2233 bp, Homo sapiens
  Payload ID: 3958
  Gene Symbol: CPNE6
  Gene Name: copine VI (neuronal)
  Uniprot ID: O95741
  ENST ID: ENST00000537691
  CDS Start-End: 147-1985
agtccttcagcagatgccctcatgtgaccaggatatgaggttgggtgtccttaagcaattatgtccatttcctgtgtctccttataaaatggtggctagggaactggacatcattctcaaagctatgacgttcagcaaggtatgtgatggcttttaaggagcacgggaagatcacatcctgctgtattccgggccccataaatagcagcagagccggagctggagccggcgccagcggctggagcagcaagggagtcagggccagggccagagagccggagagaggagcccccgaccgagagcccagtgacatgtcggaccctgagatgggatgggtgcctgagcccccaaccatgacgctgggggcctctcgggtggagctgcgggtgtcctgccatggcctcctggaccgggacacactcaccaaaccccacccctgcgtgctgctcaagctctactctgatgagcagtgggtggaggtagagcgcacagaggtgcttcgctcctgttccagccctgtcttctcccgggtgctggcccttgagtatttttttgaggagaagcagcccctgcagttccacgtgttcgatgccgaggacggagccaccagcccccgaaatgataccttcctcggctctacggagtgcaccttgggccagattgtgtcacaaaccaaggtcactaagccattattgctgaagaatgggaagactgcgggcaagtccaccatcacgatcgtggccgaggaggtatcaggcacaaacgactatgtgcaactcaccttcagagcctacaagctggacaacaaggatctgttcagcaagtctgaccctttcatggaaatctataagaccaacgaggaccaaagtgatcagctggtctggagaactgaggtggtgaagaacaacctgaaccccagctgggagccgttccgcctgtccctgcattccctatgcagctgtgatgttcaccgacctctcaagttcctggtgtatgactatgactccagtgggaagcatgacttcatcggcgagttcaccagcactttccaggagatgcaggaagggacggcaaaccctgggcaggagatgcagtgggactgtatcaaccccaagtatcgggacaagaagaagaattacaagagctcagggacggtagtgctggcccagtgcacggtggagaaggtgcacaccttcctggattacatcatgggtggctgccagatcagcttcacggtggccattgacttcaccgcctccaatggggacccgaggagcagccagtccctgcactgcctcagtccccgacagcccaaccactacctgcaggccctgcgtgcagtgggaggcatctgccaggactatgacagtgataagcggttcccagcttttggctttggggctcgaatcccccccaacttcgaggtgtcccatgactttgctatcaactttgacccggaaaatcctgaatgtgaagagatctcaggggtcatcgcctcctaccgtcgttgcctgccccagatccagctctacggccccaccaatgtggcccccatcatcaaccgtgtggctgagccggcccagcgggagcagagcaccggccaagccacgaagtactcggtgctgctggtgctcactgacggtgtggtgagcgacatggctgagactcgcactgctatcgtgcgtgcctcccgcctgcccatgtccatcatcatcgtaggcgtgggcaatgctgacttctctgacatgcggctgctggatggcgacgacggccccttgcgctgcccccgaggggtgcctgcagcccgagacattgtccagttcgtgcccttccgagacttcaaggatgctgccccctctgcactcgccaagtgtgtcctggctgaggtgccacggcaggtggtggagtactacgccagccagggcatcagccctggggctcccaggccctgcacactggctacgactcccagccctagcccgtgactgcctccctccggaccgacactccctcagcctctcagtgcctgtcctgaccctcgtgactccagtgaccaatgcctccacctcttggaccaggtgtgccccctgggttctggacgtgagtggtgggtcctgctcctatctctccaaaccccatacccttcaatgctgtggcccctcagtgacttccttgggtgatcctgactttctagccattaataaagagaactgctcctagcacctcagcctct

SEQ ID NO: 122268 - DNA, 570 bp, Homo sapiens
  Payload ID: 3958
  Gene Symbol: CPNE6
  Gene Name: copine VI (neuronal)
  ENST ID: ENST00000559207
  CDS Start-End: 239-570
gcaagggagtcagggccagggccagagagccggagagaggagcccccgaccgagagcccagattgtgtcacaaaccaaggtcactaagccattattgctgaagaatgggaagactgcgggcaagtccaccatcacgatcgtggccgaggaggtatcaggcacaaacgactatgtgcaactcaccttcagagcctacaagctggacaacaaggatctgttcagcaagtctgaccctttcatggaaatctataagaccaacgaggaccaaagtgatcagctggtctggagaactgaggtggtgaagaacaacctgaaccccagctgggagccgttccgcctgtccctgcattccctatgcagctgtgatgttcaccgacctctcaagttcctggtgtatgactatgactccagtgggaagcatgacttcatcggcgagttcaccagcactttccaggagatgcaggaagggacggcaaaccctgggcaggagatgcagtgggactgtatcaaccccaagtatcgggacaagaagaagaattacaagagctcagggacggtagtgctggccca

SEQ ID NO: 122269 - DNA, 573 bp, Homo sapiens
  Payload ID: 3958
  Gene Symbol: CPNE6
  Gene Name: copine VI (neuronal)
  ENST ID: ENST00000559197
  CDS Start-End: 115-573
ataaatagcagcagagccggagctggagccggcgccagcggctggagcagcaagggagtcagggccagggccagagagccggagagaggagcccccgaccgagagcccagtgacatgtcggaccctgagatgggatgggtgcctgagcccccaaccatgacgctgggggcctctcgggtggagctgcgggtgtcctgccatggcctcctggaccgggacacactcaccaaaccccacccctgcgtgctgctcaagctctactctgatgagcagtgggtggaggtgagagcagctcaggtagagcgcacagaggtgcttcgctcctgttccagccctgtcttctcccgggtgctggcccttgagtatttttttgaggagaagcagcccctgcagttccacgtgttcgatgccgaggacggagccaccagcccccgaaatgataccttcctcggctctacggagtgcaccttgggccagattgtgtcacaaaccaaggtcactaagccattattgctgaagaatgggaagactgcgggcaagtccaccatcacgatcgtggccgaggaggtatca

SEQ ID NO: 122270 - DNA, 575 bp, Homo sapiens
  Payload ID: 3958
  Gene Symbol: CPNE6
  Gene Name: copine VI (neuronal)
  ENST ID: ENST00000560884
  CDS Start-End: 97-575
ggagctggagccggcgccagcggctggagcagcaagggagtcagggccagggccagagagccggagagaggagcccccgaccgagagcccagtgacatgtcggaccctgagatgggatgggtgcctgagcccccaaccatgacgctgggggcctctcgggtggagctgcgggtgtcctgccatggcctcctggaccgggacacactcaccaaaccccacccctgcgtgctgctcaagctctactctgatgagcagtgggtggaggtagagcgcacagaggtgcttcgctcctgttccagccctgtcttctcccgggtgctggcccttgagtatttttttgaggagaagcagcccctgcagttccacgtgttcgatgccgaggacggagccaccagcccccgaaatgataccttcctcggctctacggagtgcaccttgggccagattgtgtcacaaaccaaggtcactaagccattattgctgaagaatgggaagactgcgggcaagtccaccatcacggtaggcaagatcacctgtactcacccttggtccagatcgtggccgaggaggtatca

SEQ ID NO: 122271 - DNA, 589 bp, Homo sapiens
  Payload ID: 3958
  Gene Symbol: CPNE6
  Gene Name: copine VI (neuronal)
  ENST ID: ENST00000560828
  CDS Start-End: 115-589
ataaatagcagcagagccggagctggagccggcgccagcggctggagcagcaagggagtcagggccagggccagagagccggagagaggagcccccgaccgagagcccagtgacatgtcggaccctgagatgggatgggtgcctgagcccccaaccatgacgctgggggcctctcgggtggagctgcgggtgtcctgccatggcctcctggaccgggacacactcaccaaaccccacccctgcgtgctgctcaagctctactctgatgagcagtgggtggaggtagagcgcacagaggtgcttcgctcctgttccagccctgtcttctcccgggtgctggcccttgagtatttttttgaggagaagcagcccctgcagttccacgtgttcgatgccgaggacggagccaccagcccccgaaatgataccttcctcggctctacggagtgcaccttgggccagattgtgtcacaaaccaaggtcactaagccattattgctgaagaatgggaagactgcgggcaagtccaccatcacggatctgttcagcaagtctgaccctttcatggaaatctataagaccaacgagg

SEQ ID NO: 122272 - DNA, 590 bp, Homo sapiens
  Payload ID: 3958
  Gene Symbol: CPNE6
  Gene Name: copine VI (neuronal)
  ENST ID: ENST00000558859
  CDS Start-End: 513-590
tccaggccccataaatagcagcagagccggagctggagccggcgccagcggctggagcagcaagggagtcagggccagggccagagagccggagagaggagcccccgaccgagagcccaggtagagcgcacagaggtgcttcgctcctgttccagccctgtcttctcccgggtgctggcccttgagtatttttttgaggagaagcagcccctgcagttccacgtgttcgatgccgaggacggagccaccagcccccgaaatgataccttcctcggctctacggagtgcaccttgggccagattgtgtcacaaaccaaggtcactaagccattattgctgaagaatgggaagactgcgggcaagtccaccatcacggtaggcaagatcacctgtactcacccttggtccagatcgtggccgaggaggtatcaggcacaaacgactatgtgcaactcaccttcagagcctacaagctggacaacaaggatctgttcagcaagtctgaccctttcatggaaatctataagaccaacgaggaccaaagtgatcagctggtctggagaactgaggtggtgaagaacaacctgaac

SEQ ID NO: 122273 - DNA, 964 bp, Homo sapiens
  Payload ID: 3958
  Gene Symbol: CPNE6
  Gene Name: copine VI (neuronal)
  ENST ID: ENST00000558541
  CDS Start-End: 287-964
actgtgtctgtgggggtcctgcctctaagccacccccagcctgccctcctcccccggttctgtggctccctcccaggctgtggccctgccccttccctcttctccctcccaatccatccacgcggggggagctggtgctgcgcccccccccacccctccccatccaggccccataaatagcagcagagccggagctggagccggcgccagcggctggagcagcaagggagtcagggccagggccagagagccggagagaggagcccccgaccgagagcccagtgacatgtcggaccctgagatgggatgggtgcctgagcccccaaccatgacgctgggggcctctcgggtggagctgcgggtgtcctgccatggcctcctggaccgggacacactcaccaaaccccacccctgcgtgctgctcaagctctactctgatgagcagtgggtggaggtagagcgcacagaggtgcttcgctcctgttccagccctgtcttctcccgggtgctggcccttgagtatttttttgaggagaagcagcccctgcagttccacgtgttcgatgccgaggacggagccaccagcccccgaaatgataccttcctcggctctacggagtgcaccttgggccagattgtgtcacaaaccaaggtcactaagccattattgctgaagaatgggaagactgcgggcaagtccaccatcacgatcgtggccgaggaggtatcaggcacaaacgactatgtgcaactcaccttcagagcctacaagctggacaacaaggatctgttcagcaagtctgaccctttcatggaaatctataagaccaacgaggaccaaagtgatcagctggtctggagaactgaggtggtgaagaacaacctgaaccccagctgggagccgttccgcctgtccctgcattccctatgcagctgtgatgttcaccgacctctcaagttcctg

SEQ ID NO: 122274 - DNA, 543 bp, Homo sapiens
  Payload ID: 3958
  Gene Symbol: CPNE6
  Gene Name: copine VI (neuronal)
  ENST ID: ENST00000559778
  CDS Start-End: 227-543
gctgtattccgggttagtttgagtgagtacatgtgtgacaaggacagcccagtgttcctgtatatgtgactgcagatatccttagctagtgtaacaatgttgaaagtgatgtgagaagggcagcagagccggagctggagccggcgccagcggctggagcagcaagggagtcagggccagggccagagagccggagagaggagcccccgaccgagagcccagtgacatgtcggaccctgagatgggatgggtgcctgagcccccaaccatgacgctgggggcctctcgggtggagctgcgggtgtcctgccatggcctcctggaccgggacacactcaccaaaccccacccctgcgtgctgctcaagctctactctgatgagcagtgggtggaggtagagcgcacagaggtgcttcgctcctgttccagccctgtcttctcccgggtgctggcccttgagtatttttttgaggagaagcagcccctgcagttccacgtgttcgatgccgaggacggagccaccagcccccgaaatgatacctt

SEQ ID NO: 122275 - DNA, 657 bp, Homo sapiens
  Payload ID: 3958
  Gene Symbol: CPNE6
  Gene Name: copine VI (neuronal)
  ENST ID: ENST00000560761
  CDS Start-End: 211-657
agatatccttagctagtgtaacaatgttgaaagtgatgtgagaaggggccccataaatagcagcagagccggagctggagccggcgccagcggctggagcagcaagggagtcagggccagggccagagagccggagagaggagcccccgaccgagagcccaggtgttccctttccagagtccaggccacctgctctgtccccacagtgacatgtcggaccctgagatgggatgggtgcctgagcccccaaccatgacgctgggggcctctcgggtggagctgcgggtgtcctgccatggcctcctggaccgggacacactcaccaaaccccacccctgcgtgctgctcaagctctactctgatgagcagtgggtggaggtagagcgcacagaggtgcttcgctcctgttccagccctgtcttctcccgggtgctggcccttgagtatttttttgaggagaagcagcccctgcagttccacgtgttcgatgccgaggacggagccaccagcccccgaaatgataccttcctcggctctacggagtgcaccttgggccagattgtgtcacaaaccaaggtcactaagccattattgctgaagaatgggaagactgcgggcaagtccaccatcacgatcgtggccgaggaggtatcaggc

SEQ ID NO: 122276 - DNA, 591 bp, Homo sapiens
  Payload ID: 3958
  Gene Symbol: CPNE6
  Gene Name: copine VI (neuronal)
  ENST ID: ENST00000558450
  CDS Start-End: 199-591
atgtccatttcctgtgtctccttataaaatggtggctagggaactggacatcattctcaaagctatgacgttcagcaaggccccataaatagcagcagagccggagctggagccggcgccagcggctggagcagcaagggagtcagggccagggccagagagccggagagaggagcccccgaccgagagcccagtgacatgtcggaccctgagatgggatgggtgcctgagcccccaaccatgacgctgggggcctctcgggtggagctgcgggtgtcctgccatggcctcctggaccgggacacactcaccaaaccccacccctgcgtgctgctcaagctctactctgatgagcagtgggtggaggtagagcgcacagaggtgcttcgctcctgttccagccctgtcttctcccgggtgctggcccttgagtatttttttgaggagaagcagcccctgcagttccacgtgttcgatgccgaggacggagccaccagcccccgaaatgataccttcctcggctctacggagtgcaccttgggccagattgtgtcacaaaccaaggtcactaagccattattgctgaagaat

SEQ ID NO: 122277 - DNA, 453 bp, Homo sapiens
  Payload ID: 3958
  Gene Symbol: CPNE6
  Gene Name: copine VI (neuronal)
  ENST ID: ENST00000557889
  CDS Start-End: 296-453
cagtgagtttatgtactggcgcctgtgtgtgtcaagatatgtgtgagcctgtgagtcgtgggtgcatgtgtcgccatcatttctctgtttgaatgtgtatgtgcatgccactgcaatgtgcgcatctctgcgattctgggtgtgggtgtagtgtgaaggggaagatgtgtgtcactgtgtctgtgggggtcctgcctctaagccacccccagcctgccctcctcccccggttctgtggctccctcccagggccagagagccggagagaggagcccccgaccgagagcccagtgacatgtcggaccctgagatgggatgggtgcctgagcccccaaccatgacgctgggggcctctcgggtggagctgcgggtgtcctgccatggcctcctggaccgggacacactcaccaaaccccacccctgcgtgctgctcaagctctactctgatgagca

SEQ ID NO: 122278 - DNA, 1226 bp, Homo sapiens
  Payload ID: 3958
  Gene Symbol: CPNE6
  Gene Name: copine VI (neuronal)
  ENST ID: ENST00000558795
  CDS Start-End: 85-282
ggcgccagcggctggagcagcaagggagtcagggccagggccagagagccggagagaggagcccccgaccgagagcccagtgacatgtcggaccctgagatgggatgggtgcctgagcccccaaccatgacgctgggggcctctcgggtggagctgcgggtgtcctgccatggcctcctggaccgggacacactcaccaaaccccacccctgcgtgctgctcaagctctactctgatgagcagtgggtggagccctgtcttctcccgggtgctggcccttgagtatttttttgaggagaagcagcccctgcagttccacgtgttcgatgccgaggacggagccaccagcccccgaaatgataccttcctcggctctacggagtgcaccttgggccagattgtgtcacaaaccaaggtcactaagccattattgctgaagaatgggaagactgcgggcaagtccaccatcacggtaggcaagatcacctgtactcacccttggtccaggtattcaatgcccctgcatggacacctatggtgacatcatgcccaggaccacccccacctaagggaaaggggatggggtggcccttgtggtaaggttaggggagtcctgccacttgtatcccccttgcagatcgtggccgaggaggtatcaggcacaaacgactatgtgcaactcaccttcagagcctacaagctggacaacaaggatctgttcagcaagtctgaccctttcatggaaatctataagaccaacgaggaccaaagtgatcagctggtctggagaactgaggtggtgaagaacaacctgaaccccagctgggagccgttccgcctgtccctgcattccctatgcagctgtgatgttcaccgacctctcaagttcctggtgtatgactatgactccagtgggaagcatgacttcatcggcgagttcaccagcactttccaggagatgcaggaagggacggcaaaccctgggcaggaggtgccacaaataccccacccccagaatcccacccagatccctgggagaatcctgagggtgatgctgaagagaccaccataggtgataggaagtggagagggtggaaagcacctgggctcagctgaaggacggaaccatgggggtcttgctctgggaggctctgctggaagggagaaagaggggtcacctgatggacttgtgaccctgagcttgtggggtggggtctagatgcagt

SEQ ID NO: 122279 - DNA, 733 bp, Homo sapiens
  Payload ID: 3958
  Gene Symbol: CPNE6
  Gene Name: copine VI (neuronal)
  ENST ID: ENST00000560356
  CDS Start-End: 311-733
agatgccctcatgtgaccaggatatgaggttgggtgtccttaagcaattatgtccatttcctgtgtctccttataaaatggtggctagggaactggacatcattctcaaagctatgacgttcagcaaggtatgtgatggcttttaaggagcacgggaagatcacatcctgctgtattccgggttagtttgagccccataaatagcagcagagccggagctggagccggcgccagcggctggagcagcaagggagtcagggccagggccagagagccggagagaggagcccccgaccgagagcccagtgacatgtcggaccctgagatgggatgggtgcctgagcccccaaccatgacgctgggggcctctcgggtggagctgcgggtgtcctgccatggcctcctggaccgggacacactcaccaaaccccacccctgcgtgctgctcaagctctactctgatgagcagtgggtggaggtagagcgcacagaggtgcttcgctcctgttccagccctgtcttctcccgggtgctggcccttgagtatttttttgaggagaagcagcccctgcagttccacgtgttcgatgccgaggacggagccaccagcccccgaaatgataccttcctcggctctacggagtgcaccttgggccagattgtgtcacaaaccaaggtcactaagccattattgctgaagaatgggaagactgcgggcaagtccaccatcacg

SEQ ID NO: 122280 - DNA, 2657 bp, Homo sapiens
  Payload ID: 3959
  Gene Symbol: CPNE7
  Gene Name: copine VII
  Uniprot ID: Q9UBL6
  ENST ID: ENST00000268720
  CDS Start-End: 131-2032
gcgcccggcaggcgttcagggaagcgcggccacgcctgggccggccaccatttcccgggcgccgcggcggcgccgactcgcgggcagcggcccctcagtgcgcccagccgggcccccgaacgccgggagcatgagcgcgggctcggagcgcggggcggcggcaacccccgggggtttgcccgcgccctgcgcctcgaaggtggagctgcggctcagctgccggcacctgctggaccgcgacccgctcaccaagtccgaccccagcgtggcgttgctgcagcaggcgcagggccagtgggtgcaggtgggcagaaccgaggtggtccggagcagcctgcatcccgtgttctccaaggtcttcacggtggactactacttcgaggaggtgcagaggctgcgctttgaggtgtacgacacgcatgggcccagcggcttcagctgtcaggaggacgatttcctggggggcatggagtgcaccctggggcagccagcccaaaagtggcttctgcaagtcgtgatgagagtgtctgttgatgtgctgggccctgctggacactgcgctaagcacttcctgtgctgcacggaatcctcacaccttgccaggacgggtccttcttttttattgaggtatgatgacctctgcctcccctgggcgactgctggcgccgtgaggtggtggacgtgcaggggtggccacacgcagggatggcagattgtggcccagaagaaggtgacccgcccgctgctgctcaagtttggcaggaacgctggcaagtccaccatcacggtgatcgccgaggacatctcggggaacaacggctacgtggagctctccttccgggccaggaagctggacgacaaggacctcttcagcaagtccgaccccttcctggagctctacagggtcaacgacgaccagggcttgcagctggtgtacaggacggaggtggtgaagaacaacctgaacccggtgtgggaggccttcaaagtctctctgagttccctctgcagctgcgaggagacaaggcctctaaagtgcctggtctgggattacgactctcgaggaaagcacgacttcatcggagaattctctaccaccttcgaggagatgcagaaggcctttgaggaggggcaggcccagtgggactgtgtgaaccccaaatacaagcagaagagacgcagttataagaactcaggagtggtcgtcctggctgacctcaagttccacagggtgtactccttcctggactatatcatgggcggctgccagatccacttcaccgtggccattgacttcaccgcctccaatggagacccgcggaacagctgctccctgcactacatcaacccctaccagccgaacgagtacctgaaggcactggtgtccgtgggcgagatctgccaggactatgacagtgacaagaggttttccgctttggggtttggagcccggatccctcccaagtatgaggtgtcccatgactttgccatcaatttcaaccctgaggacgatgagtgtgaaggcatccagggcgtggtggaggcctaccagaactgcctgcccagggtccagctctacggccccaccaacgtggcgcccatcatctccaaggtggcacgcgtggcggcggccgaggagagcaccgggaaagcctctcaatactacatcctgctgatcctgacggacggcgtggtgaccgacatggccgacacacgggaggccattgtgcgtgcctcacgcctgcccatgtccatcatcatcgtgggcgtgggcaacgccgacttcaccgacatgcaggtcctggacggcgacgacggcgtcctgcgctccccacggggtgagcccgcgctccgggacatcgtacagttcgtgcccttccgggagctcaagaacgcatcccctgcggcgctggccaagtgcgtgctggccgaggtcccgaagcaggtggtggagtactacagccacagaggcctgcccccgagaagcctgggtgtccctgccggagaggccagcccaggctgcacaccgtgaagatgtggagggcgtagggtgggggcagtgaggaatgggtccgtacagcctctgtctgcaacatgcttggggtcccttaagctccctccgacctcccagaagcctccagtccccaccaggccccactcccagtcctcctgggatcctgctggcttgggcccggctctggggcccccaaggccgaagggtgacaaaatacaggcccccatgcctggccctgcctgagccaggtgggtggagggagggagatcatgagggacttggagggagctgggagttcatccacgggagaccctgccccgatgagaaggggcagggactgggggctctgctttgcgtctaacctttgtgggggagggccagcaaggcagtccccccacgcccgagaaagcctgggggacccagacacctgtccccacagtcaaagcctggggacccagacatcctgtccccacagtcagcctcctgtccctgctggtgcccccacacccacctaccctgtgctttttgccgtcgggcctctgcacctgggtccatggggtctgcggggtctgcggggtctgcctggcctgtgggttctgccggtggggcttcaggagtaataaagtgtcaccctatccttgta

SEQ ID NO: 122281 - DNA, 2409 bp, Homo sapiens
  Payload ID: 3959
  Gene Symbol: CPNE7
  Gene Name: copine VII
  Uniprot ID: Q9UBL6
  ENST ID: ENST00000319518
  CDS Start-End: 108-1784
gcgcggccacgcctgggccggccaccatttcccgggcgccgcggcggcgccgactcgcgggcagcggcccctcagtgcgcccagccgggcccccgaacgccgggagcatgagcgcgggctcggagcgcggggcggcggcaacccccgggggtttgcccgcgccctgcgcctcgaaggtggagctgcggctcagctgccggcacctgctggaccgcgacccgctcaccaagtccgaccccagcgtggcgttgctgcagcaggcgcagggccagtgggtgcaggtgggcagaaccgaggtggtccggagcagcctgcatcccgtgttctccaaggtcttcacggtggactactacttcgaggaggtgcagaggctgcgctttgaggtgtacgacacgcatgggcccagcggcttcagctgtcaggaggacgatttcctggggggcatggagtgcaccctggggcagattgtggcccagaagaaggtgacccgcccgctgctgctcaagtttggcaggaacgctggcaagtccaccatcacggtgatcgccgaggacatctcggggaacaacggctacgtggagctctccttccgggccaggaagctggacgacaaggacctcttcagcaagtccgaccccttcctggagctctacagggtcaacgacgaccagggcttgcagctggtgtacaggacggaggtggtgaagaacaacctgaacccggtgtgggaggccttcaaagtctctctgagttccctctgcagctgcgaggagacaaggcctctaaagtgcctggtctgggattacgactctcgaggaaagcacgacttcatcggagaattctctaccaccttcgaggagatgcagaaggcctttgaggaggggcaggcccagtgggactgtgtgaaccccaaatacaagcagaagagacgcagttataagaactcaggagtggtcgtcctggctgacctcaagttccacagggtgtactccttcctggactatatcatgggcggctgccagatccacttcaccgtggccattgacttcaccgcctccaatggagacccgcggaacagctgctccctgcactacatcaacccctaccagccgaacgagtacctgaaggcactggtgtccgtgggcgagatctgccaggactatgacagtgacaagaggttttccgctttggggtttggagcccggatccctcccaagtatgaggtgtcccatgactttgccatcaatttcaaccctgaggacgatgagtgtgaaggcatccagggcgtggtggaggcctaccagaactgcctgcccagggtccagctctacggccccaccaacgtggcgcccatcatctccaaggtggcacgcgtggcggcggccgaggagagcaccgggaaagcctctcaatactacatcctgctgatcctgacggacggcgtggtgaccgacatggccgacacacgggaggccattgtgcgtgcctcacgcctgcccatgtccatcatcatcgtgggcgtgggcaacgccgacttcaccgacatgcaggtcctggacggcgacgacggcgtcctgcgctccccacggggtgagcccgcgctccgggacatcgtacagttcgtgcccttccgggagctcaagaacgcatcccctgcggcgctggccaagtgcgtgctggccgaggtcccgaagcaggtggtggagtactacagccacagaggcctgcccccgagaagcctgggtgtccctgccggagaggccagcccaggctgcacaccgtgaagatgtggagggcgtagggtgggggcagtgaggaatgggtccgtacagcctctgtctgcaacatgcttggggtcccttaagctccctccgacctcccagaagcctccagtccccaccaggccccactcccagtcctcctgggatcctgctggcttgggcccggctctggggcccccaaggccgaagggtgacaaaatacaggcccccatgcctggccctgcctgagccaggtgggtggagggagggagatcatgagggacttggagggagctgggagttcatccacgggagaccctgccccgatgagaaggggcagggactgggggctctgctttgcgtctaacctttgtgggggagggccagcaaggcagtccccccacgcccgagaaagcctgggggacccagacacctgtccccacagtcaaagcctggggacccagacatcctgtccccacagtcagcctcctgtccctgctggtgcccccacacccacctaccctgtgctttttgccgtcgggcctctgcacctgggtccatggggtctgcggggtctgcggggtctgcctggcctgtgggttctgccggtggggcttcaggagtaataaagtgtcaccctatccttgta

SEQ ID NO: 122282 - DNA, 576 bp, Homo sapiens
  Payload ID: 3959
  Gene Symbol: CPNE7
  Gene Name: copine VII
  ENST ID: ENST00000525982
  CDS Start-End: 117-479
ttcagggaagcgcggccacgcctgggccggccaccatttcccgggcgccgcggcggcgccgactcgcgggcagcggcccctcagtgcgcccagccgggcccccgaacgccgggagcatgagcgcgggctcggagcgcggggcggcggcaacccccgggggtttgcccgcgccctgcgcctcgaaggtggagctgcggctcagctgccggcacctgctggaccgcgacccgctcaccaagtccgaccccagcgtggcgttgctgcagcaggcgcagggccagtgggtgcaggtgggcagaaccgaggtggtccggagcagcctgcatcccgtgttctccaaggtcttcacggtggactactacttcgaggaggtgcagaggctgcgctttgaggtgtacgacacgcatgggcccagcggcttcagctgtcaggaggacgatttcctggggggcatggagtgcaccctggggcaggtatgatgacctctgcctcccctgggcgactgctggcgccgtgaggtggtggacgtgcaggggtggccacacgcagggatggcagattgtggcccagaagaag

SEQ ID NO: 122283 - DNA, 488 bp, Homo sapiens
  Payload ID: 3959
  Gene Symbol: CPNE7
  Gene Name: copine VII
  ENST ID: ENST00000526232
  CDS Start-End: 1-277
gttcgtgcccttccgggagctcaagaaccagagaacagcacaaggggctcctgggatccaccacgcggcttcccccgttgctgccaacctctgcgacccggcgagacacgcacagcacacacgcatcccctgcggcgctggccaagtgcgtgctggccgaggtcccgaagcaggtggtggagtactacagccacagaggcctgcccccgagaagcctgggtgtccctgccggagaggccagcccaggctgcacaccgtgaagatgtggagggcgtagggtgggggcagtgaggaatgggtccgtacagcctctgtctgcaacatgcttggggtcccttaagctccctccgacctcccagaagcctccagtccccaccaggccccactcccagtcctcctgggatcctgctggcttgggcccggctctggggcccccaaggccgaagggtgacaaaatacaggcccccatgcctggccctgcctgagcc

SEQ ID NO: 122284 - DNA, 519 bp, Homo sapiens
  Payload ID: 3959
  Gene Symbol: CPNE7
  Gene Name: copine VII
  ENST ID: ENST00000529800
  CDS Start-End: 1-519
ttccacagggtgtactccttcctggactatatcatgggcggctgccagatccacttcaccacaaaacgtgaacgaggagaaactggagtggccattgacttcaccgcctccaatggagacccgcggaacagctgctccctgcactacatcaacccctaccagccgaacgagtacctgaaggcactggtgtccgtgggcgagatctgccaggactatgacagtgacaagaggttttccgctttggggtttggagcccggatccctcccaagtatgaggtgtcccatgactttgccatcaatttcaaccctgaggacgatgagtgtgaaggcatccagggcgtggtggaggcctaccagaactgcctgcccagggtccagctctacggccccaccaacgtggcgcccatcatctccaaggtggcacgcgtggcggcggccgaggagagcaccgggaaagcctctcaatactacatcctgctgatcctgacggacggcgtggtgaccgacatggccgacaca

SEQ ID NO: 122285 - DNA, 682 bp, Homo sapiens
  Payload ID: 3959
  Gene Symbol: CPNE7
  Gene Name: copine VII
  ENST ID: ENST00000568977
  CDS Start-End: 1-297
gacagtgacaagaggttttccgctttggggtttggagcccggatccctcccaagtatgaggtgtcccatgactttgccatcaatttcaaccctgaggacgatgagtgtgaagcaatactacatcctgctgatcctgacggacggcgtggtgaccgacatggccgacacacgggaggccattgtgcgtgcctcacgcctgcccatgtccatcatcatcgtgggcgtgggcaacgccgacttcaccgacatgcaggtcctggacggcgacgacggcgtcctgcgctccccacggggtgagcccgcgctccgggacatcgtacagttcgtgcccttccgggagctcaagaacgcatcccctgcggcgctggccaagtgcgtgctggccgaggtcccgaagcaggtggtggagtactacagccacagaggcctgcccccgagaagcctgggtgtccctgccggagaggccagcccaggctgcacaccgtgaagatgtggagggcgtagggtgggggcagtgaggaatgggtccgtacagcctctgtctgcaacatgcttggggtcccttaagctccctccgacctcccagaagcctccagtccccaccaggccccactcccagtcctcctgggatcctgctggcttgggcccggctctggggcccccaaggccgaagggtgacaaa

SEQ ID NO: 122286 - DNA, 3489 bp, Homo sapiens
  Payload ID: 3960
  Gene Symbol: CPNE8
  Gene Name: copine VIII
  Uniprot ID: Q86YQ8
  ENST ID: ENST00000331366
  CDS Start-End: 98-1792
accctcaacccccatccccgcctgacgggagctagccctcagtccgcccgagctgtggttgtgggcgccggacaagtccaaggcgcctcctcccaatatggacagccgctacaacagcactgcgggcatcggggacttgaaccagctgagcgctgccatcccggccacgcgggtggaggtgtccgtgtcctgcagaaatcttcttgacagagacacattttctaaatctgatccaatttgtgtcttatatgtacaaggagttggaaataaagaatggagagagtttggaagaactgaagtaattgataatactttaaatcctgattttgtaagaaagtttattctggactacttttttgaagaaagagagaatcttcgttttgacttgtatgatgttgattcaaagagccccaacttatccaaacatgactttctgggacaagtgttttgtacattgggagagatcgttggttcacagggaagtcgcctggaaaaaccaatagtaggaattccagggaagaaatgtggtacaatcatacttacagcagaggaattaaactgttgcagggatgccgttttgatgcaattttgtgcgaacaaattggacaagaaggacttctttggaaaatcagatcctttccttgtattttatcgaagtaatgaagatggcagttttacaatttgtcacaagacagaagttgtcaaaaacactctaaatccagtatggcaagcattcaagatctcagtcagagcattatgtaatggagactatgacagaacaatcaaagtagaggtgtatgactgggaccgagatggaagtcatgatttcattggagaatttacaacaagctatagggaactttctagagggcagtcacaattcaacgtatatgaggtggtgaatcccaaaaagaaaggaaaaaagaaaaaatatactaattctggaacagtaactttactctctttcttggtagaaacagaagtttcattccttgactacattaagggagggacgcaaatcaatttcacagtggctattgattttacagcatcaaacggcaaccctgctcagcccacttccctccactacatgaatccttaccaactgaatgcctatggtatggcactaaaagcagtgggagaaattgttcaagattatgacagtgataaaatgtttccagctctaggatttggtgcaaaactgcctccagatggaaggatatctcacgaatttgctttgaatgggaatcctcaaaacccctactgtgatggcattgagggggtcatggaggcttattacaggagtctgaaatctgtacaactatatgggcccaccaactttgctcctgtaattaatcatgtagcaagatatgcttcttctgtaaaggatggctcccagtattttgtgcttctgattgttacagatggtgttatctcagatatggcccagactaaggagtccatagttaatgcctcaaaacttccaatgtcaataattatagtaggtgttggaccagcagaatttgatgcaatggtcgaattggatggagatgatgtaagagtctcctctagaggaaaatatgctgaaagagacattgtgcagtttgtgccattcagggattatattgacagaagtggaaaccacatactgagcatggctagattggctaaagatgtcctagctgagatccctgagcagtttctctcctatatgagagcccgaggaatcaagccatcacctgcgcctcccccatacaccccacctacacatgtgttacagactcaaatatgactgtgctctgaaatgctaatgtcaactacaaatcaaaagtgctgagttaatgctttgtgcctggtgctctgtaatgaaccaggcaatgagatagttttctcagtttggtttcagcagttaatgtgctttcttggatccaaatttaaatatcttcctaaaccaaaactgtaaatatggttgttgcatgagcaacagaaaaaattgtttaaatgcttgaagcaaagtatggatgtcttctctaaatctttctttctttttttttttaacagaaacagctaatttccaatgtattgttgggaaaaagcacaaactgtgtttttaactcaaatattgtcttcgactgctatgtgtataggaaagcagtctctgtatcaatgtttacatgttactactttttaaatttcaatacttttataactgttcttaaaaataagagttttaaatactgaatcctttgtcttctaaattgcaatagctataatcacaagagcaatatctctttgaatgactgtctggacaaacacaattgcaaataagggaagggaaaaatgcttttctatttttcagtaactggattgtcttaagaaactacatctgcttaataaacaatttctcagcaatgtttgctgggtatgggagtttaagcccggcagatgtgtctcctggttgaacatgcatttttcatggagtttgggttctaaatttagactgcagttggtttgtattttgtaacactaagtagaaattataaaaagtcaaacattgtgatctataaatgcacagaaaatactttgtaaaaagtagcatccttatataataatgctatttagaaagactgaaaccaagactatttaactgtgaactatgtagcagatgttttaaactttttattccattatatcttgtctagatattttaattcaaagggatactggctctcttgatcggaatttcttgttatcaccattccacgttgccacacaaggtgcacaggctggaagtcttttgtgaaattcccagttaaatatatacaactatgtgacttagtgcacaacacatttgtgaaataacctactcctatatactgacctgcctgtccacgaataattgtaaagggtttttgcatgtacagtttttacaagaattacagttttgtgaagttgtgtctaaattaaagcatttctttagaacaaatggccttaaattctcacggaattcctggaaatgattgtgaattgccttcaaataatagaaaagtgtatttatttgtgtgtgtgtgtgtgtcaaaaatgtaactgctttataatattttttccttacctatatattctatttaatacttggtttatttctactgtacattgttttctttgtcccaagttgacctagggtgacttttataagcatgaaactattttactggaaagaaaaatatatacatccacatatctaacagtatcaatgttatataactatgtaataattgttgatttttaattatgtattaaaatctttaaatcataactatttgctttgtacgtttcatgtatgaatgacaatagtttgatgatttcctttactgatcttaaatatttatgccactacagtgtattacctacagatttttaaatttagctttatttatcaacccaaaaaacaaataaataagatcaatattcttttcttcttgtcaaaca

SEQ ID NO: 122287 - DNA, 1757 bp, Homo sapiens
  Payload ID: 3960
  Gene Symbol: CPNE8
  Gene Name: copine VIII
  ENST ID: ENST00000360449
  CDS Start-End: 51-1709
ggtgatggcttcacagggagatacatgagtcaacatttatcgaatgatggatgcactttaagtgcagttcattatatatgttatacctcactgaagtggaaacaaattggataaatcttcttgacagagacacattttctaaatctgatccaatttgtgtcttatatgtacaaggagttggaaataaagaatggagagagtttggaagaactgaagtaattgataatactttaaatcctgattttgtaagaaagtttattctggactacttttttgaagaaagagagaatcttcgttttgacttgtatgatgttgattcaaagagccccaacttatccaaacatgactttctgggacaagtgttttgtacattgggagagatcgttggttcacagggaagtcgcctggaaaaaccaatagtaggaattccagggaagaaatgtggtacaatcatacttacagcagaggaattaaactgttgcagggatgccgttttgatgcaattttgtgcgaacaaattggacaagaaggacttctttggaaaatcagatcctttccttgtattttatcgaagtaatgaagatggcagttttacaatttgtcacaagacagaagttgtcaaaaacactctaaatccagtatggcaagcattcaagatctcagtcagagcattatgtaatggagactatgacagaacaatcaaagtagaggtgtatgactgggaccgagatggaagtcatgatttcattggagaatttacaacaagctatagggaactttctagagggcagtcacaattcaacgtatatgaggtggtgaatcccaaaaagaaaggaaaaaagaaaaaatatactaattctggaacagtaactttactctctttcttggtagaaacagaagtttcattccttgactacattaagggagggacgcaaatcaatttcacagtggctattgattttacagcatcaaacggcaaccctgctcagcccacttccctccactacatgaatccttaccaactgaatgcctatggtatggcactaaaagcagtgggagaaattgttcaagattatgacagtgataaaatgtttccagctctaggatttggtgcaaaactgcctccagatggaaggatatctcacgaatttgctttgaatgggaatcctcaaaacccctactgtgatggcattgagggggtcatggaggcttattacaggagtctgaaatctgtacaactatatgggcccaccaactttgctcctgtaattaatcatgtagcaagatatgcttcttctgtaaaggatggctcccagtattttgtgcttctgattgttacagatggtgttatctcagatatggcccagactaaggagtccatagttaatgcctcaaaacttccaatgtcaataattatagtaggtgttggaccagcagaatttgatgcaatggtcgaattggatggagatgatgtaagagtctcctctagaggaaaatatgctgaaagagacattgtgcagtttgtgccattcagggattatattgacagaagtggaaaccacatactgagcatggctagattggctaaagatgtcctagctgagatccctgagcagtttctctcctatatgagagcccgaggaatcaagccatcacctgcgcctcccccatacaccccacctacacatgtgttacagactcaaatatgactgtgctctgaaatgctaatgtcaactacaaatcaaaagtgctgagtt

SEQ ID NO: 122288 - DNA, 2875 bp, Homo sapiens
  Payload ID: 3960
  Gene Symbol: CPNE8
  Gene Name: copine VIII
  Uniprot ID: Q86YQ8
  ENST ID: ENST00000538596
  CDS Start-End: 650-1351
aaagtgctcagcagaaaggaggccctagagtgggtagctcctttctgctgctggtcaaccccatccttaccaggcatccatcccatcggcccaggaatctgtctgcctcctgctgctcttcttggcacctgggctcagcactgactttgctccaagattagagcggaagccaacagcagggagaagccaggcagtgggagtaggcacttctgagcctgtgagggcaggagctcttcctgggcccccaagggtacagggatgcctgagcttgcagctgtggtttgggcaactgcagctgtgtggggaaatgcgagggggcagctcctgcctgctccatggagcaggagtggcctgggaggtctgagtctgtagccgtggcttggatgactgcagtgcacctggggagctcctaccccaactcggaaaaggcagagctcccacttgtccctggctcccacacgctccccggagcatgcagccccggctgtgcctccttgctgcagccagcgtgatggcagcgtaaggctgtctggagcagctgctgccatcaatagttgataaagaaataaggacgcaaatcaatttcacagtggctattgattttacagcatcaaacggcaaccctgctcagcccacttccctccactacatgaatccttaccaactgaatgcctatggtatggcactaaaagcagtgggagaaattgttcaagattatgacagtgataaaatgtttccagctctaggatttggtgcaaaactgcctccagatggaaggatatctcacgaatttgctttgaatgggaatcctcaaaacccctactgtgatggcattgagggggtcatggaggcttattacaggagtctgaaatctgtacaactatatgggcccaccaactttgctcctgtaattaatcatgtagcaagatatgcttcttctgtaaaggatggctcccagtattttgtgcttctgattgttacagatggtgttatctcagatatggcccagactaaggagtccatagttaatgcctcaaaacttccaatgtcaataattatagtaggtgttggaccagcagaatttgatgcaatggtcgaattggatggagatgatgtaagagtctcctctagaggaaaatatgctgaaagagacattgtgcagtttgtgccattcagggattatattgacagaagtggaaaccacatactgagcatggctagattggctaaagatgtcctagctgagatccctgagcagtttctctcctatatgagagcccgaggaatcaagccatcacctgcgcctcccccatacaccccacctacacatgtgttacagactcaaatatgactgtgctctgaaatgctaatgtcaactacaaatcaaaagtgctgagttaatgctttgtgcctggtgctctgtaatgaaccaggcaatgagatagttttctcagtttggtttcagcagttaatgtgctttcttggatccaaatttaaatatcttcctaaaccaaaactgtaaatatggttgttgcatgagcaacagaaaaaattgtttaaatgcttgaagcaaagtatggatgtcttctctaaatctttctttctttttttttttaacagaaacagctaatttccaatgtattgttgggaaaaagcacaaactgtgtttttaactcaaatattgtcttcgactgctatgtgtataggaaagcagtctctgtatcaatgtttacatgttactactttttaaatttcaatacttttataactgttcttaaaaataagagttttaaatactgaatcctttgtcttctaaattgcaatagctataatcacaagagcaatatctctttgaatgactgtctggacaaacacaattgcaaataagggaagggaaaaatgcttttctatttttcagtaactggattgtcttaagaaactacatctgcttaataaacaatttctcagcaatgtttgctgggtatgggagtttaagcccggcagatgtgtctcctggttgaacatgcatttttcatggagtttgggttctaaatttagactgcagttggtttgtattttgtaacactaagtagaaattataaaaagtcaaacattgtgatctataaatgcacagaaaatactttgtaaaaagtagcatccttatataataatgctatttagaaagactgaaaccaagactatttaactgtgaactatgtagcagatgttttaaactttttattccattatatcttgtctagatattttaattcaaagggatactggctctcttgatcggaatttcttgttatcaccattccacgttgccacacaaggtgcacaggctggaagtcttttgtgaaattcccagttaaatatatacaactatgtgacttagtgcacaacacatttgtgaaataacctactcctatatactgacctgcctgtccacgaataattgtaaagggtttttgcatgtacagtttttacaagaattacagttttgtgaagttgtgtctaaattaaagcatttctttagaacaaatggccttaaattctcacggaattcctggaaatgattgtgaattgccttcaaataatagaaaagtgtatttatttgtgtgtgtgtgtgtgtcaaaaatgtaactgctttataatattttttccttacctatatattctatttaatacttggtttatttctactgtacattgttttctttgtcccaagttgacctagggtgacttttataagcatgaaactattttactggaaagaaaaatatatacatccacatatctaacagtatcaatgttatataactatgtaataattgttgatttttaattatgtattaaaatctttaaatcataa

SEQ ID NO: 122289 - DNA, 549 bp, Homo sapiens
  Payload ID: 3960
  Gene Symbol: CPNE8
  Gene Name: copine VIII
  ENST ID: ENST00000550863
  CDS Start-End: 514-549
cacaatgccccaccgtccccaactctcaagtggccgacagtgggcagtccagaagctgggaccagactcatctgcccgagggcacagtaggagggacggagggatctcccaagagctccgagggcgagaaatcttcttgacagagacacattttctaaatctgatccaatttgtgtcttatatgtacaaggagttggaaataaagaatggagagagtttggaagaactgaagtaattgataatactttaaatcctgattttgtaagaaagtttattctggactacttttttgaagaaagagagaatcttcgttttgacttgtatgatgttgattcaaagagccccaacttatccaaacatgactttctgggacaagtgttttgtacattgggagagatcgttggttcacagggaagtcgcctggaaaaaccaatagtaggaattccagggaagaaatgtggtacaatcatacttacagcagaggaattaaactgttgcagggatgccgttttgatgcaattttgtgcgaacaaattggacaagaaggac

SEQ ID NO: 122290 - DNA, 942 bp, Homo sapiens
  Payload ID: 3961
  Gene Symbol: CCS
  Gene Name: copper chaperone for superoxide dismutase
  ENST ID: ENST00000310190
  CDS Start-End: 111-878
ggggtggtgactgggtccagaatggcttcggattcggggaaccaggggaccctctgcacgcgatcatcggttggtccctgccgcccttgcagttggagttcgcggtgcagatgacctgtcagagctgtgtggacgcggtgcgcaaatccctgcaaggggtggcaggtgtccaggatgtggaggtgcacttggaggaccagatggtcttggtacacaccactctacccagccaggaggtgcaggctctcctggaaggcacggggcggcaggcggtactcaagggcatgggcagcggccagttgcagaatctgggggcagcagtggccatcctgggggggcctggcaccgtgcagggggtggtgcgcttcctacagctgacccctgagcgctgcctcatcgagggaactattgacggcctggagcctgggctgcatggactccacgtccatcagtacggggaccttacaaacaactgcaacagctgtgggaatcactttaaccctgatggagcatctcatgggggcccccaggactctgaccggcaccgcggagacctgggcaatgtccgtgctgatgctgacggccgcgccatcttcagaatggaggatgagcagctgaaggtgtgggatgtgattggccgcagcctgattattgatgagggagaagatgacctgggccggggaggccatcccttatccaagatcacagggaactccggggagaggttggcctgtggcatcattgcacgctccgctggccttttccagaaccccaagcagatctgctcttgcgatggcctcaccatctgggaggagcgaggccggcccatcgctggcaagggccgaaaggagtcagcgcagccccctgcccacctttgagcaggacctcaccttggctctgttgctgtcctccagggcgagcactttccacttccagaggggg

SEQ ID NO: 122291 - DNA, 1214 bp, Homo sapiens
  Payload ID: 3961
  Gene Symbol: CCS
  Gene Name: copper chaperone for superoxide dismutase
  ENST ID: ENST00000530961
  CDS Start-End: 62-811
cgctggttggtgctcctgcgccggaggagttctgcgtctcggggtggtgactgggtccagaatggcttcggattcggggaaccaggggaccctctgcacgttggagttcgcggtgcagatgacctgtcagagctgtgtggacgcggtgcgcaaatccctgcaaggggtggcaggtgtccaggatgtggaggtgcacttggaggaccagatggtcttggtacacaccactctacccagccaggaggtgcaggctctcctggaaggcacggggcggcaggcggtactcaagggcatgggcagcggccagttgcagaatctgggggcagcagtggccatcctgggggggcctggcaccgtgcagggggtggtgcgcttcctacagctgacccctgagcgctgcctcatcgagggaactattgacggcctggagcctgggctgcatggactccacgtccatcagtacggggaccttacaaacaactgcaacagctgtgggaatcactttaaccctgatggagcatctcatgggggcccccaggactctgaccggacagggccaagaggaccttgcctgcccagtccttggggagctcagatcctacgagactggtacccacaggaggaaatgggtactttagggaagcaggaagaggcgtcggaatcaggaaatcagaagatagcagcttggcaccacgtggcacacatcccctatacacacactggatctcattccagcaccgcggagacctgggcaatgtccgtgctgatgctgacggccgcgccatcttcagaatggaggatgagcagctgaaggtgtgggatgtgattggccgcagcctgattattgatgagggagaagatgacctgggccggggaggccatcccttatccaagatcacagggaactccggggagaggttggcctgtggcatcattgcacgctccgctggccttttccagaaccccaagcagatctgctcttgcgatggcctcaccatctgggaggagcgaggccggcccatcgctggcaagggccgaaaggagtcagcgcagccccctgcccacctttgagcaggacctcaccttggctctgttgctgtcctccagggcgagcactttccacttccagagggggccagagggactttgcctgcccagtctttggagagctcagtacagggcaggagctgctgtggtgttcccttggcaaatga

SEQ ID NO: 122292 - DNA, 1430 bp, Homo sapiens
  Payload ID: 3961
  Gene Symbol: CCS
  Gene Name: copper chaperone for superoxide dismutase
  Uniprot ID: O14618
  ENST ID: ENST00000533244
  CDS Start-End: 442-1266
cagcttggccacctggctgcacagcgacgccaccgtcagcttcgccagagggaaggactgcagaatccggccctcctgcggggggcgcttctgaggctctggggacgtcgtcctagtggggaagagcgacagcggacgcagcagccggtggtaaaaccgctggagctcaggctcgggcttcgggggctccatcatagagccggcggccgccaccgtccaggaacagaaagccgaggggttactaaggcaaccaggagcccgacggcccgagtgcgcctgcgcggccgccacccggtggctgacgaagcagggccttgcgtgcgcacgcactaggaggaggagttaagggtggctttagaggctcagtccccgcgacgccgcgctggttggtgctcctgcgccggaggagttctgcgtctcggggtggtgactgggtccagaatggcttcggattcggggaaccaggggaccctctgcacgttggagttcgcggtgcagatgacctgtcagagctgtgtggacgcggtgcgcaaatccctgcaaggggtggcaggtgtccaggatgtggaggtgcacttggaggaccagatggtcttggtacacaccactctacccagccaggaggtgcaggctctcctggaaggcacggggcggcaggcggtactcaagggcatgggcagcggccagttgcagaatctgggggcagcagtggccatcctgggggggcctggcaccgtgcagggggtggtgcgcttcctacagctgacccctgagcgctgcctcatcgagggaactattgacggcctggagcctgggctgcatggactccacgtccatcagtacggggaccttacaaacaactgcaacagctgtgggaatcactttaaccctgatggagcatctcatgggggcccccaggactctgaccggcaccgcggagacctgggcaatgtccgtgctgatgctgacggccgcgccatcttcagaatggaggatgagcagctgaaggtgtgggatgtgattggccgcagcctgattattgatgagggagaagatgacctgggccggggaggccatcccttatccaagatcacagggaactccggggagaggttggcctgtggcatcattgcacgctccgctggccttttccagaaccccaagcagatctgctcttgcgatggcctcaccatctgggaggagcgaggccggcccatcgctggcaagggccgaaaggagtcagcgcagccccctgcccacctttgagcaggacctcaccttggctctgttgctgtcctccagggcgagcactttccacttccagagggggccagagggactttgcctgcccagtctttggagagctcagtacagggcaggagctgctgtggtgttcccttggcaaatgaaagttttattttcgtttggga

SEQ ID NO: 122293 - DNA, 777 bp, Homo sapiens
  Payload ID: 3961
  Gene Symbol: CCS
  Gene Name: copper chaperone for superoxide dismutase
  ENST ID: ENST00000534763
  CDS Start-End: 574-777
ggcaggagaatcacttgaactcaggaggtggaggttgtggtgagctgagattgcaccacggcactccagctcaggggtgacagggcaaaactctgtctcaagaaaaaaaataaaatctgatcttgaaggtcctgcttataaccaccttactgcctctgagatggaaggggacttctggacacagcaaaggaagggtccccatgccatggtgtttgtcatgctgtgatataactagttgtttactcatctgtgagtcccctgagccagaagcttattcaggacaggacccatgtctgattcttctcggtgccctctacccaaagcccagcacagagtaggcctgtttgttgaatgaatgaatgaatgaatgaatgaagcaaatataaatagatgagagggtagagcacctggcctgtgagctgctttcctgcccacctgtttcctttctttcttagctgtgggaatcactttaaccctgatggagcatctcatgggggcccccaggactctgaccggcaccgcggagacctgggcaatgtccgtgctgatgctgacggccgcgccatcttcagaatggaggatgagcagctgaaggtgtgggatgtgattggccgcagcctgattattgatgagggagaagatgacctgggccggggaggccatcccttatccaagatcacagggaactccggggagaggttggcctgtggcatcattgcacgctccgctggccttttccagaaccccaagcagatctgctcttgcgatggcctcacc

SEQ ID NO: 122294 - DNA, 911 bp, Homo sapiens
  Payload ID: 3962
  Gene Symbol: COMMD1
  Gene Name: copper metabolism (Murr1) domain containing 1
  Uniprot ID: Q8N668
  ENST ID: ENST00000311832
  CDS Start-End: 33-605
tcagctgttgcggggcggggccttcgcagagcatggcggcgggcgagcttgagggtggcaaacccctgagcgggctgctgaatgcgctggcccaggacactttccacgggtaccccggcatcacagaggagctgctacggagccagctatatccagaggtgccacccgaggagttccgcccctttctggcaaagatgagggggattcttaagtctattgcgtctgcagacatggatttcaaccagctggaggcattcttgactgctcaaaccaaaaagcaaggtgggatcacatctgaccaagctgctgtcatttccaaattctggaagagccacaagacaaaaatccgtgagagcctcatgaaccagagccgctggaatagcgggcttcggggcctgagctggagagttgatggcaagtctcagtcaaggcactcagctcaaatacacacacctgttgccattatagagctggaattaggcaaatatggacaggaatctgaatttctgtgtttggaatttgatgaggtcaaagtcaaccaaattctgaagacgctgtcagaggtagaagaaagtatcagcacactgatcagccagcctaactgaagatgatgtatgaaggagttggagttgttgaaaccaaggtgtccatgatccctccccactgaccttttctaagaaaattcttgtgcccgcattggtattaaatcctcgcattcagtcttcctgcctctacttgctcagatttctttttttctagctttcatttagtcttacatttgttccagtgcagaggttctcacccttcagtgtgcataaatgttataaggggtacttgtaaaagcattcacttttttgttgttattattaaattcggagtgttgctctgttgcccaggctggagtgcagtgg

SEQ ID NO: 122295 - DNA, 388 bp, Homo sapiens
  Payload ID: 3962
  Gene Symbol: COMMD1
  Gene Name: copper metabolism (Murr1) domain containing 1
  ENST ID: ENST00000455659
  CDS Start-End: 1-152
accccggcatcacagaggagctgctacggagccagctatatccagaggtgccacccgaggagttccgcccctttctggcaaagatgagggggattcttaagagacagaatctccccatatcgtccagggtggtctcaaattcctgggcttaagcaaccctctctctttagcctcccaattgctgggattacagcagctattctgggcctggaaacttgacttgggttaaaggagtggctggtctattgcgtctgcagacatggatttcaaccagctggaggcattcttgactgctcaaaccaaaaagcaaggtgggatcacatctgaccaagctgctgtcatttccaaattctggaagagccacaagacaaaaatccgtgagagcctc

SEQ ID NO: 122296 - DNA, 770 bp, Homo sapiens
  Payload ID: 3962
  Gene Symbol: COMMD1
  Gene Name: copper metabolism (Murr1) domain containing 1
  ENST ID: ENST00000458337
  CDS Start-End: 1-115
acaggaatctgaatttctgtgtttggaatttgatgaggtcaaagtcaaccaaattctgaagacgctgtcagaggtagaagaaagtatcagcacactgatcagccagcctaactgaagatgatgtatgaaggagttggagttgttgaaaccaagtcctttccacgctacctgcagaggggtccatacggcgttgttctggattcccatcgtaacttaaagggaaactttcacaatgtccggagcccttgatgtcctgcaaatgaaggaggaggatgtccttaagttccttgcagcaggaactcacttaggtggcaccaatcttgacttccagatggaacagtacatctataaaaggaaaagtgatggcatctatatcataaatctgaagaggacctgggagaagcttctgctggcagctcgtgctattgttgccattgaaaaccctgctgatgtcagtgttatatcctccaggaatactggccagagggccgtgctaaagtttgctgctgccactggagccactccaattgctggccgcttcactcctggaaccttcgctaaccagatccaggcagccttccgggagccacggcttcttgtggttactgaccccagggctgaccaccagcctctcatggaggcatcttatgttaacctacctaccattgcgctgtgtaacacagattctcctctgcactatgtggacattgccatcccatgcaacaacaagggagctcactcagtgggtttgatgtggtggatgctggctc

SEQ ID NO: 122297 - DNA, 743 bp, Homo sapiens
  Payload ID: 3962
  Gene Symbol: COMMD1
  Gene Name: copper metabolism (Murr1) domain containing 1
  ENST ID: ENST00000444166
  CDS Start-End: 1-97
gtgtttggaatttgatgaggtcaaagtcaaccaaattctgaagacgctgtcagaggtagaagaaagtatcagcacactgatcagccagcctaactgaagatgatgtatgaaggagttggagttgttgaaaccaagaggggtccatacggcgttgttctggattcccatcgtaacttaaagggaaactttcacaatgtccggagcccttgatgtcctgcaaatgaaggaggaggatgtccttaagttccttgcagcaggaactcacttaggtggcaccaatcttgacttccagatggaacagtacatctataaaaggaaaagtgatggcatctatatcataaatctgaagaggacctgggagaagcttctgctggcagctcgtgctattgttgccattgaaaaccctgctgatgtcagtgttatatcctccaggaatactggccagagggccgtgctaaagtttgctgctgccactggagccactccaattgctggccgcttcactcctggaaccttcgctaaccagatccaggcagccttccgggagccacggcttcttgtggttactgaccccagggctgaccaccagcctctcatggaggcatcttatgttaacctacctaccattgcgctgtgtaacacagattctcctctgcactatgtggacattgccatcccatgcaacaacaagggagctcactcagtgggtttgatgtggtggatgctggctcgggaagttctgc

SEQ ID NO: 122298 - DNA, 785 bp, Homo sapiens
  Payload ID: 3962
  Gene Symbol: COMMD1
  Gene Name: copper metabolism (Murr1) domain containing 1
  ENST ID: ENST00000427417
  CDS Start-End: 1-115
acaggaatctgaatttctgtgtttggaatttgatgaggtcaaagtcaaccaaattctgaagacgctgtcagaggtagaagaaagtatcagcacactgatcagccagcctaactgaagatgatgtatgaaggagttggagttgttgaaaccaaggaatactggccagagggccgtgctaaagtttgctgctgccactggagccactccaattgctggccgcttcactcctggaaccttcgctaaccagatccaggcagccttccgggagccacggcttcttgtggttactgaccccagggctgaccaccagcctctcatggaggcatcttatgttaacctacctaccattgcgctgtgtaacacagattctcctctgcactatgtggacattgccatcccatgcaacaacaagggagctcactcagtgggtttgatgtggtggatgctggctcgggaagttctgcgcatgcgtggcaccatttcctgtgaacacccatgggaggtcatgcctgatctgtacttctacagagatcctgaagagattgaaagagaagagcaggctgctgctgaaaaggcagtgaccaaggaggaatttcagggtgaatggactgctccagctcctgagttcactgttactcagcctgaggttgcagactggtctgaaggtgtacaggtgccctctgtgcctattccctactgaagacgggagcgctcagcctgccacggaagactggtctgcagctcccactgctcaggccactgaatgggtaggagcaaccactgac

SEQ ID NO: 122299 - DNA, 549 bp, Homo sapiens
  Payload ID: 3962
  Gene Symbol: COMMD1
  Gene Name: copper metabolism (Murr1) domain containing 1
  ENST ID: ENST00000445644
  CDS Start-End: 33-329
tcagctgttgcggggcggggccttcgcagagcatggcggcgggcgagcttgagggtggcaaacccctgagcgggctgctgaatgcgctggcccaggacactttccacgggtaccccggcatcacagaggagctgctacggagccagctatatccagaggtgccacccgaggagttccgcccctttctggcaaagatgagggggattcttaagacaggatcttgctgtgttgcccaggatagagtgcaatgggtattcataggcacaatcatggcacaccgtggccttgaactcctgggctcaagtgattctcctgcctcagcctcctgagcagctgggactacaggtgcacaccaccacatctggcttttatattctattgcgtctgcagacatggatttcaaccagctggaggcattcttgactgctcaaaccaaaaagcaaggtgggatcacatctgaccaagctgctgtcatttccaaattctggaagagccacaagacaaaaatccgtgagagcctcatgaaccagagccgctggaatagcgggc

SEQ ID NO: 122300 - DNA, 2825 bp, Homo sapiens
  Payload ID: 3963
  Gene Symbol: CPOX
  Gene Name: coproporphyrinogen oxidase
  Uniprot ID: P36551
  ENST ID: ENST00000264193
  CDS Start-End: 220-1584
cgcgcagggacgccgcaggcggcgataggatccggactacagctcccagcgcgccccagttcccgcccccgcctccggagcccgacgctgcagcggctcttctcgaaaggttctttccgcctgtgcagctcgccggctcaatactccgggggtctgggtggggggctcaaacgcagggctctgggacgcaggcactgctccaggtgatagtgcgggaacatggccttgcagctgggcaggctgagctcgggcccctgctggctcgtggcgcggggcggctgcggagggccccgcgcctggtcccagtgcggcggcggagggctccgagcctggtcccagcgcagcgcagccggacgcgtctgccggccccctggcccggctggcacggagcagagccgcgggctggggcacggctcgacgtcgagaggcggcccctgggtggggacagggctggccgcggcgctggcggggttggtggggctggccaccgccgccttcgggcatgtgcagcgggcggagatgttgcctaagacctcggggacgcgggccacttcgctggggaggccggaggaggaggaggatgagctggcccaccgctgcagcagcttcatggccccgcctgtgaccgacctgggcgagctgcgaaggaggccgggcgacatgaagaccaagatggagctgctgattctggagacccaggcccaggtgtgccaggctctggcacaggtagacgggggcgccaacttttctgtggaccggtgggagaggaaggaaggaggtggcggcatcagctgtgtacttcaagatgggtgtgttttcgaaaaggctggggtgagcatttctgttgttcatggaaatctttcagaggaagctgcaaaacaaatgagaagcagaggaaaagttctgaagactaaagatggtaaattgccattttgtgctatgggcgtgagctctgttatccaccccaagaatcctcatgctcctactatccatttcaactacagatactttgaagtagaagaagctgatggcaacaagcagtggtggtttggtggtggatgtgacctcactccaacatacttgaatcaagaagacgctgtccattttcacagaactctgaaggaggcttgtgaccagcatggtccagatctctaccccaaatttaaaaaatggtgtgatgattacttctttatagcccatcgtggagaacggcggggcattggtggtatcttttttgatgatcttgactctccgtccaaggaggaggtgtttcgctttgtacagagctgtgccagggctgtagttccttcttacattccccttgtgaaaaagcactgtgatgactcattcaccccccaggagaagctgtggcagcagctcagaagaggacggtatgtagaatttaatctgctgtatgatcggggcacaaagtttggcctcttcactccaggatccagaattgaaagtatcttgatgtctttacctctaactgcccgatgggagtacatgcattcaccctcagagaattccaaagaagctgaaattctggaagttctacgccatccaagggactgggtgcgttgatgcaggcagaatggctgtgcaggggtttggagggcacacgatgtgtgctccccatgccactggtcggcactttgccactgtgtggcagttacccgtgccttagtcttctccactctgcaccctacctcgtgggcagatgataacatgttttggatgctgtcagtgatgaatggtgagatggcagattgtcagagtcaattgattaaacctcatttatacttctagtgtcattttatatgactagtttacaaaataggacattgagtttccaagtattgagataagggaatataaatagtattatatgtatcaggaaatctctcatcttgtttttgtttcatgtattttttaaagttttcatttgtgccacaaaaatctgtcgtggaatatattttattttcattaattcagtgaagttgagacttcatagtaattttagaatgcaacttgaaggtaaaaattttactttgtcaatactgaagtctctgctgtaatccttatatatctttctccagagaacataatattgtcaaatagatacacatttttctaataggtatttagaagcacttgaaataatctctgcatgtgttacaattcagttatttctgtagtttgtaaactctaaagtgacattactattattttagagatgtctaagttgtaattttgatttttgtggaaccattgtttgttaatgttgggattctctgcacttttgaatgtgaaagcttatatccctgaattctgatacttaagagttttctatttcagacatctctgtgtggaagttgagactaagaataatcctagggatgtcatgaatttaggcaatgtttctcatttggaaaatgaaatgagaaataatttccttctttaaagcaagtatatatagtatgagaaacttggaggcatttcatacacacgtttcttaggaaaatggacacattgaaaatgtcctcttttttatattagagattctgcagctctttgctcttaagagcaaatcacaacaggattcttaatgtatgatttctttgttcatatattatgaatgtattattttatttgcttcgtaataaagtttataaggaagagcatctcatacatatcattatcgtggaacacgttgaatgtttgtgattctgtgtggcctttttggggctggaaaatgtatgaattcttcaactgtcttacaagagatctgctaataaattttattattaaataagactaagaaa

SEQ ID NO: 122301 - DNA, 826 bp, Homo sapiens
  Payload ID: 3963
  Gene Symbol: CPOX
  Gene Name: coproporphyrinogen oxidase
  ENST ID: ENST00000513674
  CDS Start-End: 145-672
cggagcccgacgctgcagcggctcttctcgaaaggttctttccgcctgtgcagctcgccggctcaatactccgggggtctgggtggggggctcaaacgcagggctctgggacgcaggcactgctccaggtgatagtgcgggaacatggccttgcagctgggcaggctgagctcgggcccctgctggctcgtggcgcggggcggctgcggagggccccgcgcctggtcccagtgcggcggcggagggctccgagcctggtcccagcgcagcgcagccggacgcgtctgccggccccctggcccggctggcacggagcagagccgcgggctggggcacggctcgacgtcgagaggcggcccctgggtggggacagggctggccgcggcgctggcggggttggtggggctggccaccgccgccttcgggcatgtgcagcgggcggagatgttgcctaagacctcggggacgcgggccacttcgctggggaggccggaggaggaggaggatgagctggcccaccgctgcagcagcttcatggccccgcctgtgaccgacctgggcgagctgcgaaggaggccgggcgacatgaagaccaagatggagctgctgattctggagacccaggcccaggtgtgccaggctctggcacagaggaagctgcaaaacaaatgagaagcagaggaaaagttctgaagactaaagatgatactttgaagtagaagaagctgatgccattcagcttggttcaaccttttatgtttaaagttggtaactggtattgacaactcatggacctgtgagcacatgaaacagttattctcaagtg

SEQ ID NO: 122302 - DNA, 593 bp, Homo sapiens
  Payload ID: 3963
  Gene Symbol: CPOX
  Gene Name: coproporphyrinogen oxidase
  ENST ID: ENST00000512905
  CDS Start-End: 1-212
actgtgatgactcattcaccccccaggagaagctgtggcagcagctcagaagaggacggtatgtagaatttaatctgctgtatgatcggggcacaaagtttggcctcttcactccaggatccagaattgaaagtatcttgatgtctttacctctaactgcccgacaattctcagctatccttttcctcaactcagtggaggatttcttttgagggttcaaacccccaacttggccttgtaatcaactgagcacaggctgacctgggtctccatcacttcaagagcagtctgaatgccagaatggataaccgttttgctacagcatttgtaattgcttgtgtgcttagcctcatttccaccatctacatggcagcctccattggcacagacttctggtatgaatatcgaagtccagttcaagaaaattccagtgatttgaataaaagcatctgggatgaattcattagtgatgaggcagatgaaaagacttataatgatgcactttttcgatacaatggcacagtgggattgtggagacggtgtatcaccatacccaaaaacatgcattggtatagcccaccagaaaggacagg

SEQ ID NO: 122303 - DNA, 5291 bp, Homo sapiens
  Payload ID: 3964
  Gene Symbol: COBL
  Gene Name: cordon-bleu WH2 repeat protein
  Uniprot ID: O75128
  ENST ID: ENST00000265136
  CDS Start-End: 167-3952
ccagccccttccgtccgccgcgctccgccgctgtcctccgccggcccgcgtgggaggacgatgggtcagcgcggaaaaagtgaatgagggcggcagcggtggcggcggtagccagcgcctgactcggcgggcccggagcaccgcccgcgtcccggcccccggcaccatggacgcgccgcgcgcctcggcggccaagcccccgaccgggaggaagatgaaggctcgtgctcccccacctcctggaaaggctgccactctgcatgtgcacagtgaccagaagcccccccacgatggggccctcgggtcgcagcagaacttggttcgcatgaaggaggcgctgagggccagcaccatggacgtcaccgtggtcctgcctagtgggctggagaagaggagcgtgctcaatgggagccatgcgatgatggacctactggttgaactttgccttcagaaccacctgaatccatcccaccatgcccttgaaattcggtcttcagaaacccaacaacctttgagttttaagccaaatactttgattgggaccctgaatgtgcatactgtgtttctgaaagaaaaagttcctgaagagaaggttaagcctggtccccctaaggtgcctgagaaatctgtgcgtttggtcgtgaattacctgcggacacaaaaagctgttgtgcgtgtgagccctgaggttcctctccagaatattctcccagtcatttgtgcaaagtgtgaggtcagcccagagcacgtggttctcctcagggacaacattgccggagaggagctggagctgtccaagtccctgaacgagctcgggataaaggagctctacgcgtgggacaacagaagagaaacctttaggaaatcatcacttggcaatgatgagacagataaagagaagaaaaaatttctgggatttttcaaagttaataaaagaagcaatagtaagggctgtttaacgacccccaactccccatccatgcactcacgttctcttacgctgggtccatccctctcgctgggcagcatctcaggggtgtccgtgaagtcggagatgaagaagcgccgagcccctcctcctccaggttcagggccacctgtgcaagacaaggcatcggaaaaggtatctcttgggtcacagattgatttacagaagaagaagcggcgagcgccagctccccctccaccacagccaccaccaccgagtcccctgatccccaaccgcactgaggataaggaggagaacaggaagagcacgatggtaagcctgcccctggggtctggcagccactgcagcccggatggagccccgcaggtgctgtcagaggcggaggagaccgtgtcagttggcagctgttttgcgtcggaggacacgaccgaggactcaggagtgatgagttccccctcagacatcgtctctctggactcgcagcaggacagcatgaaatacaaagacaagtgggccacagaccaggaagactgcagtgaccaggacctcgctggaaccccagacctgggtccccagaagagccccttgtgggagaagaatggctctgagaactcacatctgagaactgaaaaagctgtcacagcctcaaatgatgaagaagacctattaattgctggagagttccgtaaaacccttgcagaacttgatgaagacctggaagaaatggaagacagctatgaaacagacaccagctccctcaccagctccatccatggtgcatccaaccactgcccacaggatgccatgatccctcacggcgacacagatgcaatcccagtaacattcataggggaagtttcagatgatcctgtggattcggggttgttttccaatagaaacaacaatgctgggtctttcgactcggagggtgttgccagcaggagagactccctggcgccacttcaagctgagcacagccagccccatgaaaaggcaagggaggaagtacctgccctgcaccccgcttcccatgacgtcggaaaaggaatccgtgtggccttatctaacatctctaaagatgggaatctaatggaaacggcgcccagggtgacttcttttgcttcgaatcttcacacagacaacctaaatgcaaaagtgaaagacaaagtgtatggctgtgctgacggggagaggactcaagccacagagagagtgaattcccaaccggtgaatgaaaaggacagcaacgataaaaacgctgccttggcaccaacatcatggcaccaacgaggccaaaacccagggaaaagctacagacttaagcacggcctcacaacgtataaaatcattcctccaaagtcagagatgcgatgttacgacagagatgtgtccctctccaccggagccattaagattgacgagctggggaacttggtgagtcctcacgccaccggcatcaggatcatttccctgtcttcgtctgtgcctgaagcagaatctcagcccattgggaaagtcagagagttctggaggtgcaactctgtggaaaaacacctgggccgaccctcagagagctctgccaggggacccccctccacccctgtgcccacgcagacgcagaatccagagagcagactccaagcagaccccaagccaatatcgccccagcagaagtctgcccaccatgagggccggaaccccctaggggaggggagaaaccagccccccaccatgggcatgggtcacgtgagggtgccagcagctcacaccacagaagtcacatttctcaagcctcagagaagaacgtccagccagtatgtggcctctgccattgccaagcgcataggagccccaaaagtccatgctgatgtggtgaggccacacggttatgccgagaagggttatgcaggcaaggcgccagtgctggctgcaccacctgtcactgtgaaagatgacaggacatccagcccacactcagagacacaaggatggaaggatggtgcccagtggccctgtgtcactcctcccaacaaccacggggaagatttggcagtgggagcccctcctaggggggaggtcattggcccacacaggaagttgtctactcaggacagacctgctgctatccacagaagctcctgtttctcactggttcagtcttcccagagggatcgtgtttctgtgggacagagctgtggtttcagtggaaagcaaagcacaagtagccaggaggccagctcagcatctgagcccagacgcgcacctgatggtacagacccaccccctccacacacatctgacactcaggcctgcagcagggagctggtcaatggctctgtgcgcgccccaggccacggcgagccttcccaccctccaggagggtctggcacagaaagccacattctcctagaaagagaggaaaagcccagtgtgttctctacagatggaaatgaaacagacagtatttggccacccagcatttttgggccgaagaaaaaattcaaacctgttgtccagagaccagtcccaaaagacacatccctgcactctgccctgatggaagccatccactctgcgggagggaaggacagactacgcaagacggcagaacacaccggggagggcaggccagcgaaactgtcctacacggaggcagagggcgaacgatctgcactgctggcagctatccgcgggcacagcggcacctgcagcctgaggaaggtggcatcctctgcttctgaggagctccagagcttccgagatgccgcactctctgctcagggctcggaaagtcctctgctagaagaccttggtcttctgtccccaccagccattcccccaccaccccctccaccctcccaggctctctctgcaccaaggacggcctccaggttcagcacgggcaccctcagcaacaccgcagacgcaaggcaagccttgatggacgccatccgctccggcacaggggctgcgagactgagaaaggtgcccttgctcgtgtgaatgaacagaggccagagaattgcagaaacccacctgtaatatgcccacaggcgtcactcaaggagtctgcatagccaggaacatcaagttttggtgttactttcttgtctacaggccaaatgcgcacagttgattttcggtgtgttcctgtataacggcttgaaaggaaaggagaagatgctgtgtcgctgcgcagctcgtgtgccaaggaaatgtgttttgcctctgaatatcttaagttgctaataaacgattcttgttggcaggttaatgggactataaatgctggagcccagcactcacacttaattatatttatgggcaaagtaaaaagaatcatgccttagactgattttggacctttgagacttttaccacatacagatggatgaaactacttactgatttaagatcttttgaattttagaaaaaacatatgaatcagatggaacaatctgaatgtgatatgctccatgatgctgtgtgttttggtagtaagaaaaaaaaattgggaggcttttcaaaggtggctttgttaggtagtaaaactgctggattcttcttcctcaaatatttggggctaacacttcacagagggtcacagtccatgatctgaccaactaagcttttaaaaatcaactattaccacccagaaaacagtcctacgtgatcatgtggccagggcatgcccgagtcctgcaagggtggcgggtggctgaggtcacaccaccactggagtggatgggcagtgccccacatggacagccattccccaggctatgaagtgacataggcctcccccacggtgcctgtgtacggagcctgatgacttcactgggagccttctggaatcctgcagagggtcaaggagcagggatgttggatgcccacctgtcaagagttcagatcaaagttgcgctgagagcatcacaattttggttcagccttgacgcgtttgtccaacagctcattggctccctttgtatgatatcgtggtcttctcacatggtgcccagtcaccaatatttataatgaggtctaactacagcagtagtttttcatatatatctctaaaacattttgttatattgaaaaaagtaatagaaatcaagatgtgttgatgaaataaaatgtgtatctgagtgagaaaacaagtatggtgaggtcactttaatgtttcacagcgatctcagatctaggcctcaggtagaatggaagctgttctgcattcactgattaacgttgctaaactcttggtgaggcacgagctaccagccaattgctcttcatcacagctatctgtcttttagtgccacaaataaaagaaaatcaaatctta

SEQ ID NO: 122304 - DNA, 2332 bp, Homo sapiens
  Payload ID: 3964
  Gene Symbol: COBL
  Gene Name: cordon-bleu WH2 repeat protein
  Uniprot ID: O75128
  ENST ID: ENST00000395540
  CDS Start-End: 186-1595
ccgcccgctagagacgattccagccccttccgtccgccgcgctccgccgctgtcctccgccggcccgcgtgggaggacgatgggtcagcgcggaaaaagtgaatgagggcggcagcggtggcggcggtagccagcgcctgactcggcgggcccggagcaccgcccgcgtcccggcccccggcaccatggacgcgccgcgcgcctcggcggccaagcccccgaccgggaggaagatgaaggctcgtgctcccccacctcctggaaaggctgccactctgcatgtgcacagtgaccagaagcccccccacgatggggccctcgggtcgcagcagaacttggttcgcatgaaggaggcgctgagggccagcaccatggacgtcaccgtggtcctgcctagtgggctggagaagaggagcgtgctcaatgggagccatgcgatgatggacctactggttgaactttgccttcagaaccacctgaatccatcccaccatgcccttgaaattcggtcttcagaaacccaacaacctttgagttttaagccaaatactttgattgggaccctgaatgtgcatactgtgtttctgaaagaaaaagttcctgaagagaaggttaagcctggtccccctaaggtgcctgagaaatctgtgcgtttggtcgtgaattacctgcggacacaaaaagctgttgtgcgtgtgagccctgaggttcctctccagaatattctcccagtcatttgtgcaaagtgtgaggtcagcccagagcacgtggttctcctcagggacaacattgccggagaggagctggagctgtccaagtccctgaacgagctcgggataaaggagctctacgcgtgggacaacagaagagaaacctttaggaaatcatcacttggcaatgatgagacagataaagagaagaaaaaatttctgggatttttcaaagttaataaaagaagcaatagtaagggctgtttaacgacccccaactccccatccatgcactcacgttctcttacgctgggtccatccctctcgctgggcagcatctcaggggtgtccgtgaagtcggagatgaagaagcgccgagcccctcctcctccaggttcagggccacctgtgcaagacaaggcatcggaaaaggtatctcttgggtcacagattgatttacagaagaagaagcggcgagcgccagctccccctccaccacagccaccaccaccgagtcccctgatccccaaccgcactgaggataaggaggagaacaggaagagcacgatggtttatggagcagctgaagctgtgataagacttctgagcttgcttctgaataccacagccccgggcacagcaaagccaagaaccctgtggatgagtgagggccgcagttctctacacaatcctgaaatcaagtgttcctgtttctcttcctcctccccatttccccagtcactgctcagccttctcttgggtctttcaagcatttgtgaatgcatgtgcacacttagacacacacacgcacacacacacaacccatcttgtgtcttacctacctctgaaatattggcatttgggagacaatccctaatcagctaacacttgtttttttctatcctctgtgtgcttgttagaatactgtgaaggtgttttctatggaccgacttctaaatgttcctcctgaaatcagtgttattcacacagttctaatgtaatgaattctgtctgtctgaaagcttgccatattgtccctggtttctcccagctaatagagaggaaaatgagcctgaatatgaacccgtcaccacagaccgcactgcatcctttccaggcagcagggccctggagactgtgctcaggcctggcagcctctgtgtttcacttaggcttgttttgctcaacccaggcaagacttttaaaattgtttgaataagctgcagcatcagtatgcttttttaaattgtgatttaaaaaaaaatataaaatgtcccattccttccattttcaaatgcatacttcagtagatttaagtatattcacaatgctgtgaaaccgatctccaggacctcatcgtcctgcaaatctgatactctactcactgaacagcaactcccctttgcctgcttgtctttttgcgcctggcttatttcacttagcacaatttcctcgaagtttatccatattgtagcatataacagaattcccttcccttttaaagctaaatatctttcaagtatatgtatagaccacattttctttatccatccattgtcagtggacatttaagttgttcccgcttcatggttattgtgaatgatgctgcacaggtatgcaaa

SEQ ID NO: 122305 - DNA, 5339 bp, Homo sapiens
  Payload ID: 3964
  Gene Symbol: COBL
  Gene Name: cordon-bleu WH2 repeat protein
  Uniprot ID: O75128
  ENST ID: ENST00000395542
  CDS Start-End: 186-4001
ccgcccgctagagacgattccagccccttccgtccgccgcgctccgccgctgtcctccgccggcccgcgtgggaggacgatgggtcagcgcggaaaaagtgaatgagggcggcagcggtggcggcggtagccagcgcctgactcggcgggcccggagcaccgcccgcgtcccggcccccggcaccatggacgcgccgcgcgcctcggcggccaagcccccgaccgggaggaagatgaaggctcgtgctcccccacctcctggaaaggctgccactctgcatgtgcacagtgaccagaagcccccccacgatggggccctcgggtcgcagcagaacttggttcgcatgaaggaggcgctgagggccagcaccatggacgtcaccgtggtcctgcctagtgggctggagaagaggagcgtgctcaatgggagccatgcgatgatggacctactggttgaactttgccttcagaaccacctgaatccatcccaccatgcccttgaaattcggtcttcagaaacccaacaacctttgagttttaagccaaatactttgattgggaccctgaatgtgcatactgtgtttctgaaagaaaaagttcctgaagagaaggttaagcctggtccccctaaggtgcctgagaaatctgtgcgtttggtcgtgaattacctgcggacacaaaaagctgttgtgcgtgtgagccctgaggttcctctccagaatattctcccagtcatttgtgcaaagtgtgaggtcagcccagagcacgtggttctcctcagggacaacattgccggagaggagctggagctgtccaagtccctgaacgagctcgggataaaggagctctacgcgtgggacaacagaagagaaacctttaggaaatcatcacttggcaatgatgagacagataaagagaagaaaaaatttctgggatttttcaaagttaataaaagaagcaatagtaagggctgtttaacgacccccaactccccatccatgcactcacgttctcttacgctgggtccatccctctcgctgggcagcatctcaggggtgtccgtgaagtcggagatgaagaagcgccgagcccctcctcctccaggttcagggccacctgtgcaagacaaggcatcggaaaaggtatctcttgggtcacagattgatttacagaagaagaagcggcgagcgccagctccccctccaccacagccaccaccaccgagtcccctgatccccaaccgcactgaggataaggaggagaacaggaagagcacgatgggtggtggacggcaggtgccacaaaagcctcccagaggcactgctcggggtccaccccagttagtgcttcccccacccccgccctaccctcctcccgacacagacgtggtggagcctctcagctttcccggggaaggcgctggttccgaggcctcagacccgatacccaaactaagcctgcccctggggtctggcagccactgcagcccggatggagccccgcaggtgctgtcagaggcggaggagaccgtgtcagttggcagctgttttgcgtcggaggacacgaccgaggactcaggagtgatgagttccccctcagacatcgtctctctggactcgcagcaggacagcatgaaatacaaagacaagtgggccacagaccaggaagactgcagtgaccaggacctcgctggaaccccagacctgggtccccagaagagccccttgtgggagaagaatggctctgagaactcacatctgagaactgaaaaagctgtcacagcctcaaatgatgaagaagacctattaattgctggagagttccgtaaaacccttgcagaacttgatgaagacctggaagaaatggaagacagctatgaaacagacaccagctccctcaccagctccatccatggtgcatccaaccactgcccacaggatgccatgatccctcacggcgacacagatgcaatcccagtaacattcataggggaagtttcagatgatcctgtggattcggggttgttttccaatagaaacaacaatgctgggtctttcgactcggagggtgttgccagcaggagagactccctggcgccacttcaagctgagcacagccagccccatgaaaaggcaagggaggaagtacctgccctgcaccccgcttcccatgacgtcggaaaaggaatccgtgtggccttatctaacatctctaaagatgggaatctaatggaaacggcgcccagggtgacttcttttgcttcgaatcttcacacagacaacctaaatgcaaaagtgaaagacaaagtgtatggctgtgctgacggggagaggactcaagccacagagagagtgaattcccaaccggtgaatgaaaaggacagcaacgataaaaacgctgccttggcaccaacatcatggcaccaacgaggccaaaacccagggaaaagctacagacttaagcacggcctcacaacgtataaaatcattcctccaaagtcagagatgcgatgttacgacagagatgtgtccctctccaccggagccattaagattgacgagctggggaacttggtgagtcctcacgccaccggcatcaggatcatttccctgtcttcgtctgtgcctgaagcagaatctcagcccattgggaaagtcagagagttctggaggtgcaactctgtggaaaaacacctgggccgaccctcagagagctctgccaggggacccccctccacccctgtgcccacgcagacgcagaatccagagagcagactccaagcagaccccaagccaatatcgccccagcagaagtctgcccaccatgagggccggaaccccctaggggaggggagaaaccagccccccaccatgggcatgggtcacgtgagggtgccagcagctcacaccacagaagtcacatttctcaagcctcagagaagaacgtccagccagtatgtggcctctgccattgccaagcgcataggagccccaaaagtccatgctgatgtggtgaggccacacggttatgccgagaagggttatgcaggcaaggcgccagtgctggctgcaccacctgtcactgtgaaagatgacaggacatccagcccacactcagagacacaaggatggaaggatggtgcccagtggccctgtgtcactcctcccaacaaccacggggaagatttggcagtgggagcccctcctaggggggaggtcattggcccacacaggaagttgtctactcaggacagacctgctgctatccacagaagctcctgtttctcactggttcagtcttcccagagggatcgtgtttctgtgggacagagctgtggtttcagtggaaagcaaagcacaagtagccaggaggccagctcagcatctgagcccagacgcgcacctgatggtacagacccaccccctccacacacatctgacactcaggcctgcagcagggagctggtcaatggctctgtgcgcgccccaggccacggcgagccttcccaccctccaggagggtctggcacagaaagccacattctcctagaaagagaggaaaagcccagtgtgttctctacagatggaaatgaaacagacagtatttggccacccagcatttttgggccgaagaaaaaattcaaacctgttgtccagagaccagtcccaaaagacacatccctgcactctgccctgatggaagccatccactctgcgggagggaaggacagactacgcaagacggcagaacacaccggggagggcaggccagcgaaactgtcctacacggaggcagagggcgaacgatctgcactgctggcagctatccgcgggcacagcggcacctgcagcctgaggaaggctctctctgcaccaaggacggcctccaggttcagcacgggcaccctcagcaacaccgcagacgcaaggcaagccttgatggacgccatccgctccggcacaggggctgcgagactgagaaaggtgcccttgctcgtgtgaatgaacagaggccagagaattgcagaaacccacctgtaatatgcccacaggcgtcactcaaggagtctgcatagccaggaacatcaagttttggtgttactttcttgtctacaggccaaatgcgcacagttgattttcggtgtgttcctgtataacggcttgaaaggaaaggagaagatgctgtgtcgctgcgcagctcgtgtgccaaggaaatgtgttttgcctctgaatatcttaagttgctaataaacgattcttgttggcaggttaatgggactataaatgctggagcccagcactcacacttaattatatttatgggcaaagtaaaaagaatcatgccttagactgattttggacctttgagacttttaccacatacagatggatgaaactacttactgatttaagatcttttgaattttagaaaaaacatatgaatcagatggaacaatctgaatgtgatatgctccatgatgctgtgtgttttggtagtaagaaaaaaaaattgggaggcttttcaaaggtggctttgttaggtagtaaaactgctggattcttcttcctcaaatatttggggctaacacttcacagagggtcacagtccatgatctgaccaactaagcttttaaaaatcaactattaccacccagaaaacagtcctacgtgatcatgtggccagggcatgcccgagtcctgcaagggtggcgggtggctgaggtcacaccaccactggagtggatgggcagtgccccacatggacagccattccccaggctatgaagtgacataggcctcccccacggtgcctgtgtacggagcctgatgacttcactgggagccttctggaatcctgcagagggtcaaggagcagggatgttggatgcccacctgtcaagagttcagatcaaagttgcgctgagagcatcacaattttggttcagccttgacgcgtttgtccaacagctcattggctccctttgtatgatatcgtggtcttctcacatggtgcccagtcaccaatatttataatgaggtctaactacagcagtagtttttcatatatatctctaaaacattttgttatattgaaaaaagtaatagaaatcaagatgtgttgatgaaataaaatgtgtatctgagtgagaaaacaagtatggtgaggtcactttaatgtttcacagcgatctcagatctaggcctcaggtagaatggaagctgttctgcattcactgattaacgttgctaaactcttggtgaggcacgagctaccagccaattgctcttcatcacagctatctgtcttttagtgccacaaataaaagaaaatcaaatctt

SEQ ID NO: 122306 - DNA, 589 bp, Homo sapiens
  Payload ID: 3964
  Gene Symbol: COBL
  Gene Name: cordon-bleu WH2 repeat protein
  ENST ID: ENST00000449281
  CDS Start-End: 101-589
agtggtggagcaggtggtgcggtgctggtgttgggtgctggtgttgggtggtggtgcgtgctgtgtactttgggcacccgggtcgttgcccaggaggaagatgaaggctcgtgctcccccacctcctggaaaggctgccactctgcatgtgcacagtgaccagaagcccccccacgatggggccctcgggtcgcagcagaacttggttcgcatgaaggaggcgctgagggccagcaccatggacgtcaccgtggtcctgcctagtgggctggagaagaggagcgtgctcaatgggagccatgcgatgatggacctactggttgaactttgccttcagaaccacctgaatccatcccaccatgcccttgaaattcggtcttcagaaacccaacaacctttgagttttaagccaaatactttgattgggaccctgaatgtgcatactgtgtttctgaaagaaaaagttcctgaagagaaggttaagcctggtccccctaaggtgcctgagaaatctgtgcgtttggtcgtgaattacctgcggacacaaaaagctgttgtgcgtgtgagccctgaggttcctctccagaat

SEQ ID NO: 122307 - DNA, 3785 bp, Homo sapiens
  Payload ID: 3964
  Gene Symbol: COBL
  Gene Name: cordon-bleu WH2 repeat protein
  Uniprot ID: O75128
  ENST ID: ENST00000441453
  CDS Start-End: 132-1271
ctccgccggcccgcgtgggaggacgatgggtcagcgcggaaaaagtgaatgagggcggcagcggtggcggcggtagccagcgcctgactcggcgggcccggagcaccgcccgcgtcccggcccccggcaccatggacgcgccgcgcgcctcggcggccaagcccccgaccgggaggaagatgaaggctcgtgctcccccacctcctggaaaggctgccactctgcatgtgcacagtgaccagaagcccccccacgatggggccctcgggtcgcagcagaacttggttcgcatgaaggaggcgctgagggccagcaccatggacgtcaccgtggtcctgcctagtgggctggagaagaggagcgtgctcaatgggagccatgcgatgatggacctactggttgaactttgccttcagaaccacctgaatccatcccaccatgcccttgaaattcggtcttcagaaacccaacaacctttgagttttaagccaaatactttgattgggaccctgaatgtgcatactgtgtttctgaaagaaaaagttcctgaagagaaggttaagcctggtccccctaaggtgcctgagaaatctgtgcgtttggtcgtgaattacctgcggacacaaaaagctgttgtgcgtgtgagccctgaggttcctctccagaatattctcccagtcatttgtgcaaagtgtgaggtcagcccagagcacgtggttctcctcagggacaacattgccggagaggagctggagctgtccaagtccctgaacgagctcgggataaaggagctctacgcgtgggacaacagaagagaaacctttaggaaatcatcacttggcaatgatgagacagataaagagaagaaaaaatttctgggatttttcaaagttaataaaagaagcaatagtaagggctgtttaacgacccccaactccccatccatgcactcacgttctcttacgctgggtccatccctctcgctgggcagcatctcaggggtgtccgtgaagtcggagatgaagaagcgccgagcccctcctcctccaggttcagggccacctgtgcaagacaaggcatcggaaaaggtatctcttgggtcacagattgatttacagaagaagaagcggcgagcgccagctccccctccaccacagccaccaccaccgagtcccctgatccccaaccgcactgaggataaggaggagaacaggaagagcacgatggtttattgctgtgcgtcattccctactcaggccaagcgcttctgatggacgggcctcttcctgacctcggacctttcccagtgtctcttctgccctggctctgattttcctgttgttcttcctcctttcaggataaaagggctcattgtatacccagaatttacttcctttggggtttacatataaatgcattaataacagagatttgtttgattgaggtttatatttttttgaaggaggtaaattatatgcaaattttaggttgataatattcacctgtctgaaattcactgatacttggaaatgttcctgtgaagaactctgctttattttaattcattattaattcatgtttttcttattggatattcagttccagaatttattgccaatttttcttaaaactagattgtatccataaattgaccagtatagtcaatttggatagaactgaaactttctgtctacctggtaaaactaagtgcctaaaaacatgaactataaatgtagttactaggaactcacaacttatatatactatccattcaatgatacataggacccaatgtctttgtgtttttgaggttttcctgttactgtgtactttgccattttacatagttcactaaaaagaaagaagtgggagaagaagggtgttctattcattattctatattatgattctcttcattattctgttctcttcattattctattcatttcttcacccatttattcactaaacagtgacatagtacttacttgatgctaggtattacaccagttttgtgggctataagagtgaataacaagcacgtgacctctggccttggattttactacctgtggctccccaggcacatgaaaagaagtaaagatggttccatttgataagtactagtcacaagggttgtacatgtgataaagatgccagaggttgtgaccaccatgtctgtgcagaggtgctgctggctcctctttgagtgtgagatccctctgcagtcacacaacctcacccagttacgaagagctagtcacctcaactgcattgtcccaagacaggcagagtaggtaaaaatagtcatatgttaaaattcaaggtttagataaaaagacaactagttcttgcttgctttgattaacttttattatgcagatgcatttgaactggagaagcttgtcatgtttctctctaaaagatgtttttaaatgttattgctcaaaatggaaaaaaaaaaaaagaatcagtaagtattcctgacatgtaggattgttgcctggctgatcacaatgaaaatgttagctatgactaatgaaggaattatcacaacttacattggtattaataataaacaaatataagccaaagctatatataaccaatttagtgctatgtattggtgaaaaaaacagaaagttacagaaattactcacaatgaaacatagaacaagttagaaagggccttttttttttttgaaataaaggacttttgtctgataagtagcagtcatttgacctcaaatcattaaatggggaaagtctaaacaagaaaaggtaatgtttacctgaatgttggggaaagcattaggatttatggcccagacttaaagattgtagaagattgtatataattacagcaataagcatttgtgtaagaagtagctattatgctgaagaaagatgggcacacaaaatctctaggcaaatccttggaacaggggaaagtgatactgctcatagaattattggttcgagaggcagcaaatatgatgcaataagtatatcaaactcaattaaaaatagaggacagaggtatgtggtgggggaaaacaaatgcaatagggctaagtcagcttacagggggtgaatataatttgaacatggcacccccaatttacttgatcataaagttagccaaagacatgagtggtcgatctttgacaatactctagtgatctccatgagagatggcctgatagatgttggatagaatgaagggccatttgatgaacaagttttgtagatttacatgtgacttggcactgtgctgacattagagccttctaagaatcagataaattaattaggtgaaacattttttcccaaagcacttgcatttcagaaagtttctcatttctgactcagcttagaacccatcccttgttacaggtcatttctcctccttataagccatgtctgtttcttttttccatcatgtcatacaccctatccacaaaagatggtagctcacgttttctaactagagacgtgcaggcaagttgagagcatgaagaatcccttgggaataccaattctgtagcaaatgctaaggtaaaagaaaaactatgcattatttttcaactatagttggcttaaattcttagtttcaccctggagaccatgttgccagtggacaattgagcatgctgtgatttataaaatgcaagctagtttatatgataatgtttgccatctcactttaccagtactgttgaccttttcatatgattctaaaatcacttacttgtaaataaatactcctagttctgtagatgaaa

SEQ ID NO: 122308 - DNA, 4660 bp, Homo sapiens
  Payload ID: 3964
  Gene Symbol: COBL
  Gene Name: cordon-bleu WH2 repeat protein
  ENST ID: ENST00000445054
  CDS Start-End: 1-3321
ctgaaagaaaaagttcctgaagagaaggttaagcctggtccccctaaggtgcctgagaaatctgtgcgtttggtcgtgaattacctgcggacacaaaaagctgttgtgcgtgtgagccctgaggttcctctccagaatattctcccagtcatttgtgcaaagtgtgaggtcagcccagagcacgtggttctcctcagggacaacattgccggagaggagctggagctgtccaagtccctgaacgagctcgggataaaggagctctacgcgtgggacaacagaagagaaacctttaggaaatcatcacttggcaatgatgagacagataaagagaagaaaaaatttctgggatttttcaaagttaataaaagaagcaatagtaaggctgagcagctcgtgctgtcgggtgcagacagcgatgaggacacctccagggctgccccaggaaggggtttgaacggctgtttaacgacccccaactccccatccatgcactcacgttctcttacgctgggtccatccctctcgctgggcagcatctcaggggtgtccgtgaagtcggagatgaagaagcgccgagcccctcctcctccaggttcagggccacctgtgcaagacaaggcatcggaaaaggtatctcttgggtcacagattgatttacagaagaagaagcggcgagcgccagctccccctccaccacagccaccaccaccgagtcccctgatccccaaccgcactgaggataaggaggagaacaggaagagcacgatggtaagcctgcccctggggtctggcagccactgcagcccggatggagccccgcaggtgctgtcagaggcggaggagaccgtgtcagttggcagctgttttgcgtcggaggacacgaccgaggactcaggagtgatgagttccccctcagacatcgtctctctggactcgcagcaggacagcatgaaatacaaagacaagtgggccacagaccaggaagactgcagtgaccaggacctcgctggaaccccagacctgggtccccagaagagccccttgtgggagaagaatggctctgagaactcacatctgagaactgaaaaagctgtcacagcctcaaatgatgaagaagacctattaattgctggagagttccgtaaaacccttgcagaacttgatgaagacctggaagaaatggaagacagctatgaaacagacaccagctccctcaccagctccatccatggtgcatccaaccactgcccacaggatgccatgatccctcacggcgacacagatgcaatcccagtaacattcataggggaagtttcagatgatcctgtggattcggggttgttttccaatagaaacaacaatgctgggtctttcgactcggagggtgttgccagcaggagagactccctggcgccacttcaagctgagcacagccagccccatgaaaaggcaagggaggaagtacctgccctgcaccccgcttcccatgacgtcggaaaaggaatccgtgtggccttatctaacatctctaaagatgggaatctaatggaaacggcgcccagggtgacttcttttgcttcgaatcttcacacagacaacctaaatgcaaaagtgaaagacaaagtgtatggctgtgctgacggggagaggactcaagccacagagagagtgaattcccaaccggtgaatgaaaaggacagcaacgataaaaacgctgccttggcaccaacatcatggcaccaacgaggccaaaacccagggaaaagctacagacttaagcacggcctcacaacgtataaaatcattcctccaaagtcagagatgcgatgttacgacagagatgtgtccctctccaccggagccattaagattgacgagctggggaacttggtgagtcctcacgccaccggcatcaggatcatttccctgtcttcgtctgtgcctgaagcagaatctcagcccattgggaaagtcagagagttctggaggtgcaactctgtggaaaaacacctgggccgaccctcagagagctctgccaggggacccccctccacccctgtgcccacgcagacgcagaatccagagagcagactccaagcagaccccaagccaatatcgccccagcagaagtctgcccaccatgagggccggaaccccctaggggaggggagaaaccagccccccaccatgggcatgggtcacgtgagggtgccagcagctcacaccacagaagtcacatttctcaagcctcagagaagaacgtccagccagtatgtggcctctgccattgccaagcgcataggagccccaaaagtccatgctgatgtggtgaggccacacggttatgccgagaagggttatgcaggcaaggcgccagtgctggctgcaccacctgtcactgtgaaagatgacaggacatccagcccacactcagagacacaaggatggaaggatggtgcccagtggccctgtgtcactcctcccaacaaccacggggaagatttggcagtgggagcccctcctaggggggaggtcattggcccacacaggaagttgtctactcaggacagacctgctgctatccacagaagctcctgtttctcactggttcagtcttcccagagggatcgtgtttctgtgggacagagctgtggtttcagtggaaagcaaagcacaagtagccaggaggccagctcagcatctgagcccagacgcgcacctgatggtacagacccaccccctccacacacatctgacactcaggcctgcagcagggagctggtcaatggctctgtgcgcgccccaggccacggcgagccttcccaccctccaggagggtctggcacagaaagccacattctcctagaaagagaggaaaagcccagtgtgttctctacagatggaaatgaaacagacagtatttggccacccagcatttttgggccgaagaaaaaattcaaacctgttgtccagagaccagtcccaaaagacacatccctgcactctgccctgatggaagccatccactctgcgggagggaaggacagactacgcaagacggcagaacacaccggggagggcaggccagcgaaactgtcctacacggaggcagagggcgaacgatctgcactgctggcagctatccgcgggcacagcggcacctgcagcctgaggaaggctctctctgcaccaaggacggcctccaggttcagcacgggcaccctcagcaacaccgcagacgcaaggcaagccttgatggacgccatccgctccggcacaggggctgcgagactgagaaaggtgcccttgctcgtgtgaatgaacagaggccagagaattgcagaaacccacctgtaatatgcccacaggcgtcactcaaggagtctgcatagccaggaacatcaagttttggtgttactttcttgtctacaggccaaatgcgcacagttgattttcggtgtgttcctgtataacggcttgaaaggaaaggagaagatgctgtgtcgctgcgcagctcgtgtgccaaggaaatgtgttttgcctctgaatatcttaagttgctaataaacgattcttgttggcaggttaatgggactataaatgctggagcccagcactcacacttaattatatttatgggcaaagtaaaaagaatcatgccttagactgattttggacctttgagacttttaccacatacagatggatgaaactacttactgatttaagatcttttgaattttagaaaaaacatatgaatcagatggaacaatctgaatgtgatatgctccatgatgctgtgtgttttggtagtaagaaaaaaaaattgggaggcttttcaaaggtggctttgttaggtagtaaaactgctggattcttcttcctcaaatatttggggctaacacttcacagagggtcacagtccatgatctgaccaactaagcttttaaaaatcaactattaccacccagaaaacagtcctacgtgatcatgtggccagggcatgcccgagtcctgcaagggtggcgggtggctgaggtcacaccaccactggagtggatgggcagtgccccacatggacagccattccccaggctatgaagtgacataggcctcccccacggtgcctgtgtacggagcctgatgacttcactgggagccttctggaatcctgcagagggtcaaggagcagggatgttggatgcccacctgtcaagagttcagatcaaagttgcgctgagagcatcacaattttggttcagccttgacgcgtttgtccaacagctcattggctccctttgtatgatatcgtggtcttctcacatggtgcccagtcaccaatatttataatgaggtctaactacagcagtagtttttcatatatatctctaaaacattttgttatattgaaaaaagtaatagaaatcaagatgtgttgatgaaataaaatgtgtatctgagtgagaaaacaagtatggtgaggtcactttaatgtttcacagcgatctcagatctaggcctcaggtagaatggaagctgttctgcattcactgattaacgttgctaaactcttggtgaggcacgagctaccagccaattgctcttcatcacagctatctgtcttttagtgccacaaataaaagaaaatcaaatctta

SEQ ID NO: 122309 - DNA, 1842 bp, Homo sapiens
  Payload ID: 3964
  Gene Symbol: COBL
  Gene Name: cordon-bleu WH2 repeat protein
  ENST ID: ENST00000452534
  CDS Start-End: 1-1842
ccatgcgatgatggacctactggttgaactttgccttcagaaccacctgaatccatcccaccatgcccttgaaattcggtcttcagaaacccaacaacctttgagttttaagccaaatactttgattgggaccctgaatgtgcatactgtgtttctgaaagaaaaagttcctgaagagaaggttaagcctggtccccctaaggtgcctgagaaatctgtgcgtttggtcgtgaattacctgcggacacaaaaagctgttgtgcgtgtgagccctgaggttcctctccagaatattctcccagtcatttgtgcaaagtgtgaggtcagcccagagcacgtggttctcctcagggacaacattgccggagaggagctggagctgtccaagtccctgaacgagctcgggataaaggagctctacgcgtgggacaacagaagagaaacctttaggaaatcatcacttggcaatgatgagacagataaagagaagaaaaaatttctgggatttttcaaagttaataaaagaagcaatagtaagggctgtttaacgacccccaactccccatccatgcactcacgttctcttacgctgggtccatccctctcgctgggcagcatctcaggggtgtccgtgaagtcggagatgaagaagcgccgagcccctcctcctccaggttcagggccacctgtgcaagacaaggcatcggaaaaggtatctcttgggtcacagattgatttacagaagaagaagcggcgagcgccagctccccctccaccacagccaccaccaccgagtcccctgatccccaaccgcactgaggataaggaggagaacaggaagagcacgatgggtggtggacggcaggtgccacaaaagcctcccagaggcactgctcggggtccaccccagttagtgcttcccccacccccgccctaccctcctcccgacacagacgtggtggagcctctcagctttcccggggaaggcgctggttccgaggcctcagacccgatacccaaactaagcctgcccctggggtctggcagccactgcagcccggatggagccccgcaggtgctgtcagaggcggaggagaccgtgtcagttggcagctgttttgcgtcggaggacacgaccgaggactcaggagtgatgagttccccctcagacatcgtctctctggactcgcagcaggacagcatgaaatacaaagacaagtgggccacagaccaggaagactgcagtgaccaggacctcgctggaaccccagacctgggtccccagaagagccccttgtgggagaagaatggctctgagaactcacatctgagaactgaaaaagctgtcacagcctcaaatgatgaagaagacctattaattgctggagagttccgtaaaacccttgcagaacttgatgaagacctggaagaaatggaagacagctatgaaacagacaccagctccctcaccagctccatccatggtgcatccaaccactgcccacaggatgccatgatccctcacggcgacacagatgcaatcccagtaacattcataggggaagtttcagatgatcctgtggattcggggttgttttccaatagaaacaacaatgctgggtctttcgactcggagggtgttgccagcaggagagactccctggcgccacttcaagctgagcacagccagccccatgaaaaggcaagggaggaagtacctgccctgcaccccgcttcccatgacgtcggaaaaggaatccgtgtggccttatctaacatctctaaagatgggaatctaatggaaacggcgcccagggtgacttcttttgcttcgaatcttca

SEQ ID NO: 122310 - DNA, 4780 bp, Homo sapiens
  Payload ID: 3964
  Gene Symbol: COBL
  Gene Name: cordon-bleu WH2 repeat protein
  ENST ID: ENST00000431948
  CDS Start-End: 1-3441
ctcagggacaacattgccggagaggagctggagctgtccaagtccctgaacgagctcgggataaaggagctctacgcgtgggacaacagaagagaaacctttaggaaatcatcacttggcaatgatgagacagataaagagaagaaaaaatttctgggatttttcaaagttaataaaagaagcaatagtaaggctgagcagctcgtgctgtcgggtgcagacagcgatgaggacacctccagggctgccccaggaaggggtttgaacggctgtttaacgacccccaactccccatccatgcactcacgttctcttacgctgggtccatccctctcgctgggcagcatctcaggggtgtccgtgaagtcggagatgaagaagcgccgagcccctcctcctccaggttcagggccacctgtgcaagacaaggcatcggaaaaggtatctcttgggtcacagattgatttacagaagaagaagcggcgagcgccagctccccctccaccacagccaccaccaccgagtcccctgatccccaaccgcactgaggataaggaggagaacaggaagagcacgatgggtggtggacggcaggtgccacaaaagcctcccagaggcactgctcggggtccaccccagttagtgcttcccccacccccgccctaccctcctcccgacacagacgtggtggagcctctcagctttcccggggaaggcgctggttccgaggcctcagacccgatacccaaactaagcctgcccctggggtctggcagccactgcagcccggatggagccccgcaggtgctgtcagaggcggaggagaccgtgtcagttggcagctgttttgcgtcggaggacacgaccgaggactcaggagtgatgagttccccctcagacatcgtctctctggactcgcagcaggacagcatgaaatacaaagacaagtgggccacagaccaggaagactgcagtgaccaggacctcgctggaaccccagacctgggtccccagaagagccccttgtgggagaagaatggctctgagaactcacatctgagaactgaaaaagctgtcacagcctcaaatgatgaagaagacctattaattgctggagagttccgtaaaacccttgcagaacttgatgaagacctggaagaaatggaagacagctatgaaacagacaccagctccctcaccagctccatccatggtgcatccaaccactgcccacaggatgccatgatccctcacggcgacacagatgcaatcccagtaacattcataggggaagtttcagatgatcctgtggattcggggttgttttccaatagaaacaacaatgctgggtctttcgactcggagggtgttgccagcaggagagactccctggcgccacttcaagctgagcacagccagccccatgaaaaggcaagggaggaagtacctgccctgcaccccgcttcccatgacgtcggaaaaggaatccgtgtggccttatctaacatctctaaagatgggaatctaatggaaacggcgcccagggtgacttcttttgcttcgaatcttcacacagacaacctaaatgcaaaagtgaaagacaaagtgtatggctgtgctgacggggagaggactcaagccacagagagagtgaattcccaaccggtgaatgaaaaggacagcaacgataaaaacgctgccttggcaccaacatcatggcaccaacgaggccaaaacccagggaaaagctacagacttaagcacggcctcacaacgtataaaatcattcctccaaagtcagagatgcgatgttacgacagagatgtgtccctctccaccggagccattaagattgacgagctggggaacttggtgagtcctcacgccaccggcatcaggatcatttccctgtcttcgtctgtgcctgaagcagaatctcagcccattgggaaagtcagagagttctggaggtgcaactctgtggaaaaacacctgggccgaccctcagagagctctgccaggggacccccctccacccctgtgcccacgcagacgcagaatccagagagcagactccaagcagaccccaagccaatatcgccccagcagaagtctgcccaccatgagggccggaaccccctaggggaggggagaaaccagccccccaccatgggcatgggtcacgtgagggtgccagcagctcacaccacagaagtcacatttctcaagcctcagagaagaacgtccagccagtatgtggcctctgccattgccaagcgcataggagccccaaaagtccatgctgatgtggtgaggccacacggttatgccgagaagggttatgcaggcaaggcgccagtgctggctgcaccacctgtcactgtgaaagatgacaggacatccagcccacactcagagacacaaggatggaaggatggtgcccagtggccctgtgtcactcctcccaacaaccacggggaagatttggcagtgggagcccctcctaggggggaggtcattggcccacacaggaagttgtctactcaggacagacctgctgctatccacagaagctcctgtttctcactggttcagtcttcccagagggatcgtgtttctgtgggacagagctgtggtttcagtggaaagcaaagcacaagtagccaggaggccagctcagcatctgagcccagacgcgcacctgatggtacagacccaccccctccacacacatctgacactcaggcctgcagcagggagctggtcaatggctctgtgcgcgccccaggccacggcgagccttcccaccctccaggagggtctggcacagaaagccacattctcctagaaagagaggaaaagcccagtgtgttctctacagatggaaatgaaacagacagtatttggccacccagcatttttgggccgaagaaaaaattcaaacctgttgtccagagaccagtcccaaaagacacatccctgcactctgccctgatggaagccatccactctgcgggagggaaggacagactacgcaagacggcagaacacaccggggagggcaggccagcgaaactgtcctacacggaggcagagggcgaacgatctgcactgctggcagctatccgcgggcacagcggcacctgcagcctgaggaaggtggcatcctctgcttctgaggagctccagagcttccgagatgccgcactctctgctcagggctcggaaagtcctctgctagaagaccttggtcttctgtccccaccagccattcccccaccaccccctccaccctcccaggctctctctgcaccaaggacggcctccaggttcagcacgggcaccctcagcaacaccgcagacgcaaggcaagccttgatggacgccatccgctccggcacaggggctgcgagactgagaaaggtgcccttgctcgtgtgaatgaacagaggccagagaattgcagaaacccacctgtaatatgcccacaggcgtcactcaaggagtctgcatagccaggaacatcaagttttggtgttactttcttgtctacaggccaaatgcgcacagttgattttcggtgtgttcctgtataacggcttgaaaggaaaggagaagatgctgtgtcgctgcgcagctcgtgtgccaaggaaatgtgttttgcctctgaatatcttaagttgctaataaacgattcttgttggcaggttaatgggactataaatgctggagcccagcactcacacttaattatatttatgggcaaagtaaaaagaatcatgccttagactgattttggacctttgagacttttaccacatacagatggatgaaactacttactgatttaagatcttttgaattttagaaaaaacatatgaatcagatggaacaatctgaatgtgatatgctccatgatgctgtgtgttttggtagtaagaaaaaaaaattgggaggcttttcaaaggtggctttgttaggtagtaaaactgctggattcttcttcctcaaatatttggggctaacacttcacagagggtcacagtccatgatctgaccaactaagcttttaaaaatcaactattaccacccagaaaacagtcctacgtgatcatgtggccagggcatgcccgagtcctgcaagggtggcgggtggctgaggtcacaccaccactggagtggatgggcagtgccccacatggacagccattccccaggctatgaagtgacataggcctcccccacggtgcctgtgtacggagcctgatgacttcactgggagccttctggaatcctgcagagggtcaaggagcagggatgttggatgcccacctgtcaagagttcagatcaaagttgcgctgagagcatcacaattttggttcagccttgacgcgtttgtccaacagctcattggctccctttgtatgatatcgtggtcttctcacatggtgcccagtcaccaatatttataatgaggtctaactacagcagtagtttttcatatatatctctaaaacattttgttatattgaaaaaagtaatagaaatcaagatgtgttgatgaaataaaatgtgtatctgagtgagaaaacaagtatggtgaggtcactttaatgtttcacagcgatctcagatctaggcctcaggtagaatggaagctgttctgcattcactgattaacgttgctaaactcttggtgaggcacgagctaccagccaattgctcttcatcacagctatctgtcttttagtgccacaaataaaagaaaatcaaatctta

SEQ ID NO: 122311 - DNA, 1941 bp, Homo sapiens
  Payload ID: 3964
  Gene Symbol: COBL
  Gene Name: cordon-bleu WH2 repeat protein
  ENST ID: ENST00000632460
  CDS Start-End: 131-1315
tccgccggcccgcgtgggaggacgatgggtcagcgcggaaaaagtgaatgagggcggcagcggtggcggcggtagccagcgcctgactcggcgggcccggagcaccgcccgcgtcccggcccccggcaccatggacgcgccgcgcgcctcggcggccaagcccccgaccgggaggaagatgaaggctcgtgctcccccacctcctggaaaggctgccactctgcatgtgcacagtgaccagaagcccccccacgatggggccctcgggtcgcagcagaacttggttcgcatgaaggaggcgctgagggccagcaccatggacgtcaccgtggtcctgcctagtgggctggagaagaggagcgtgctcaatgggagccatgcgatgatggacctactggttgaactttgccttcagaaccacctgaatccatcccaccatgcccttgaaattcggtcttcagaaacccaacaacctttgagttttaagccaaatactttgattgggaccctgaatgtgcatactgtgtttctgaaagaaaaagttcctgaagagaaggttaagcctggtccccctaaggtgcctgagaaatctgtgcgtttggtcgtgaattacctgcggacacaaaaagctgttgtgcgtgtgagccctgaggttcctctccagaatattctcccagtcatttgtgcaaagtgtgaggtcagcccagagcacgtggttctcctcagggacaacattgccggagaggagctggagctgtccaagtccctgaacgagctcgggataaaggagctctacgcgtgggacaacagaagagttcgtctgagcaaaactcagtccgagccttccctgagctgtcaagaaacctttaggaaatcatcacttggcaatgatgagacagataaagagaagaaaaaatttctgggatttttcaaagttaataaaagaagcaatagtaagggctgtttaacgacccccaactccccatccatgcactcacgttctcttacgctgggtccatccctctcgctgggcagcatctcaggggtgtccgtgaagtcggagatgaagaagcgccgagcccctcctcctccaggttcagggccacctgtgcaagacaaggcatcggaaaaggtatctcttgggtcacagattgatttacagaagaagaagcggcgagcgccagctccccctccaccacagccaccaccaccgagtcccctgatccccaaccgcactgaggataaggaggagaacaggaagagcacgatggtttattgctgtgcgtcattccctactcaggccaagcgcttctgatggacgggcctcttcctgacctcggacctttcccagtgtctcttctgccctggctctgattttcctgttgttcttcctcctttcaggataaaagggctcattgtatacccagaatttacttcctttggggtttacatataaatgcattaataacagagatttgtttgattgaggtttatatttttttgaaggaggtaaattatatgcaaattttaggttgataatattcacctgtctgaaattcactgatacttggaaatgttcctgtgaagaactctgctttattttaattcattattaattcatgtttttcttattggatattcagttccagaatttattgccaatttttcttaaaactagattgtatccataaattgaccagtatagtcaatttggatagaactgaaactttctgtctacctggtaaaactaagtgcctaaaaacatgaactataaatgtagttactaggaactcacaacttatatatactatccattcaatgatacataggacccaatgtctttgtgtttttgaggttttcctgttactgtgtactttgccattttacatagttcactaaaaagaaagaagtgggagaagaagggtgttctattcattattc

SEQ ID NO: 122312 - DNA, 4898 bp, Homo sapiens
  Payload ID: 3965
  Gene Symbol: COBLL1
  Gene Name: cordon-bleu WH2 repeat protein-like 1
  Uniprot ID: Q53SF7
  ENST ID: ENST00000342193
  CDS Start-End: 217-3717
cggcgcccgcgggctgggagccggggcccgcaggtggaagcgcacccgggaggcgggccggccggggctggagcggctcgggcgggctcttgacgctcagccagcttcgctccggcctcgggaaggcgcgcgtcccgccctgacccgccggcctctcccaccccagcagtgacgcgccgcctgggagctggagcccgcgcagcgccccgcagggcgatggacggccgaaccccgcgcccgcaggacgccccagccaggagaaaaccaaaagccaaggcaccacttcctccagctgagaccaaatatactgatgtctcttcagctgctgattctgtagaatccactgctttcatcatggaacagaaagaaaacatgatagataaagacgttgaactctcagtggtcctacctggggatattatcaaatctactactgttcatggcagtaaacctatgatggacttgttgatattcctttgtgcacagtatcacttaaatccatcaagttacacaatcgatctgttgtcagctgaacagaaccacattaaatttaagccaaacacaccaataggaatgttggaggtagagaaggtaattttaaagccaaaaatgttggataagaaaaaacctacacctataataccagagaaaactgtgagagtagtgattaattttaagaaaacacagaagaccatagtgagagtgagtccacatgcatcgcttcaagagcttgcccctattatatgtagcaaatgtgagtttgatccgttgcatacactattgttgaaagattatcaatcgcaggagcctcttgacttgacaaaatctcttaatgacctgggactaagagaattatatgcgatggatgtcaacagagagtcctgccaaatatcacaaaacctagatattatgaaggagaaagaaaataaagggtttttcagtttttttcaacgcagtaagaaaaagcgagaccaaactgcaagtgcccctgcaacccctctagtaaataagcaccgcccaacttttacaaggtccaataccatttccaaaccatatatttccaacaccctgccgtcggatgcacccaagaagaggcgggctccactgcccccgatgccagcatctcagagtgtcccccaagaccttgcacacatccaggagaggcctgcttcttgtatagtgaaatccatgagcgtggatgagacagataagagtccctgtgaagcaggaagagtgagggcaggttcactgcagctcagcagcatgtctgcagggaattcatctttgagaaggacaaagcgaaaagcaccttccccaccctccaaaatacccccgcatcaaagtgatgaaaatagtcgtgtgactgccttacagccagtagatggagttcctccagacagtgcttcagaagcaaactctcctgaggagctatccagcccagaaacctttcaccctgggctttccagtcaggagcagtgcactgcgcccaaactgatggaggaaacctctgtctttgagtgccctgggacacctgaggcagccataacatcattgacatctggaataagctctgattatagccttgaagagatagatgaaaaggaagaactgagtgaagtgcctaaagttgaagctgaaaatatttctccgaagtcacaagatattccttttgtatctactgatataataaatacactgaaaaatgatcctgactcagcccttggcaatggtagtggagagttctcacaaaactccatggaagaaaaacaagaaactaaaagcacagatggacaagaaccacacagtgtagtatatgatacaagcaatggaaagaaggtagttgacagtataagaaacttgaagtcgttgggcccaaaccaagagaatgttcaaaatgaaataattgtctatccagagaacacagaagacaatatgaaaaatggagtgaagaaaacagaaatcaatgtagaaggtgttgccaaaaataacaacattgatatggaagttgagagaccatcaaactctgaggcacatgaaactgatactgctataagttacaaggaaaaccatctagcagcttcatcagtaccagatcaaaaactgaatcaacccagtgcagaaaagacaaaagatgcagcaattcagacaaccccttcttgtaacagttttgatgggaaacaccaagatcataatttatctgactccaaagttgaagaatgtgtgcaaacttcaaataacaacatatcaactcaacactcatgcttaagttcacaagattctgtaaatacctcaagggaattcaggagtcaaggcaccctaattatacattcagaagatccgcttaccgtaaaagatccaatttgtgcacatggtaatgatgatcttttgcctcctgtagataggattgacaaaaattccactgcttcttacctaaagaattacccactttatagacaggactacaatcccaagccaaaaccttcaaatgaaattacacgagagtatatacccaaaattggcatgactacttataaaatagtgcctcccaaatccttggaaatatcgaaagactggcaatcagaaaccatagagtataaagatgatcaggacatgcatgctttagggaaaaagcacactcatgagaatgtgaaagaaactgccatccaaacagaagattctgctatttctgaaagcccagaagagccactgccaaaccttaaaccgaagcctaacctgagaacagagcatcaagtgcccagttctgtgagctcacctgatgatgccatggttagtcctctgaaacctgctcccaaaatgacaagagacactggcacagctccttttgcaccaaatttggaagaaataaacaatattttggaatcaaaatttaaatctcgggcttcaaatgcccaggccaaacccagctctttttttttgcagatgcagaagagagtatcgggtcactatgtgacatctgcagctgccaagagtgtccatgctgcccctaatcctgctccaaaagaactgacaaataaagaggcagaaagggatatgctgccttctccggagcagactctttctcccttaagtaaaatgcctcactctgttccacaaccccttgttgaaaaaactgatgatgatgtcatcggtcaggctcctgctgaagcctcccctcctcccatagctccaaaacctgtgacaattcctgctagtcaggtatccacacaaaatctgaagactttgaaaacttttggtgccccacgaccatactcaagttctggtccttcaccgtttgctcttgctgtagtgaaaaggtcacagtctttcagtaaagagcgcaccgagtcacctagtgccagtgcattggtccaacctccagccaacacagaggaagggaagactcattctgtaaataaatttgtggacatcccacagcttggtgtgtctgataaggaaaataactctgcacataatgaacagaattcccaaataccaactccaactgatggcccatcattcactgttatgagacaaagttctttaacattccaaagctctgacccagaacagatgcgacagagtttgctgactgcaatccgttcgggagaggctgctgccaaattgaaaagggttaccattccatcaaatacaatatctgtgaatggaaggtcaagactcagccattccatgtcccctgatgcccaggacggccattaaatgttaccctgccacaccactgcacttcacttccacttcagaccaacttcatactaatggaacattttggcaaatgtatattcagatgtacactaatatattatctattaaaatattagaatttgtgttgtggcttttaatgccagaagaaaagttaccagaatttataatttatagtaattttttgatcttttttttgccttaagagttgaatatgctgctttagaactttaaaacaaggtgtaaatgattttcattttttacaaatgaaaaataattcctttgtattgatttcacttaccagcacattctctacaatggtgacttagacaaaagtataagattcatagactttatatttgtatgacatacaactaggacaaacatagatatgacatttgctgcctcagtgtagcaattggaaatatttataagttatatgaaagcctgttttgggctgaaagaatgatttagaaaactagtgataccaaataagtatattcagttcaataattattttcaatgatgaatcacttagtgtgaaagacttgccttgtgtattctttatgtaattacaaatcactgtcaattttatgggaagctcatagtattttaatattttattaacatggaactcttgtttttttaatctttagaacttaaattctacaagaattttaaatattttctgtatataattatgacattgtcacacagaaattacacattttatgtgccagaagccttaaacatctttctgtgaaaatgctgatatattgtgacagttatttcacatttgatatgtagagaggaataggggttagtttatgtttatattgaaaaactttaaagactatttggaagttccagaaattctggttttaattcaagtaaaatgataaaatagtcattatatagttcagatgctaatattctaagtaataatatatatttacattgaagctaaaactgttaagcaaaacaatgcccatttgtcggcttacagctcttccggagtctagagcctgttggtgttctgtccctactttaagaatttaattgctcacttattctgaaagctttgttcaaacaagatgatattaaatttgttttcactaaaactactgggatatctgcctcttggggatttttttttcaatttaataaaagcaagttgtata

SEQ ID NO: 122313 - DNA, 9367 bp, Homo sapiens
  Payload ID: 3965
  Gene Symbol: COBLL1
  Gene Name: cordon-bleu WH2 repeat protein-like 1
  Uniprot ID: Q53SF7
  ENST ID: ENST00000375458
  CDS Start-End: 223-3609
cggcggcggcgcccgcgggctgggagccggggcccgcaggtggaagcgcacccgggaggcgggccggccggggctggagcggctcgggcgggctcttgacgctcagccagcttcgctccggcctcgggaaggcgcgcgtcccgccctgacccgccggcctctcccaccccagcagtgacgcgccgcctgggagctggagcccgcgcagcgccccgcagggcgatggacggccgaaccccgcgcccgcaggacgccccagccaggagaaaaccaaaagccaaggcaccacttcctccagctgagaccaaatatactgatgtctcttcagctgctgattctgtagaatccactgctttcatcatggaacagaaagaaaacatgatagataaagacgttgaactctcagtggtcctacctggggatattatcaaatctactactgttcatggcagtaaacctatgatggacttgttgatattcctttgtgcacagtatcacttaaatccatcaagttacacaatcgatctgttgtcagctgaacagaaccacattaaatttaagccaaacacaccaataggaatgttggaggtagagaaggtaattttaaagccaaaaatgttggataagaaaaaacctacacctataataccagagaaaactgtgagagtagtgattaattttaagaaaacacagaagaccatagtgagagtgagtccacatgcatcgcttcaagagcttgcccctattatatgtagcaaatgtgagtttgatccgttgcatacactattgttgaaagattatcaatcgcaggagcctcttgacttgacaaaatctcttaatgacctgggactaagagaattatatgcgatggatgtcaacagagagtcctgccaaatatcacaaaacctagatattatgaaggagaaagaaaataaagggtttttcagtttttttcaacgcagtaagaaaaagcgagaccaaactgcaagtgcccctgcaacccctctagtaaataagcaccgcccaacttttacaaggtccaataccatttccaaaccatatatttccaacaccctgccgtcggatgcacccaagaagaggcgggctccactgcccccgatgccagcatctcagagtgtcccccaagaccttgcacacatccaggagaggcctgcttcttgtatagtgaaatccatgagcgtggatgagacagataagagtccctgtgaagcaggaagagtgagggcaggttcactgcagctcagcagcatgtctgcagggaattcatctttgagaaggacaaagcgaaaagcaccttccccaccctccaaaatacccccgcatcaaagtgatgaaaatagtcgtgtgactgccttacagccagtagatggagttcctccagacagtgcttcagaagcaaactctcctgaggagctatccagcccagctggaataagctctgattatagccttgaagagatagatgaaaaggaagaactgagtgaagtgcctaaagttgaagctgaaaatatttctccgaagtcacaagatattccttttgtatctactgatataataaatacactgaaaaatgatcctgactcagcccttggcaatggtagtggagagttctcacaaaactccatggaagaaaaacaagaaactaaaagcacagatggacaagaaccacacagtgtagtatatgatacaagcaatggaaagaaggtagttgacagtataagaaacttgaagtcgttgggcccaaaccaagagaatgtagttcaaaatgaaataattgtctatccagagaacacagaagacaatatgaaaaatggagtgaagaaaacagaaatcaatgtagaaggtgttgccaaaaataacaacattgatatggaagttgagagaccatcaaactctgaggcacatgaaactgatactgctataagttacaaggaaaaccatctagcagcttcatcagtaccagatcaaaaactgaatcaacccagtgcagaaaagacaaaagatgcagcaattcagacaaccccttcttgtaacagttttgatgggaaacaccaagatcataatttatctgactccaaagttgaagaatgtgtgcaaacttcaaataacaacatatcaactcaacactcatgcttaagttcacaagattctgtaaatacctcaagggaattcaggagtcaaggcaccctaattatacattcagaagatccgcttaccgtaaaagatccaatttgtgcacatggtaatgatgatcttttgcctcctgtagataggattgacaaaaattccactgcttcttacctaaagaattacccactttatagacaggactacaatcccaagccaaaaccttcaaatgaaattacacgagagtatatacccaaaattggcatgactacttataaaatagtgcctcccaaatccttggaaatatcgaaagactggcaatcagaaaccatagagtataaagatgatcaggacatgcatgctttagggaaaaagcacactcatgagaatgtgaaagaaactgccatccaaacagaagattctgctatttctgaaagcccagaagagccactgccaaaccttaaaccgaagcctaacctgagaacagagcatcaagtgcccagttctgtgagctcacctgatgatgccatggttagtcctctgaaacctgctcccaaaatgacaagagacactggcacagctccttttgcaccaaatttggaagaaataaacaatattttggaatcaaaatttaaatctcgggcttcaaatgcccaggccaaacccagctctttttttttgcagatgcagaagagagtatcgggtcactatgtgacatctgcagctgccaagagtgtccatgctgcccctaatcctgctccaaaagaactgacaaataaagaggcagaaagggatatgctgccttctccggagcagactctttctcccttaagtaaaatgcctcactctgttccacaaccccttgttgaaaaaactgatgatgatgtcatcggtcaggctcctgctgaagcctcccctcctcccatagctccaaaacctgtgacaattcctgctagtcaggtatccacacaaaatctgaagactttgaaaacttttggtgccccacgaccatactcaagttctggtccttcaccgtttgctcttgctgtagtgaaaaggtcacagtctttcagtaaagagcgcaccgagtcacctagtgccagtgcattggtccaacctccagccaacacagaggaagggaagactcattctgtaaataaatttgtggacatcccacagcttggtgtgtctgataaggaaaataactctgcacataatgaacagaattcccaaataccaactccaactgatggcccatcattcactgttatgagacaaagttctttaacattccaaagctctgacccagaacagatgcgacagagtttgctgactgcaatccgttcgggagaggctgctgccaaattgaaaagggttaccattccatcaaatacaatatctgtgaatggaaggtcaagactcagccattccatgtcccctgatgcccaggacggccattaaatgttaccctgccacaccactgcacttcacttccacttcagaccaacttcatactaatggaacattttggcaaatgtatattcagatgtacactaatatattatctattaaaatattagaatttgtgttgtggcttttaatgccagaagaaaagttaccagaatttataatttatagtaattttttgatcttttttttgccttaagagttgaatatgctgctttagaactttaaaacaaggtgtaaatgattttcattttttacaaatgaaaaataattcctttgtattgatttcacttaccagcacattctctacaatggtgacttagacaaaagtataagattcatagactttatatttgtatgacatacaactaggacaaacatagatatgacatttgctgcctcagtgtagcaattggaaatatttataagttatatgaaagcctgttttgggctgaaagaatgatttagaaaactagtgataccaaataagtatattcagttcaataattattttcaatgatgaatcacttagtgtgaaagacttgccttgtgtattctttatgtaattacaaatcactgtcaattttatgggaagctcatagtattttaatattttattaacatggaactcttgtttttttaatctttagaacttaaattctacaagaattttaaatattttctgtatataattatgacattgtcacacagaaattacacattttatgtgccagaagccttaaacatctttctgtgaaaatgctgatatattgtgacagttatttcacatttgatatgtagagaggaataggggttagtttatgtttatattgaaaaactttaaagactatttggaagttccagaaattctggttttaattcaagtaaaatgataaaatagtcattatatagttcagatgctaatattctaagtaataatatatatttacattgaagctaaaactgttaagcaaaacaatgcccatttgtcggcttacagctcttccggagtctagagcctgttggtgttctgtccctactttaagaatttaattgctcacttattctgaaagctttgttcaaacaagatgatattaaatttgttttcactaaaactactgggatatctgcctcttggggatttttttttcaatttaataaaagcaagttgtatatttggggtgctttttaaaatatatagtttgtgtcaaccagcatatttatttcccttacctgatgcatacatttctattagccagtgaacaaacaagaaatttgtaagatttaccatttatcagggatccctagtgtacatttaagccctggcattctgactccaaaatgcatggtctaagcatttaaaatgtttagcatagttcctgatacatggcatggccatcttaaatgctaaatgttgctgctgttttccttgaatcagttggagagaccctcatatatagatacttaagttatgttgttataagcaagtagagaaaggagtgaattttttttaaaaaattgtgttgtcataattatctacttataaaaatataaatttggatccctaatttaaaccttcatatattttgagttggattgaagacttaaagacaagcgacatgtaagatgttttcaatatattaatatataagaaaggcttaatttatgaagatatgaaagttcctacaactcatgataagtctacctaatagaaatatcagcacattattcttacaagaggaaattcaaaaggccaacaaacatggaaaaaaaatactcttcactgataatcagggaaatacaagttaaaaacatggaaaggtaccacatcaaattagcaaaaacggaagtttcaaaatagcaagtgttgtcaggaacatcaaacagtgggaactctactgttggtgggaaaatacactggcataactaccagttctgcaatatctagtaaaattaaagattccttaccatgttaccttaaataagtacttatgcacatgcataaggagacatctgcaaaaatgttcacggcagccttgtgtaaaacagcagaaaggggtcctaacccgtgctcagctttagtaatgcatatattcatatgatagacttccacacagcagtccaaatgaacaagctagagctatatatgtcagcatgaatacatctcaaaaacaagtgacaagagtgagtggtggaacaagtcgtgttttatgaaattagttacataaagtataaatataaaaaatgatactataaattatggctgtatatgtaggaaaaaaatttgctggtggttacctgtgggaaccaagaaagactgaattgagatttataagaggcatcaattgtgttcgtagtattttataaactgctgtttgaaaacaagtgcttattatattctaaattctagtatacttgtagtttataattataataaaataatgttttaaaggtcacataggatttagggggctatgtatataaaccattaatacatgtatgttctgaaaagttgccttatcgacaccattttaggagaacatgtgctatcctgtcaatggggaaagaaatttgtgacaagtagttttcactcatcatatcctaaaataacagcacaaggaagatacaggaatggtctagaaccaacttttgactttcatgtataatttttagcatctaggcattttgcttttccttctttcctccaatcaagttatttatttatataatattaaaattataattcagattacatatatatgatagagtataaaatacattctttttcatccccagcatcccactctcctctccaaagatagctgttaatattttgatatgaagccctatatagatgtatttatatgaagtacatgtgtgcaggtttgttgggggcttttgtgtgtgtgtgtgtgtgtgtgtgtgtgtgtgtgtatgtgtgtttcttaacatgaaaggaggtcacactctaatactatgtaacaacttgccttttataccagcagtgttctggaagagcttttctttttacacatacagatcgatcgtatttctgttagccattctattgtttcttgctgcggtacataatgttggctggagtgaagagattggggttcagatcacaagtctgccacttatgagtcatgggatcttgggcaaattactttctctatgcttcattttctcttctgaaaaatgaattaatatgaataaaaatgaaccttattttaaaaacggcaggcaattcatcttttaaagttacctgatgtcaatactataagtgaacaggtattatttgcctaatatactccctattctttgaggagtgacccttcttccgatttcacctcttcatgaactgccagatctggccttggccactaggcactggcaacagcatacacactctgtcatcttatccaagtccttgaaatgagaccaatctttgtcctgagacttagttacttataggtgcttaaaacccaaagcgtcccaattgatacaattatgtatgtgtctaattccagtttactttgtacccactaccagtagagaaaataagtatcaaagaactaagaatcaaactcatcatttttaaaatctactgattttgataactgacttgaaagaaaagaacttgcaattagaggtcatagtgaagatttccagggtcaaagtgatttctgaggttttagatgtaaaaatatctcctatttatttgctatttcagagttgacaacaagatttttatttgatccacatatttaaaaggtgtgcaaagattgctactttacaaaggtcacagaagcagaggagtctcagagtcccacatccaattactaatttgttcttccccatgactaaatgtagcaaatgatgaagaaactggtgctagatttcaagggataccagaataggaagttatttgttctgaatcttcagttggttttccttttctcttaaatgttaccactttcctgcaaatttccatccttaatatgttagactgttcatatagatacattgtgtttacaacaaggaaaaaatgccaccatgtgctcagaacttttttgacaggtattttgagaagagttgtggaacattctggtaatttgtagagatctgttggcatctctgcttcacaaactggaaaaaatcatttgtaagtcttgctaattacttttcttggagaagaaaaaaaatgctacagttgcaaacaaatgtatagttttcaaaaagaagcaacttttttgctccccagtttattcttagtttccagcccacgccttgcgatagcgataggcatagtgatggcctcaattctttctctcttgcatccataccttttgctgtgatagcagtgatggcctcagttctttccctctcttgcatccgtaccttttgctgtgtgactttgcagctcctctcattaaagaggcagagccccctctcccacccataggagcaggttttgagagtaacagaatgaagtgaaaatgacactgtgccagttctaagaccagccctcaaaggttcatgtgtttctgcttgctttcactgtatttgaaatgttgctgtgagaaagacatctctgaaacagctgaatggtcctaagaaaaggatgagagatgcagggagcagagctcccaactgaggccagcctagatcacctaagagccaggcccccagtttactctgatgtgtaagcaataaatgcttaccccagcaataccaccaaggtttgtggttggtttatatacagcattaatgtggcaataggtgcaatacaccctgttaaacaaaccatacacatatgactctaaccctaatcataaattgattcagtctgttcagttccacaacgctgtttcctccagaatctcacagatgacttactaaatccaacacaaatacacctcagactttctgtctagctcccaaccagttaaaagcaattctaaatattttttttcttagtcgtagtgcaaaagtatattctctccctttctctatagttttctctcattttgtcttcagacctagaagcatgagagcccagctgtcaaagtcatctagacccccttcagaaggtcattaaatttgtctatttcacaggattgcaagataaaatacagaatgcccagttaaatttgaacttcggataaacaacaaatttttttttagtataagcatatcccatacaatatttgggatatacttatatttttatattgtttatctgacgttcaagctaactaggcatcctgtatttttcttagctaaatctggcaactgtgctatttcattgaaaacctgaaagtgtacaaagaaggaagaagcagaatctgccatatgagtaatagaagtgagcaggcccaggactccctaagtcaagaaaccaagaggcgtcattacggaaaagagtaactcaccctgtgtgctccttggtagttctccctcagcgatgcccccatgttatgaatggggaaaagttcactgaagggttcatagtgaagaaactttttggatgatttctgttggtgggttttggataccttcaagggatcagaaaataatatacttaggaaattttggtaatgtcatcattactctctacattattattatgacggttacaattgttaaatctaggtggtgggtatgtgggttatattgtacatgatttttaacttgtctgcatgtttgaaattataataaagtcaataaataaattattgagacactcctg

SEQ ID NO: 122314 - DNA, 9523 bp, Homo sapiens
  Payload ID: 3965
  Gene Symbol: COBLL1
  Gene Name: cordon-bleu WH2 repeat protein-like 1
  Uniprot ID: Q53SF7
  ENST ID: ENST00000392717
  CDS Start-End: 149-3763
ctttcggttcagcttccccagccggaccccaaagacccgaagccctgggggaaggaaattccaacttgctcccggcccacccccgccccgttcctctctccggctcgctgcttccctcgctccaatgccgccgagctggtccccacttatgtgcggccgtgctgcagaggcggcggcgagctcccggactccgggcagggaaatggggcaggcagtgacgcgccgcctgggagctggagcccgcgcagcgccccgcagggcgatggacggccgaaccccgcgcccgcaggacgccccagccaggagaaaaccaaaagccaaggcaccacttcctccagctgagaccaaatatactgatgtctcttcagctgctgattctgtagaatccactgctttcatcatggaacagaaagaaaacatgatagataaagacgttgaactctcagtggtcctacctggggatattatcaaatctactactgttcatggcagtaaacctatgatggacttgttgatattcctttgtgcacagtatcacttaaatccatcaagttacacaatcgatctgttgtcagctgaacagaaccacattaaatttaagccaaacacaccaataggaatgttggaggtagagaaggtaattttaaagccaaaaatgttggataagaaaaaacctacacctataataccagagaaaactgtgagagtagtgattaattttaagaaaacacagaagaccatagtgagagtgagtccacatgcatcgcttcaagagcttgcccctattatatgtagcaaatgtgagtttgatccgttgcatacactattgttgaaagattatcaatcgcaggagcctcttgacttgacaaaatctcttaatgacctgggactaagagaattatatgcgatggatgtcaacagagagtcctgccaaatatcacaaaacctagatattatgaaggagaaagaaaataaagggtttttcagtttttttcaacgcagtaagaaaaagcgagaccaaactgcaagtgcccctgcaacccctctagtaaataagcaccgcccaacttttacaaggtccaataccatttccaaaccatatatttccaacaccctgccgtcggatgcacccaagaagaggcgggctccactgcccccgatgccagcatctcagagtgtcccccaagaccttgcacacatccaggagaggcctgcttcttgtatagtgaaatccatgagcgtggatgagacagataagagtccctgtgaagcaggaagagtgagggcaggttcactgcagctcagcagcatgtctgcagggaattcatctttgagaaggacaaagcgaaaagcaccttccccaccctccaaaatacccccgcatcaaagtgatgaaaatagtcgtgtgactgccttacagccagtagatggagttcctccagacagtgcttcagaagcaaactctcctgaggagctatccagcccagaaacctttcaccctgggctttccagtcaggagcagtgcactgcgcccaaactgatggaggaaacctctgtctttgagtgccctgggacacctgaggcagccataacatcattgacatctggaataagctctgattatagccttgaagagatagatgaaaaggaagaactgagtgaagtgcctaaagttgaagctgaaaatatttctccgaagtcacaagatattccttttgtatctactgatataataaatacactgaaaaatgatcctgactcagcccttggcaatggtagtggagagttctcacaaaactccatggaagaaaaacaagaaactaaaagcacagatggacaagaaccacacagtgtagtatatgatacaagcaatggaaagaaggtagttgacagtataagaaacttgaagtcgttgggcccaaaccaagagaatgttcaaaatgaaataattgtctatccagagaacacagaagacaatatgaaaaatggagtgaagaaaacagaaatcaatgtagaaggtgttgccaaaaataacaacattgatatggaagttgagagaccatcaaactctgaggcacatgaaactgatactgctataagttacaaggaaaaccatctagcagcttcatcagtaccagatcaaaaactgaatcaacccagtgcagaaaagacaaaagatgcagcaattcagacaaccccttcttgtaacagttttgatgggaaacaccaagatcataatttatctgactccaaagttgaagaatgtgtgcaaacttcaaataacaacatatcaactcaacactcatgcttaagttcacaagattctgtaaatacctcaagggaattcaggagtcaaggcaccctaattatacattcagaagatccgcttaccgtaaaagatccaatttgtgcacatggtaatgatgatcttttgcctcctgtagataggattgacaaaaattccactgcttcttacctaaagaattacccactttatagacaggactacaatcccaagccaaaaccttcaaatgaaattacacgagagtatatacccaaaattggcatgactacttataaaatagtgcctcccaaatccttggaaatatcgaaagactggcaatcagaaaccatagagtataaagatgatcaggacatgcatgctttagggaaaaagcacactcatgagaatgtgaaagaaactgccatccaaacagaagattctgctatttctgaaagcccagaagagccactgccaaaccttaaaccgaagcctaacctgagaacagagcatcaagtgcccagttctgtgagctcacctgatgatgccatggttagtcctctgaaacctgctcccaaaatgacaagagacactggcacagctccttttgcaccaaatttggaagaaataaacaatattttggaatcaaaatttaaatctcgggcttcaaatgcccaggccaaacccagctctttttttttgcagatgcagaagagagtatcgggtcactatgtgacatctgcagctgccaagagtgtccatgctgcccctaatcctgctccaaaagaactgacaaataaagaggcagaaagggatatgctgccttctccggagcagactctttctcccttaagtaaaatgcctcactctgttccacaaccccttgttgaaaaaactgatgatgatgtcatcggtcaggctcctgctgaagcctcccctcctcccatagctccaaaacctgtgacaattcctgctagtcaggtatccacacaaaatctgaagactttgaaaacttttggtgccccacgaccatactcaagttctggtccttcaccgtttgctcttgctgtagtgaaaaggtcacagtctttcagtaaagagcgcaccgagtcacctagtgccagtgcattggtccaacctccagccaacacagaggaagggaagactcattctgtaaataaatttgtggacatcccacagcttggtgtgtctgataaggaaaataactctgcacataatgaacagaattcccaaataccaactccaactgatggcccatcattcactgttatgagacaaagttctttaacattccaaagctctgacccagaacagatgcgacagagtttgctgactgcaatccgttcgggagaggctgctgccaaattgaaaagggttaccattccatcaaatacaatatctgtgaatggaaggtcaagactcagccattccatgtcccctgatgcccaggacggccattaaatgttaccctgccacaccactgcacttcacttccacttcagaccaacttcatactaatggaacattttggcaaatgtatattcagatgtacactaatatattatctattaaaatattagaatttgtgttgtggcttttaatgccagaagaaaagttaccagaatttataatttatagtaattttttgatcttttttttgccttaagagttgaatatgctgctttagaactttaaaacaaggtgtaaatgattttcattttttacaaatgaaaaataattcctttgtattgatttcacttaccagcacattctctacaatggtgacttagacaaaagtataagattcatagactttatatttgtatgacatacaactaggacaaacatagatatgacatttgctgcctcagtgtagcaattggaaatatttataagttatatgaaagcctgttttgggctgaaagaatgatttagaaaactagtgataccaaataagtatattcagttcaataattattttcaatgatgaatcacttagtgtgaaagacttgccttgtgtattctttatgtaattacaaatcactgtcaattttatgggaagctcatagtattttaatattttattaacatggaactcttgtttttttaatctttagaacttaaattctacaagaattttaaatattttctgtatataattatgacattgtcacacagaaattacacattttatgtgccagaagccttaaacatctttctgtgaaaatgctgatatattgtgacagttatttcacatttgatatgtagagaggaataggggttagtttatgtttatattgaaaaactttaaagactatttggaagttccagaaattctggttttaattcaagtaaaatgataaaatagtcattatatagttcagatgctaatattctaagtaataatatatatttacattgaagctaaaactgttaagcaaaacaatgcccatttgtcggcttacagctcttccggagtctagagcctgttggtgttctgtccctactttaagaatttaattgctcacttattctgaaagctttgttcaaacaagatgatattaaatttgttttcactaaaactactgggatatctgcctcttggggatttttttttcaatttaataaaagcaagttgtatatttggggtgctttttaaaatatatagtttgtgtcaaccagcatatttatttcccttacctgatgcatacatttctattagccagtgaacaaacaagaaatttgtaagatttaccatttatcagggatccctagtgtacatttaagccctggcattctgactccaaaatgcatggtctaagcatttaaaatgtttagcatagttcctgatacatggcatggccatcttaaatgctaaatgttgctgctgttttccttgaatcagttggagagaccctcatatatagatacttaagttatgttgttataagcaagtagagaaaggagtgaattttttttaaaaaattgtgttgtcataattatctacttataaaaatataaatttggatccctaatttaaaccttcatatattttgagttggattgaagacttaaagacaagcgacatgtaagatgttttcaatatattaatatataagaaaggcttaatttatgaagatatgaaagttcctacaactcatgataagtctacctaatagaaatatcagcacattattcttacaagaggaaattcaaaaggccaacaaacatggaaaaaaaatactcttcactgataatcagggaaatacaagttaaaaacatggaaaggtaccacatcaaattagcaaaaacggaagtttcaaaatagcaagtgttgtcaggaacatcaaacagtgggaactctactgttggtgggaaaatacactggcataactaccagttctgcaatatctagtaaaattaaagattccttaccatgttaccttaaataagtacttatgcacatgcataaggagacatctgcaaaaatgttcacggcagccttgtgtaaaacagcagaaaggggtcctaacccgtgctcagctttagtaatgcatatattcatatgatagacttccacacagcagtccaaatgaacaagctagagctatatatgtcagcatgaatacatctcaaaaacaagtgacaagagtgagtggtggaacaagtcgtgttttatgaaattagttacataaagtataaatataaaaaatgatactataaattatggctgtatatgtaggaaaaaaatttgctggtggttacctgtgggaaccaagaaagactgaattgagatttataagaggcatcaattgtgttcgtagtattttataaactgctgtttgaaaacaagtgcttattatattctaaattctagtatacttgtagtttataattataataaaataatgttttaaaggtcacataggatttagggggctatgtatataaaccattaatacatgtatgttctgaaaagttgccttatcgacaccattttaggagaacatgtgctatcctgtcaatggggaaagaaatttgtgacaagtagttttcactcatcatatcctaaaataacagcacaaggaagatacaggaatggtctagaaccaacttttgactttcatgtataatttttagcatctaggcattttgcttttccttctttcctccaatcaagttatttatttatataatattaaaattataattcagattacatatatatgatagagtataaaatacattctttttcatccccagcatcccactctcctctccaaagatagctgttaatattttgatatgaagccctatatagatgtatttatatgaagtacatgtgtgcaggtttgttgggggcttttgtgtgtgtgtgtgtgtgtgtgtgtgtgtgtgtgtatgtgtgtttcttaacatgaaaggaggtcacactctaatactatgtaacaacttgccttttataccagcagtgttctggaagagcttttctttttacacatacagatcgatcgtatttctgttagccattctattgtttcttgctgcggtacataatgttggctggagtgaagagattggggttcagatcacaagtctgccacttatgagtcatgggatcttgggcaaattactttctctatgcttcattttctcttctgaaaaatgaattaatatgaataaaaatgaaccttattttaaaaacggcaggcaattcatcttttaaagttacctgatgtcaatactataagtgaacaggtattatttgcctaatatactccctattctttgaggagtgacccttcttccgatttcacctcttcatgaactgccagatctggccttggccactaggcactggcaacagcatacacactctgtcatcttatccaagtccttgaaatgagaccaatctttgtcctgagacttagttacttataggtgcttaaaacccaaagcgtcccaattgatacaattatgtatgtgtctaattccagtttactttgtacccactaccagtagagaaaataagtatcaaagaactaagaatcaaactcatcatttttaaaatctactgattttgataactgacttgaaagaaaagaacttgcaattagaggtcatagtgaagatttccagggtcaaagtgatttctgaggttttagatgtaaaaatatctcctatttatttgctatttcagagttgacaacaagatttttatttgatccacatatttaaaaggtgtgcaaagattgctactttacaaaggtcacagaagcagaggagtctcagagtcccacatccaattactaatttgttcttccccatgactaaatgtagcaaatgatgaagaaactggtgctagatttcaagggataccagaataggaagttatttgttctgaatcttcagttggttttccttttctcttaaatgttaccactttcctgcaaatttccatccttaatatgttagactgttcatatagatacattgtgtttacaacaaggaaaaaatgccaccatgtgctcagaacttttttgacaggtattttgagaagagttgtggaacattctggtaatttgtagagatctgttggcatctctgcttcacaaactggaaaaaatcatttgtaagtcttgctaattacttttcttggagaagaaaaaaaatgctacagttgcaaacaaatgtatagttttcaaaaagaagcaacttttttgctccccagtttattcttagtttccagcccacgccttgcgatagcgataggcatagtgatggcctcaattctttctctcttgcatccataccttttgctgtgatagcagtgatggcctcagttctttccctctcttgcatccgtaccttttgctgtgtgactttgcagctcctctcattaaagaggcagagccccctctcccacccataggagcaggttttgagagtaacagaatgaagtgaaaatgacactgtgccagttctaagaccagccctcaaaggttcatgtgtttctgcttgctttcactgtatttgaaatgttgctgtgagaaagacatctctgaaacagctgaatggtcctaagaaaaggatgagagatgcagggagcagagctcccaactgaggccagcctagatcacctaagagccaggcccccagtttactctgatgtgtaagcaataaatgcttaccccagcaataccaccaaggtttgtggttggtttatatacagcattaatgtggcaataggtgcaatacaccctgttaaacaaaccatacacatatgactctaaccctaatcataaattgattcagtctgttcagttccacaacgctgtttcctccagaatctcacagatgacttactaaatccaacacaaatacacctcagactttctgtctagctcccaaccagttaaaagcaattctaaatattttttttcttagtcgtagtgcaaaagtatattctctccctttctctatagttttctctcattttgtcttcagacctagaagcatgagagcccagctgtcaaagtcatctagacccccttcagaaggtcattaaatttgtctatttcacaggattgcaagataaaatacagaatgcccagttaaatttgaacttcggataaacaacaaatttttttttagtataagcatatcccatacaatatttgggatatacttatatttttatattgtttatctgacgttcaagctaactaggcatcctgtatttttcttagctaaatctggcaactgtgctatttcattgaaaacctgaaagtgtacaaagaaggaagaagcagaatctgccatatgagtaatagaagtgagcaggcccaggactccctaagtcaagaaaccaagaggcgtcattacggaaaagagtaactcaccctgtgtgctccttggtagttctccctcagcgatgcccccatgttatgaatggggaaaagttcactgaagggttcatagtgaagaaactttttggatgatttctgttggtgggttttggataccttcaagggatcagaaaataatatacttaggaaattttggtaatgtcatcattactctctacattattattatgacggttacaattgttaaatctaggtggtgggtatgtgggttatattgtacatgatttttaacttgtctgcatgtttgaaattataataaagtcaataaataaattattgagacactcctgtt

SEQ ID NO: 122315 - DNA, 4636 bp, Homo sapiens
  Payload ID: 3965
  Gene Symbol: COBLL1
  Gene Name: cordon-bleu WH2 repeat protein-like 1
  Uniprot ID: Q53SF7
  ENST ID: ENST00000409184
  CDS Start-End: 1-3506
cacttatgtgcggccgtgctgcagaggcggcggcgagctcccggactccgggcagggaaatggggcaggcagtgacgcgccgcctgggagctggagcccgcgcagcgccccgcagggcgatggacggccgaaccccgcgcccgcaggacgccccagccaggagaaaaccaaaagccaaggcaccacttcctccagctgagaccaaatatactgatgtctcttcagctgctgattctgtagaatccactgctttcatcatggaacagaaagaaaacatgatagataaagacgttgaactctcagtggtcctacctggggatattatcaaatctactactgttcatggcagtaaacctatgatggacttgttgatattcctttgtgcacagtatcacttaaatccatcaagttacacaatcgatctgttgtcagctgaacagaaccacattaaatttaagccaaacacaccaataggaatgttggaggtagagaaggtaattttaaagccaaaaatgttggataagaaaaaacctacacctataataccagagaaaactgtgagagtagtgattaattttaagaaaacacagaagaccatagtgagagtgagtccacatgcatcgcttcaagagcttgcccctattatatgtagcaaatgtgagtttgatccgttgcatacactattgttgaaagattatcaatcgcaggagcctcttgacttgacaaaatctcttaatgacctgggactaagagaattatatgcgatggatgtcaacagagagtcctgccaaatatcacaaaacctagatattatgaaggagaaagaaaataaagggtttttcagtttttttcaacgcagtaagaaaaagcgagaccaaactgcaagtgcccctgcaacccctctagtaaataagcaccgcccaacttttacaaggtccaataccatttccaaaccatatatttccaacaccctgccgtcggatgcacccaagaagaggcgggctccactgcccccgatgccagcatctcagagtgtcccccaagaccttgcacacatccaggagaggcctgcttcttgtatagtgaaatccatgagcgtggatgagacagataagagtccctgtgaagcaggaagagtgagggcaggttcactgcagctcagcagcatgtctgcagggaattcatctttgagaaggacaaagcgaaaagcaccttccccaccctccaaaatacccccgcatcaaagtgatgaaaatagtcgtgtgactgccttacagccagtagatggagttcctccagacagtgcttcagaagcaaactctcctgaggagctatccagcccagctggaataagctctgattatagccttgaagagatagatgaaaaggaagaactgagtgaagtgcctaaagttgaagctgaaaatatttctccgaagtcacaagatattccttttgtatctactgatataataaatacactgaaaaatgatcctgactcagcccttggcaatggtagtggagagttctcacaaaactccatggaagaaaaacaagaaactaaaagcacagatggacaagaaccacacagtgtagtatatgatacaagcaatggaaagaaggtagttgacagtataagaaacttgaagtcgttgggcccaaaccaagagaatgtagttcaaaatgaaataattgtctatccagagaacacagaagacaatatgaaaaatggagtgaagaaaacagaaatcaatgtagaaggtgttgccaaaaataacaacattgatatggaagttgagagaccatcaaactctgaggcacatgaaactgatactgctataagttacaaggaaaaccatctagcagcttcatcagtaccagatcaaaaactgaatcaacccagtgcagaaaagacaaaagatgcagcaattcagacaaccccttcttgtaacagttttgatgggaaacaccaagatcataatttatctgactccaaagttgaagaatgtgtgcaaacttcaaataacaacatatcaactcaacactcatgcttaagttcacaagattctgtaaatacctcaagggaattcaggagtcaaggcaccctaattatacattcagaagatccgcttaccgtaaaagatccaatttgtgcacatggtaatgatgatcttttgcctcctgtagataggattgacaaaaattccactgcttcttacctaaagaattacccactttatagacaggactacaatcccaagccaaaaccttcaaatgaaattacacgagagtatatacccaaaattggcatgactacttataaaatagtgcctcccaaatccttggaaatatcgaaagactggcaatcagaaaccatagagtataaagatgatcaggacatgcatgctttagggaaaaagcacactcatgagaatgtgaaagaaactgccatccaaacagaagattctgctatttctgaaagcccagaagagccactgccaaaccttaaaccgaagcctaacctgagaacagagcatcaagtgcccagttctgtgagctcacctgatgatgccatggttagtcctctgaaacctgctcccaaaatgacaagagacactggcacagctccttttgcaccaaatttggaagaaataaacaatattttggaatcaaaatttaaatctcgggcttcaaatgcccaggccaaacccagctctttttttttgcagatgcagaagagagtatcgggtcactatgtgacatctgcagctgccaagagtgtccatgctgcccctaatcctgctccaaaagaactgacaaataaagaggcagaaagggatatgctgccttctccggagcagactctttctcccttaagtaaaatgcctcactctgttccacaaccccttgttgaaaaaactgatgatgatgtcatcggtcaggctcctgctgaagcctcccctcctcccatagctccaaaacctgtgacaattcctgctagtcaggtatccacacaaaatctgaagactttgaaaacttttggtgccccacgaccatactcaagttctggtccttcaccgtttgctcttgctgtagtgaaaaggtcacagtctttcagtaaagagcgcaccgagtcacctagtgccagtgcattggtccaacctccagccaacacagaggaagggaagactcattctgtaaataaatttgtggacatcccacagcttggtgtgtctgataaggaaaataactctgcacataatgaacagaattcccaaataccaactccaactgatggcccatcattcactgttatgagacaaagttctttaacattccaaagctctgacccagaacagatgcgacagagtttgctgactgcaatccgttcgggagaggctgctgccaaattgaaaagggttaccattccatcaaatacaatatctgtgaatggaaggtcaagactcagccattccatgtcccctgatgcccaggacggccattaaatgttaccctgccacaccactgcacttcacttccacttcagaccaacttcatactaatggaacattttggcaaatgtatattcagatgtacactaatatattatctattaaaatattagaatttgtgttgtggcttttaatgccagaagaaaagttaccagaatttataatttatagtaattttttgatcttttttttgccttaagagttgaatatgctgctttagaactttaaaacaaggtgtaaatgattttcattttttacaaatgaaaaataattcctttgtattgatttcacttaccagcacattctctacaatggtgacttagacaaaagtataagattcatagactttatatttgtatgacatacaactaggacaaacatagatatgacatttgctgcctcagtgtagcaattggaaatatttataagttatatgaaagcctgttttgggctgaaagaatgatttagaaaactagtgataccaaataagtatattcagttcaataattattttcaatgatgaatcacttagtgtgaaagacttgccttgtgtattctttatgtaattacaaatcactgtcaattttatgggaagctcatagtattttaatattttattaacatggaactcttgtttttttaatctttagaacttaaattctacaagaattttaaatattttctgtatataattatgacattgtcacacagaaattacacattttatgtgccagaagccttaaacatctttctgtgaaaatgctgatatattgtgacagttatttcacatttgatatgtagagaggaataggggttagtttatgtttatattgaaaaactttaaagactatttggaagttccagaaattctggttttaattcaagtaaaatgataaaatagtcattatatagttcagatgctaatattctaagtaataatatatatttacattgaagctaaaactgttaagcaaaacaatgcccatttgtcggcttacagctcttccggagtctagagcctgttggtgttctgtccctactttaagaatttaattgctcacttattctgaaagctttgttcaaacaagatgatattaaatttgttttcactaaaactactggga

SEQ ID NO: 122316 - DNA, 575 bp, Homo sapiens
  Payload ID: 3965
  Gene Symbol: COBLL1
  Gene Name: cordon-bleu WH2 repeat protein-like 1
  ENST ID: ENST00000414843
  CDS Start-End: 160-575
gagcctcgcaggggttgccgcttctccattcaagtcctggcttgagagccgagcggcaagagcgcgggccggggaagggaagagtaggagaggaagccgcgagggagaacagtgacgcgccgcctgggagctggagcccgcgcagcgccccgcagggcgatggacggccgaaccccgcgcccgcaggacgccccagccaggagaaaaccaaaagccaaggcaccacttcctccagctgagaccaaatatactgatgtctcttcagctgctgattctgtagaatccactgctttcatcatggaacagaaagaaaacatgatagataaagacgttgaactctcagtggtcctacctggggatattatcaaatctactactgttcatggcagtaaacctatgatggacttgttgatattcctttgtgcacagtatcacttaaatccatcaagttacacaatcgatctgttgtcagctgaacagaaccacattaaatttaagccaaacacaccaataggaatgttggaggtagagaaggtaattttaaagccaaaaatgttggataagaaaaaacctac

SEQ ID NO: 122317 - DNA, 575 bp, Homo sapiens
  Payload ID: 3965
  Gene Symbol: COBLL1
  Gene Name: cordon-bleu WH2 repeat protein-like 1
  ENST ID: ENST00000445474
  CDS Start-End: 131-575
agctttctttcggttcagcttccccagccggaccccaaagacccgaagccctgggggaaggaaattccaacttgctcccggcccacccccgccccgttcctctctccggctcgctgcttccctcgctccaatgccgccgagctggtccccacttatgtgcggccgtgctgcagaggcggcggcgagctcccggactccgggcagggaaatggggcaggcagtgacgcgccgcctgggagctggagcccgcgcagcgccccgcagggcgatggacggccgaaccccgcgcccgcaggacgccccagccaggagagagattgctgggtcatggagaaaaccaaaagccaaggcaccacttcctccagctgagaccaaatatactgatgtctcttcagctgctgattctgtagaatccactgctttcatcatggaacagaaagaaaacatgatagataaagacgttgaactctcagtggtcctacctggggatattatcaaatctactactgttcatggcagtaaacctatgatggacttgttgatattcctttgtgcacagtatcacttaaatccat

SEQ ID NO: 122318 - DNA, 750 bp, Homo sapiens
  Payload ID: 3965
  Gene Symbol: COBLL1
  Gene Name: cordon-bleu WH2 repeat protein-like 1
  ENST ID: ENST00000456693
  CDS Start-End: 71-750
gaaattccaacttgctcccggcccacccccgccccgttcctctctccggctcgctgcttccctcgctccaatgccgccgagctggtccccacttatgtgcggccgtgctgcagaggcggcggcgagctcccggactccgggcagggaaatggggcaggcagtgacgcgccgcctgggagctggagcccgcgcagcgccccgcagggcgatggacggccgaaccccgcgcccgcaggacgccccagccagtaaacctatgatggacttgttgatattcctttgtgcacagtatcacttaaatccatcaagttacacaatcgatctgttgtcagctgaacagaaccacattaaatttaagccaaacacaccaataggaatgttggaggtagagaaggtaattttaaagccaaaaatgttggataagaaaaaacctacacctataataccagagaaaactgtgagagtagtgattaattttaagaaaacacagaagaccatagtgagagtgagtccacatgcatcgcttcaagagcttgcccctattatatgtagcaaatgtgagtttgatccgttgcatacactattgttgaaagattatcaatcgcaggagcctcttgacttgacaaaatctcttaatgacctgggactaagagaattatatgcgatggatgtcaacagagccacttctgttactgtcttcagtaagtcatctttacaagagtcctgccaaatatcacaaaacctagatat

SEQ ID NO: 122319 - DNA, 565 bp, Homo sapiens
  Payload ID: 3965
  Gene Symbol: COBLL1
  Gene Name: cordon-bleu WH2 repeat protein-like 1
  ENST ID: ENST00000439313
  CDS Start-End: 76-565
agcccgcgcagcgccccgcagggcgatggacggccgaaccccgcgcccgcaggacgccccagccagagagcaaaaatgttggagacactggttggaaaattgaaatgctgcattggagaagagagcgatagtcaaaagagaaaaccaaaagccaaggcaccacttcctccagctgagaccaaatatactgatgtctcttcagctgctgattctgtagaatccactgctttcatcatggaacagaaagaaaacatgatagataaagacgttgaactctcagtggtcctacctggggatattatcaaatctactactgttcatggcagtaaacctatgatggacttgttgatattcctttgtgcacagtatcacttaaatccatcaagttacacaatcgatctgttgtcagctgaacagaaccacattaaatttaagccaaacacaccaataggaatgttggaggtagagaaggtaattttaaagccaaaaatgttggataagaaaaaacctacacctataataccagagaaaactgtgagagtagtgattaattttaagaaaacac

SEQ ID NO: 122320 - DNA, 772 bp, Homo sapiens
  Payload ID: 3965
  Gene Symbol: COBLL1
  Gene Name: cordon-bleu WH2 repeat protein-like 1
  ENST ID: ENST00000452626
  CDS Start-End: 1-772
aagcgctagaggaacaatactgttttatggagactttctggaacagttgagaaaaccaaaagccaaggcaccacttcctccagctgagaccaaatatactgatgtctcttcagctgctgattctgtagaatccactgctttcatcatggaacagaaagaaaacatgatagataaagacgttgaactctcagtggtcctacctggggatattatcaaatctactactgttcatggcagtaaacctatgatggacttgttgatattcctttgtgcacagtatcacttaaatccatcaagttacacaatcgatctgttgtcagctgaacagaaccacattaaatttaagccaaacacaccaataggaatgttggaggtagagaaggtaattttaaagccaaaaatgttggataagaaaaaacctacacctataataccagagaaaactgtgagagtagtgattaattttaagaaaacacagaagaccatagtgagagtgagtccacatgcatcgcttcaagagcttgcccctattatatgtagcaaatgtgagtttgatccgttgcatacactattgttgaaagattatcaatcgcaggagcctcttgacttgacaaaatctcttaatgacctgggactaagagaattatatgcgatggatgtcaacagagagtcctgccaaatatcacaaaacctagatattatgaaggagaaagaaaataaagggtttttcagtttttttcaacgcagtaagaaaaagcgagaccaaactgca

SEQ ID NO: 122321 - DNA, 549 bp, Homo sapiens
  Payload ID: 3965
  Gene Symbol: COBLL1
  Gene Name: cordon-bleu WH2 repeat protein-like 1
  ENST ID: ENST00000448708
  CDS Start-End: 79-549
aggaccagaaggaggacagcaaaaagtgcagtgacgcgccgcctgggagctggagcccgcgcagcgccccgcagggcgatggacggccgaaccccgcgcccgcaggacgccccagccaggagaaaaccaaaagccaaggcaccacttcctccagctgagaccaaatatactgatgtctcttcagctgctgattctgtagaatccactgctttcatcatggaacagaaagaaaacatgatagataaagacgttgaactctcagtggtcctacctggggatattatcaaatctactactgttcatggcagtaaacctatgatggacttgttgatattcctttgtgcacagtatcacttaaatccatcaagttacacaatcgatctgttgtcagctgaacagaaccacattaaatttaagccaaacacaccaataggaatgttggaggtagagaaggtaattttaaagccaaaaatgttggataagaaaaaacctacacctataataccagagaaaactgtgagagtagtgattaattttaagaaaacacag

SEQ ID NO: 122322 - DNA, 737 bp, Homo sapiens
  Payload ID: 3965
  Gene Symbol: COBLL1
  Gene Name: cordon-bleu WH2 repeat protein-like 1
  ENST ID: ENST00000444537
  CDS Start-End: 227-737
attcaagtcctggcttgagagccgagcggcaagagcgcgggccggggaagggaagagtaggagaggaagccgcgagggagaacaggcgagctactgtctcctttggaaaagaactgacgcgccgcctgggagctggagcccgcgcagcgccccgcagggcgatggacggccgaaccccgcgcccgcaggacgccccagccaggctcagttattgggacagaggctgatgaagaaagacctgaaggaaggccctagtctgtgtggtctctgtttggaggagctaaaaggggactttttggtcgagagactcagagagaatatccctgccgtaaggagaaaaccaaaagccaaggcaccacttcctccagctgagaccaaatatactgatgtctcttcagctgctgattctgtagaatccactgctttcatcatggaacagaaagaaaacatgatagataaagacgttgaactctcagtggtcctacctggggatattatcaaatctactactgttcatggcagtaaacctatgatggacttgttgatattcctttgtgcacagtatcacttaaatccatcaagttacacaatcgatctgttgtcagctgaacagaaccacattaaatttaagccaaacacaccaataggaatgttggaggtagagaaggtaattttaaagccaaaaatgttggataagaaaaaacctacacctataataccagagaaaactgtgagag

SEQ ID NO: 122323 - DNA, 1793 bp, Homo sapiens
  Payload ID: 3965
  Gene Symbol: COBLL1
  Gene Name: cordon-bleu WH2 repeat protein-like 1
  ENST ID: ENST00000456171
  CDS Start-End: 165-1439
attcaagtcctggcttgagagccgagcggcaagagcgcgggccggggaagggaagagtaggagaggaagccgcgagggagaacaggcgagctactgtctcctttggaaaagaaccagtgacgcgccgcctgggagctggagcccgcgcagcgccccgcagggcgatggacggccgaaccccgcgcccgcaggacgccccagccaggagaaaaccaaaagccaaggcaccacttcctccagctgagaccaaatatactgatgtctcttcagctgctgattctgtagaatccactgctttcatcatggaacagaaagaaaacatgatagataaagacgttgaactctcagtggtcctacctggggatattatcaaatctactactgttcatggcagtaaacctatgatggacttgttgatattcctttgtgcacagtatcacttaaatccatcaagttacacaatcgatctgttgtcagctgaacagaaccacattaaatttaagccaaacacaccaataggaatgttggaggtagagaaggtaattttaaagccaaaaatgttggataagaaaaaacctacacctataataccagagaaaactgtgagagtagtgattaattttaagaaaacacagaagaccatagtgagagtgagtccacatgcatcgcttcaagagcttgcccctattatatgtagcaaatgtgagtttgatccgttgcatacactattgttgaaagattatcaatcgcaggagcctcttgacttgacaaaatctcttaatgacctgggactaagagaattatatgcgatggatgtcaacagagccacttctgttactgtcttcagtaagtcatctttacaagagtcctgccaaatatcacaaaacctagatattatgaaggagaaagaaaataaagggtttttcagtttttttcaacgcagtaagaaaaagcgagaccaaactgcaagtgcccctgcaacccctctagtaaataagcaccgcccaacttttacaaggtccaataccatttccaaaccatatatttccaacaccctgccgtcggatgcacccaagaagaggcgggctccactgcccccgatgccagcatctcagagtgtcccccaagaccttgcacacatccaggagaggcctgcttcttgtatagtgaaatccatgagcgtggatgagacagataagagtccctgtgaagcaggaagagtgagggcaggttcactgcagctcagcagcatgtctgcagggaattcatctttgagaaggacaaagcgaaaagcaccttccccaccctccaaaatacccccgcatcaaagtgatgaaaatagtcgtgtgactgccttacagccagtagatggagttcctccagacagtgcttcagaagcaaactctcctgaggagctatccagcccaggaaacatttaggaggaacactcttgaatctttcatctttaagtgaaacctttcaccctgggctttccagtcaggagcagtgcactgcgcccaaactgatggaggaaacctctgtctttgagtgccctgggacacctgaggcagccataacatcattgacatctggaataagctctgattatagccttgaagagatagatgaaaaggaagaactgagtgaagtgcctaaagttgaagctgaaaatatttctccgaagtcacaagatattccttttgtatctactgatataataaatacactgaaaaatgatcctgactcagcccttggcaatggtagtggagagttctcacaaaactccatggaag

SEQ ID NO: 122324 - DNA, 3868 bp, Homo sapiens
  Payload ID: 3965
  Gene Symbol: COBLL1
  Gene Name: cordon-bleu WH2 repeat protein-like 1
  ENST ID: ENST00000629362
  CDS Start-End: 125-3826
ctttcggttcagcttccccagccggaccccaaagacccgaagccctgggggaaggaaattccaacttgctcccggcccacccccgccccgttcctctctccggctcgctgcttccctcgctccaatgccgccgagctggtccccacttatgtgcggccgtgctgcagaggcggcggcgagctcccggactccgggcagggaaatggggcaggcagtgacgcgccgcctgggagctggagcccgcgcagcgccccgcagggcgatggacggccgaaccccgcgcccgcaggacgccccagccaggagagagattgctgggtcatggagaaaaccaaaagccaaggcaccacttcctccagctgagaccaaatatactgatgtctcttcagctgctgattctgtagaatccactgctttcatcatggaacagaaagaaaacatgatagataaagacgttgaactctcagtggtcctacctggggatattatcaaatctactactgttcatggcagtaaacctatgatggacttgttgatattcctttgtgcacagtatcacttaaatccatcaagttacacaatcgatctgttgtcagctgaacagaaccacattaaatttaagccaaacacaccaataggaatgttggaggtagagaaggtaattttaaagccaaaaatgttggataagaaaaaacctacacctataataccagagaaaactgtgagagtagtgattaattttaagaaaacacagaagaccatagtgagagtgagtccacatgcatcgcttcaagagcttgcccctattatatgtagcaaatgtgagtttgatccgttgcatacactattgttgaaagattatcaatcgcaggagcctcttgacttgacaaaatctcttaatgacctgggactaagagaattatatgcgatggatgtcaacagagccacttctgttactgtcttcagtaagtcatctttacaagagtcctgccaaatatcacaaaacctagatattatgaaggagaaagaaaataaagggtttttcagtttttttcaacgcagtaagaaaaagcgagaccaaactgcaagtgcccctgcaacccctctagtaaataagcaccgcccaacttttacaaggtccaataccatttccaaaccatatatttccaacaccctgccgtcggatgcacccaagaagaggcgggctccactgcccccgatgccagcatctcagagtgtcccccaagaccttgcacacatccaggagaggcctgcttcttgtatagtgaaatccatgagcgtggatgagacagataagagtccctgtgaagcaggaagagtgagggcaggttcactgcagctcagcagcatgtctgcagggaattcatctttgagaaggacaaagcgaaaagcaccttccccaccctccaaaatacccccgcatcaaagtgatgaaaatagtcgtgtgactgccttacagccagtagatggagttcctccagacagtgcttcagaagcaaactctcctgaggagctatccagcccagaaacctttcaccctgggctttccagtcaggagcagtgcactgcgcccaaactgatggaggaaacctctgtctttgagtgccctgggacacctgaggcagccataacatcattgacatctggaataagctctgattatagccttgaagagatagatgaaaaggaagaactgagtgaagtgcctaaagttgaagctgaaaatatttctccgaagtcacaagatattccttttgtatctactgatataataaatacactgaaaaatgatcctgactcagcccttggcaatggtagtggagagttctcacaaaactccatggaagaaaaacaagaaactaaaagcacagatggacaagaaccacacagtgtagtatatgatacaagcaatggaaagaaggtagttgacagtataagaaacttgaagtcgttgggcccaaaccaagagaatgtagttcaaaatgaaataattgtctatccagagaacacagaagacaatatgaaaaatggagtgaagaaaacagaaatcaatgtagaaggtgttgccaaaaataacaacattgatatggaagttgagagaccatcaaactctgaggcacatgaaactgatactgctataagttacaaggaaaaccatctagcagcttcatcagtaccagatcaaaaactgaatcaacccagtgcagaaaagacaaaagatgcagcaattcagacaaccccttcttgtaacagttttgatgggaaacaccaagatcataatttatctgactccaaagttgaagaatgtgtgcaaacttcaaataacaacatatcaactcaacactcatgcttaagttcacaagattctgtaaatacctcaagggaattcaggagtcaaggcaccctaattatacattcagaagatccgcttaccgtaaaagatccaatttgtgcacatggtaatgatgatcttttgcctcctgtagataggattgacaaaaattccactgcttcttacctaaagaattacccactttatagacaggactacaatcccaagccaaaaccttcaaatgaaattacacgagagtatatacccaaaattggcatgactacttataaaatagtgcctcccaaatccttggaaatatcgaaagactggcaatcagaaaccatagagtataaagatgatcaggacatgcatgctttagggaaaaagcacactcatgagaatgtgaaagaaactgccatccaaacagaagattctgctatttctgaaagcccagaagagccactgccaaaccttaaaccgaagcctaacctgagaacagagcatcaagtgcccagttctgtgagctcacctgatgatgccatggttagtcctctgaaacctgctcccaaaatgacaagagacactggcacagctccttttgcaccaaatttggaagaaataaacaatattttggaatcaaaatttaaatctcgggcttcaaatgcccaggccaaacccagctctttttttttgcagatgcagaagagagtatcgggtcactatgtgacatctgcagctgccaagagtgtccatgctgcccctaatcctgctccaaaagaactgacaaataaagaggcagaaagggatatgctgccttctccggagcagactctttctcccttaagtaaaatgcctcactctgttccacaaccccttgttgaaaaaactgatgatgatgtcatcggtcaggctcctgctgaagcctcccctcctcccatagctccaaaacctgtgacaattcctgctagtcaggtatccacacaaaatctgaagactttgaaaacttttggtgccccacgaccatactcaagttctggtccttcaccgtttgctcttgctgtagtgaaaaggtcacagtctttcagtaaagagcgcaccgagtcacctagtgccagtgcattggtccaacctccagccaacacagaggaagggaagactcattctgtaaataaatttgtggacatcccacagcttggtgtgtctgataaggaaaataactctgcacataatgaacagaattcccaaataccaactccaactgatggcccatcattcactgttatgagacaaagttctttaacattccaaagctctgacccagaacagatgcgacagagtttgctgactgcaatccgttcgggagaggctgctgccaaattgaaaagggttaccattccatcaaatacaatatctgtgaatggaaggtcaagactcagccattccatgtcccctgatgcccaggacggccattaaatgttaccctgccacaccactgcacttcacttccacttcaga

SEQ ID NO: 122325 - DNA, 6078 bp, Homo sapiens
  Payload ID: 3966
  Gene Symbol: C1GALT1
  Gene Name: core 1 synthase, glycoprotein-N-acetylgalactosamine 3-beta-galactosyltransferase 1
  Uniprot ID: Q9NS00
  ENST ID: ENST00000223122
  CDS Start-End: 63-1154
tacagctttgattttataacatcctgctaatttttgttcttacagaaatacactttcgggaaatggcctctaaatcctggctgaattttttaaccttcctctgtggatcagcaataggatttcttttatgttctcagctatttagtattttgttgggagaaaaggttgacacccagcctaatgttcttcataatgatcctcatgcaaggcattcagatgataatggacagaatcatctagaaggacaaatgaacttcaatgcagattctagccaacataaagatgagaacacagacattgctgaaaacctctatcagaaagttagaattctttgctgggttatgaccggccctcaaaacctagagaaaaaggccaaacacgtcaaagctacttgggcccagcgttgtaacaaagtgttgtttatgagttcagaagaaaataaagacttccctgctgtgggactgaaaaccaaagaaggcagagatcaactatactggaaaacaattaaagcttttcagtatgttcatgaacattatttagaagatgctgattggtttttgaaagcagatgatgacacgtatgtcatactagacaatttgaggtggcttctttcaaaatacgaccctgaagaacccatttactttgggagaagatttaagccttatgtaaagcagggctacatgagtggaggagcaggatatgtactaagcaaagaagccttgaaaagatttgttgatgcatttaaaacagacaagtgtacacatagttcctccattgaagacttagcactggggagatgcatggaaattatgaatgtagaagcaggagattccagagataccattggaaaagaaacttttcatccctttgtgccagaacaccatttaattaaaggttatctacctagaacgttttggtactggaattacaactattatcctcctgtagagggtcctggttgctgctctgatcttgcagtttcttttcactatgttgattctacaaccatgtatgagttagaatacctcgtttatcatcttcgtccatatggttatttatacagatatcaacctaccttacctgaacgtatactaaaggaaattagtcaagcaaacaaaaatgaagatacaaaagtgaagttaggaaatccttgaaagaaaatcatgaatgaacaaaggtaatatgtctagcactgcactgaaaaaggacttctgcatttctgacatagaacactggaatcccagtgaggaattctaagtgaacattccttatagaaacctttcacatgaatgactataaactgaagctttaaatgagctgtgaagtgtgttaaaatgtgttttgatacagtaatatataaatatgtctatatatatgaggaacttgtgttttttaaatggtggccaggtagaggaactagaaaagagattttgttgcctgttttctgaccatctgtgttattgtcactgagaaactaaaatagtaaatttactaaaactacactgcaccatgttagtaataaacagatctgccttaaagaaaagaaaattttagaaagaaatattgttgctcagtgttgttaatatagctcaagaattgagtttatatttgcagtatgctataaatgatacccccctaccacacccacacacacagtttttgtctaatgaaaatgttgctgtgattatttataattggtagtatttcttccagaagaagctaaaataagactggcacttaccctgaagtgcattaataaaaccacactttaaaattatcatgggccttgactatattatatacttgattctaattagtcatcttttacgcaatctctgttgtctcttttctaaatgtgtttagccactcttgaataccattctccactattaacattaatttactcaaaccgttcatagcattctgtaaacatgtattttacatatttgttcccaaatttgcccattgttcattatgggtaactaataataaatttaatgctgtttcaggatgcttttcttataacagtgccactctcaggaattactaagtgacattttaaattgatattttaaactctttccaactacatagttatggtttatttcattctcatcctgttgggatgagaacttgtttgtgcctttcataacttgtttaaagcagagttttaaaattagtttataggatctgaggtggctattagttacagtggcaagattatttagaaagcaagattttgatgagaattaaaaacaatagaaaatgtagagtgcttaaacaaaaatgttatattttgaaagagtagatacttaatttataaataacagtctgaaggttggtgctattttgggataattgttttgctaatggataattctaacaatgcagaatacctagtcaagactgtcatcaaaaacattcacaaatgtttcattctatttttagtgactctgtttaaagagtttctgaaaggaaagaaattttttatttttattatctttagcagtactgagtgtcatagcagaatattttacagactttctatgagattatttttatggtacaaagtatttacatttccctcatgtttatcattatgccaattttacatggcagtcatgccactgactctgctatttagctaagtaatttcttttttcggagactgtctcactctgtctcccaggctggactgcagtggtgcgattctcctgcctcagcctcccgagtagcggggattacaggcacgcgctgccacgccccgccagttttcatatttttagtagagacagggttttgccgtgttggccaggctggtcttgaactcctgacctcaggtgatccacccaccttggcatcccaaagtgctgggattacgagcgtgagtcacagcacccggctaagtaatttctatttattgtgccaaaacatgtcaaaatcatgacctctttgaatggtatatttgagaggatgttcatttcattggttaaccatggactactctgtccacgtagtgaaaacatgcaccagtttttacctattatcatggtagtatcatctgccaaaatttcaaggcattcattttattctttgaacaactcttcaccatggtgtggacatgaattttcatatgtgttacttgactagaagtataaatggtttactatagatatccaaaaaccttgagatttgctcataggaaatgaatattgtgatgaatcctgggctctagagtcagacttgcttgggtttaaattcttgctctaacacttactgtttttgtaaccttgagcaattttaatctctctgtgtctcaatttcctcatcttttaattagggatgataatactacctacctcacaggatttttatgaggattaaataaatgtaaggtttttagaacattgatagggagcaataaatagaagattgtattattattctgttaccttggagtgtaagtactgcatttaagtgaatgaaaaatttgctttgaccagatactgaaggaaataagtaatagctagtatttatccaatgccaactgtatgctaggtactgtgcttagataatctgtgtataatagtgttaatcctcaaaatttgggtgttatacccctattatagataaggaaactgaggctcagagacaaagtaactttgtcactgtcacaaagctagtaagtaacagaggtaggatttatattcaaaaccctgtgtgttcattggaaccgtatcaggcttggggctattcatgtagcattatttccatttttatgtatatgatatatgacgtctgatgcattggccagtaatagtcaaattaacccagccaaattgtcacagtgattcttaaactgtggttctcacacttgcccaggatgttgttaaatgcagatctgaagaccccaatctcagaaattcaaatttaagcatggggcccaagagtatgcattcttaccagataccttgggcagtgactgtcaaaagtctggtcccaacaaacagcattaacgtcacctgggaacttgttggaaatgcagcctctctcggggcctcatctcagatcagatctactaaatcagatactctaggggcaggggcaggggcaggggctagcagttgtgtttaagcaaactctgcaggtgtctttcttatcctagtttgagaaccaatacccaacaacctacgtgattttggtgcaagtagtgtttgaaacacactgaagattactgcccaattactaagacatttttcaaaaagcatgttttaaatcagtgtagtccaggatcacactatattaaatataaagataacttaaaggatcattggatcattcattttggccaaatttttagcttctccaaagtgactaacatcagggcctacaataaaatctgtaattctccaagtttagtaattttatattgaggcaggaagggctcattaagtactaataagtacataatttattaaaaacatacataagtgtcatcaaaaaggtccacaattgttagtaaaaaaaattaaattgaagtagtaaatgctgttttataacatacatttttctgctaattcattctgttttgtgtgacctaataaagcaaaagaaaaataaaaaagcaattctccaagtacttcatagagcacataaaaccagatttcatgatgatgatgtattcactatcttttagattaagatctttgttatttggtaaatgatttcagtatggttttaaaacataaggcttttgatgtcttatgttctctaataatggtatgcttgtattttctagtgggaagttcatagataaagcagatttttgtcccagtttgctttcaaatataaatttcagagggctttttcttactgtaatgaggtatgaaaataaatcattgatcagctcttaatattttttgaatacagaattggatttgagcagtaaatttgctaactggttattttcacaattttcttgaatattaatttttcacttctttgagactgtcaaactatagttactaccaggttgatgcactgtacttgaaagaatcccttgattaaattacatctagcattttatttgccatttcaattttcagttcattagactataattctttgacagtttctgcctggtgtttattgcccttctttgtttgctttattactaacttccattttctagttactcttaaatgctgccttcacaaggttaatttggctgttaatagtgattagaatttttatcacttaattgataattttaagcctactaactagggttccctatgaaattgaaagtaaaagtctaagaataatgcctgctggctctcgagatacttgccctacttaaaaatctataatttaaaattaattctatgtctacaattattaaaggaagtaaagttatttgggttcttccactcacccttttctcaaaaacaacaacaaaaaacaaaactcattttatttttctactttatagtaggcctgacagaaacatagtgaagcaatctgggaggcaacctgtggtagattttatgctaaatgttaatgtaacctctgttgattttttaaaaatgtgtttatatataagatttgaaataaaaactttaatacaggctagaataaggaattttacaaattctctttagagcaaccaacattaaagttttagagttgaattttgctctatttcaactcccttacctctctagttttcagtttatattaagttttaataactttgcggggccctgcaaattaataatctacatgaagtatattattagagggaaactaatcttactgctaagcagtgtgttgtactacatagtgaatgttcgtgttttggaatttaaaaattatttaaggtaatggtgttacgaatggtttaaaaatgtctggtgacttgcttatttttaagtgatcaccattaagtcagaaaaatgtatttttaaatgtttcttgaagtgccttttgaacatttttaaacagcggatttaaataatgcataaaataaattgccatgttcaaagttgtttcatctgattatttttaaccaatataaaa

SEQ ID NO: 122326 - DNA, 930 bp, Homo sapiens
  Payload ID: 3966
  Gene Symbol: C1GALT1
  Gene Name: core 1 synthase, glycoprotein-N-acetylgalactosamine 3-beta-galactosyltransferase 1
  Uniprot ID: Q9NS00
  ENST ID: ENST00000402468
  CDS Start-End: 1-930
atggcctctaaatcctggctgaattttttaaccttcctctgtggatcagcaataggatttcttttatgttctcagctatttagtattttgttgggagaaaaggttgacacccagcctaatgttcttcataatgatcctcatgcaaggcattcagatgataatggacagaatcatctagaaggacaaatgaacttcaatgcagattctagccaacataaagatgagaacacagacattgctgaaaacctctatcagaaagttagaattctttgctgggttatgaccggccctcaaaacctagagaaaaaggccaaacacgtcaaagctacttgggcccagcgttgtaacaaagtgttgtttatgagttcagaagaaaataaagacttccctgctgtgggactgaaaaccaaagaaggcagagatcaactatactggaaaacaattaaagcttttcagtatgttcatgaacattatttagaagatgctgattggtttttgaaagcagatgatgacacgtatgtcatactagacaatttgaggtggcttctttcaaaatacgaccctgaagaacccatttactttgggagaagatttaagccttatgtaaagcagggctacatgagtggaggagcaggatatgtactaagcaaagaagccttgaaaagatttgttgatgcatttaaaacagacaagtgtacacatagttcctccattgaagacttagcactggggagatgcatggaaattatgaatgtagaagcaggagattccagagataccattggaaaagaaacttttcatccctttgtgccagaacaccatttaattaaaggttatctacctagaacgttttggtactggaattacaactattatcctcctgtagaggtaagtttagaaattttattactatgtcaatacttggactga

SEQ ID NO: 122327 - DNA, 6235 bp, Homo sapiens
  Payload ID: 3966
  Gene Symbol: C1GALT1
  Gene Name: core 1 synthase, glycoprotein-N-acetylgalactosamine 3-beta-galactosyltransferase 1
  Uniprot ID: Q9NS00
  ENST ID: ENST00000436587
  CDS Start-End: 224-1315
agcgggcgggagcgcgcgctgggcccgccttggccgccgccgctgtgctgccgctgccggggaataatctgggcggcagcgggcggcctcggctagcggccacgagccacttctgcggctgcccagagaagcaaaggtcaccagtcccaagtcgtccccctctccgccccccaggaggggcgagagggagccgcagctgatgtcagaaatacactttcgggaaatggcctctaaatcctggctgaattttttaaccttcctctgtggatcagcaataggatttcttttatgttctcagctatttagtattttgttgggagaaaaggttgacacccagcctaatgttcttcataatgatcctcatgcaaggcattcagatgataatggacagaatcatctagaaggacaaatgaacttcaatgcagattctagccaacataaagatgagaacacagacattgctgaaaacctctatcagaaagttagaattctttgctgggttatgaccggccctcaaaacctagagaaaaaggccaaacacgtcaaagctacttgggcccagcgttgtaacaaagtgttgtttatgagttcagaagaaaataaagacttccctgctgtgggactgaaaaccaaagaaggcagagatcaactatactggaaaacaattaaagcttttcagtatgttcatgaacattatttagaagatgctgattggtttttgaaagcagatgatgacacgtatgtcatactagacaatttgaggtggcttctttcaaaatacgaccctgaagaacccatttactttgggagaagatttaagccttatgtaaagcagggctacatgagtggaggagcaggatatgtactaagcaaagaagccttgaaaagatttgttgatgcatttaaaacagacaagtgtacacatagttcctccattgaagacttagcactggggagatgcatggaaattatgaatgtagaagcaggagattccagagataccattggaaaagaaacttttcatccctttgtgccagaacaccatttaattaaaggttatctacctagaacgttttggtactggaattacaactattatcctcctgtagagggtcctggttgctgctctgatcttgcagtttcttttcactatgttgattctacaaccatgtatgagttagaatacctcgtttatcatcttcgtccatatggttatttatacagatatcaacctaccttacctgaacgtatactaaaggaaattagtcaagcaaacaaaaatgaagatacaaaagtgaagttaggaaatccttgaaagaaaatcatgaatgaacaaaggtaatatgtctagcactgcactgaaaaaggacttctgcatttctgacatagaacactggaatcccagtgaggaattctaagtgaacattccttatagaaacctttcacatgaatgactataaactgaagctttaaatgagctgtgaagtgtgttaaaatgtgttttgatacagtaatatataaatatgtctatatatatgaggaacttgtgttttttaaatggtggccaggtagaggaactagaaaagagattttgttgcctgttttctgaccatctgtgttattgtcactgagaaactaaaatagtaaatttactaaaactacactgcaccatgttagtaataaacagatctgccttaaagaaaagaaaattttagaaagaaatattgttgctcagtgttgttaatatagctcaagaattgagtttatatttgcagtatgctataaatgatacccccctaccacacccacacacacagtttttgtctaatgaaaatgttgctgtgattatttataattggtagtatttcttccagaagaagctaaaataagactggcacttaccctgaagtgcattaataaaaccacactttaaaattatcatgggccttgactatattatatacttgattctaattagtcatcttttacgcaatctctgttgtctcttttctaaatgtgtttagccactcttgaataccattctccactattaacattaatttactcaaaccgttcatagcattctgtaaacatgtattttacatatttgttcccaaatttgcccattgttcattatgggtaactaataataaatttaatgctgtttcaggatgcttttcttataacagtgccactctcaggaattactaagtgacattttaaattgatattttaaactctttccaactacatagttatggtttatttcattctcatcctgttgggatgagaacttgtttgtgcctttcataacttgtttaaagcagagttttaaaattagtttataggatctgaggtggctattagttacagtggcaagattatttagaaagcaagattttgatgagaattaaaaacaatagaaaatgtagagtgcttaaacaaaaatgttatattttgaaagagtagatacttaatttataaataacagtctgaaggttggtgctattttgggataattgttttgctaatggataattctaacaatgcagaatacctagtcaagactgtcatcaaaaacattcacaaatgtttcattctatttttagtgactctgtttaaagagtttctgaaaggaaagaaattttttatttttattatctttagcagtactgagtgtcatagcagaatattttacagactttctatgagattatttttatggtacaaagtatttacatttccctcatgtttatcattatgccaattttacatggcagtcatgccactgactctgctatttagctaagtaatttcttttttcggagactgtctcactctgtctcccaggctggactgcagtggtgcgattctcctgcctcagcctcccgagtagcggggattacaggcacgcgctgccacgccccgccagttttcatatttttagtagagacagggttttgccgtgttggccaggctggtcttgaactcctgacctcaggtgatccacccaccttggcatcccaaagtgctgggattacgagcgtgagtcacagcacccggctaagtaatttctatttattgtgccaaaacatgtcaaaatcatgacctctttgaatggtatatttgagaggatgttcatttcattggttaaccatggactactctgtccacgtagtgaaaacatgcaccagtttttacctattatcatggtagtatcatctgccaaaatttcaaggcattcattttattctttgaacaactcttcaccatggtgtggacatgaattttcatatgtgttacttgactagaagtataaatggtttactatagatatccaaaaaccttgagatttgctcataggaaatgaatattgtgatgaatcctgggctctagagtcagacttgcttgggtttaaattcttgctctaacacttactgtttttgtaaccttgagcaattttaatctctctgtgtctcaatttcctcatcttttaattagggatgataatactacctacctcacaggatttttatgaggattaaataaatgtaaggtttttagaacattgatagggagcaataaatagaagattgtattattattctgttaccttggagtgtaagtactgcatttaagtgaatgaaaaatttgctttgaccagatactgaaggaaataagtaatagctagtatttatccaatgccaactgtatgctaggtactgtgcttagataatctgtgtataatagtgttaatcctcaaaatttgggtgttatacccctattatagataaggaaactgaggctcagagacaaagtaactttgtcactgtcacaaagctagtaagtaacagaggtaggatttatattcaaaaccctgtgtgttcattggaaccgtatcaggcttggggctattcatgtagcattatttccatttttatgtatatgatatatgacgtctgatgcattggccagtaatagtcaaattaacccagccaaattgtcacagtgattcttaaactgtggttctcacacttgcccaggatgttgttaaatgcagatctgaagaccccaatctcagaaattcaaatttaagcatggggcccaagagtatgcattcttaccagataccttgggcagtgactgtcaaaagtctggtcccaacaaacagcattaacgtcacctgggaacttgttggaaatgcagcctctctcggggcctcatctcagatcagatctactaaatcagatactctaggggcaggggcaggggcaggggctagcagttgtgtttaagcaaactctgcaggtgtctttcttatcctagtttgagaaccaatacccaacaacctacgtgattttggtgcaagtagtgtttgaaacacactgaagattactgcccaattactaagacatttttcaaaaagcatgttttaaatcagtgtagtccaggatcacactatattaaatataaagataacttaaaggatcattggatcattcattttggccaaatttttagcttctccaaagtgactaacatcagggcctacaataaaatctgtaattctccaagtttagtaattttatattgaggcaggaagggctcattaagtactaataagtacataatttattaaaaacatacataagtgtcatcaaaaaggtccacaattgttagtaaaaaaaattaaattgaagtagtaaatgctgttttataacatacatttttctgctaattcattctgttttgtgtgacctaataaagcaaaagaaaaataaaaaagcaattctccaagtacttcatagagcacataaaaccagatttcatgatgatgatgtattcactatcttttagattaagatctttgttatttggtaaatgatttcagtatggttttaaaacataaggcttttgatgtcttatgttctctaataatggtatgcttgtattttctagtgggaagttcatagataaagcagatttttgtcccagtttgctttcaaatataaatttcagagggctttttcttactgtaatgaggtatgaaaataaatcattgatcagctcttaatattttttgaatacagaattggatttgagcagtaaatttgctaactggttattttcacaattttcttgaatattaatttttcacttctttgagactgtcaaactatagttactaccaggttgatgcactgtacttgaaagaatcccttgattaaattacatctagcattttatttgccatttcaattttcagttcattagactataattctttgacagtttctgcctggtgtttattgcccttctttgtttgctttattactaacttccattttctagttactcttaaatgctgccttcacaaggttaatttggctgttaatagtgattagaatttttatcacttaattgataattttaagcctactaactagggttccctatgaaattgaaagtaaaagtctaagaataatgcctgctggctctcgagatacttgccctacttaaaaatctataatttaaaattaattctatgtctacaattattaaaggaagtaaagttatttgggttcttccactcacccttttctcaaaaacaacaacaaaaaacaaaactcattttatttttctactttatagtaggcctgacagaaacatagtgaagcaatctgggaggcaacctgtggtagattttatgctaaatgttaatgtaacctctgttgattttttaaaaatgtgtttatatataagatttgaaataaaaactttaatacaggctagaataaggaattttacaaattctctttagagcaaccaacattaaagttttagagttgaattttgctctatttcaactcccttacctctctagttttcagtttatattaagttttaataactttgcggggccctgcaaattaataatctacatgaagtatattattagagggaaactaatcttactgctaagcagtgtgttgtactacatagtgaatgttcgtgttttggaatttaaaaattatttaaggtaatggtgttacgaatggtttaaaaatgtctggtgacttgcttatttttaagtgatcaccattaagtcagaaaaatgtatttttaaatgtttcttgaagtgccttttgaacatttttaaacagcggatttaaataatgcataaaataaattgccatgttcaaagttgtttcatctgattatttttaaccaatat

SEQ ID NO: 122328 - DNA, 802 bp, Homo sapiens
  Payload ID: 3966
  Gene Symbol: C1GALT1
  Gene Name: core 1 synthase, glycoprotein-N-acetylgalactosamine 3-beta-galactosyltransferase 1
  ENST ID: ENST00000429911
  CDS Start-End: 409-802
gtcaaaatattggatttactctcagagtttctatcctgctcaatttgaattttcttcacggaagtgttttcctcaggaaagatattttattggctatttctgagttatttgagtacataagccacccagtaccttctgatcttcccattttctcttagtgtgtggctgagatatttttattctactcagccataaattggagtcagaagccttctcctttttactgttattttcacaatatttacttgctgagaatcccactcaagctgctaaaactaggcatgctctgtatgagttctactgctgttgtctgtggtttgggtggggcaaaacccactggcattctgaggctcatggggatgttttttcagttggctttctggaggatgtgaaatacactttcgggaaatggcctctaaatcctggctgaattttttaaccttcctctgtggatcagcaataggatttcttttatgttctcagctatttagtattttgttgggagaaaaggttgacacccagcctaatgttcttcataatgatcctcatgcaaggcattcagatgataatggacagaatcatctagaaggacaaatgaacttcaatgcagattctagccaacataaagatgagaacacagacattgctgaaaacctctatcagaaagttagaattctttgctgggttatgaccggccctcaaaacctagagaaaaaggccaaacacgtcaaagctacttgggcccagcgttgtaacaaagtgttgtttatgagttcagaagaaaataaagacttccctgctg

SEQ ID NO: 122329 - DNA, 591 bp, Homo sapiens
  Payload ID: 3966
  Gene Symbol: C1GALT1
  Gene Name: core 1 synthase, glycoprotein-N-acetylgalactosamine 3-beta-galactosyltransferase 1
  ENST ID: ENST00000419721
  CDS Start-End: 292-591
agacttcgggtggcggctgcgccataggcgggccacggcctggacgcgctgcggggaggggcggagcgagcgggcgggagcgcgcgctgggcccgccttggccgccgccgctgtgctgccgctgccggggaataatctgggcggcagcgggcggcctcggctagcggccacgagccacttctgcggctgcccagagaagcaaaggtcaccagtcccaagtcgtccccctctccgccccccaggaggggcgagagggagccgcagctgatgtcagaaatacactttcgggaaatggcctctaaatcctggctgaattttttaaccttcctctgtggatcagcaataggatttcttttatgttctcagctatttagtattttgttgggagaaaaggttgacacccagcctaatgttcttcataatgatcctcatgcaaggcattcagatgataatggacagaatcatctagaaggacaaatgaacttcaatgcagattctagccaacataaagatgagaacacagacattgctgaaaacctctatcagaaagttagaattctttgctgggttatgaccggccctcaaaaccta

SEQ ID NO: 122330 - DNA, 3136 bp, Homo sapiens
  Payload ID: 3967
  Gene Symbol: CBFB
  Gene Name: core-binding factor, beta subunit
  Uniprot ID: Q13951
  ENST ID: ENST00000290858
  CDS Start-End: 262-810
gcggtgagcgctggggctgcgcgggcggcaggcaacggctgaggcggcggcggcggcggcggcggcgtgggttgggctcgagcgggcggcggcgcctcagactccccggaacgggagcccacgcgggcgggcgcctgaaacaaagggaagcgggcgtccgggcgccgcgggtgggcggtcagtcggtcagcgcggagccagccagcgggtgcccgcgcaagccccgagcgcggccggccggcgcggcctcagggcgggaagatgccgcgcgtcgtgcccgaccagagaagcaagttcgagaacgaggagttttttaggaagctgagccgcgagtgtgagattaagtacacgggcttcagggaccggccccacgaggaacgccaggcacgcttccagaacgcctgccgcgacggccgctcggaaatcgcttttgtggccacaggaaccaatctgtctctccagttttttccggccagctggcagggagaacagcgacaaacacctagccgagagtatgtcgacttagaaagagaagcaggcaaggtatatttgaaggctcccatgattctgaatggagtctgtgttatctggaaaggctggattgatctccaaagactggatggtatgggctgtctggagtttgatgaggagcgagcccagcaggaggatgcattagcacaacaggcctttgaagaggctcggagaaggacacgcgaatttgaagatagagacaggtctcatcgggaggaaatggaggtgagagtttcacagctgctggcagtaactggcaagaagacaacaagaccctagtcctggttccaatttaggtggtggtgatgacctcaaacttcgttaattaatagcacagcagatgtgtgctgcccatctttacatacacattgcttctagttggcagaaataattgattaaaagaccagaaactgtgataactggaggtactacggtctatttctcaaccttaggcagtaatagacatcacaaactgccatggttttgcactatgattataatacctgcatttctaattttttaagcatgtagccagtaataatttgaagttttttttctatgcaagcttaccttgttggcattattttagggagttgaaactatcaactgtaaagctccttttcttccactttaatttaaaagttcatgtcatttaaaaacaagtcaagaaattaaaattgtatcagagggttttctctaatcattttttctatttttttttttgtacttctagatgttttggttatacagcttcattttagatgagcattcttattttttgttttgtttgccccatttccttttgtgtttttatagtctatagcattttaaaactgctgatgttgtttgcattatttacaggctaaaaacttagtagcatagagctgtctgccacagccttctgacaaagtttacagttattaaagttgcagtatccttttaaatgctagtaatcagcactctttcttttttttttttttaatagagacagggtctcgcagtgttgcccaggctggtctcgaactcctggcatcaagcgatcctcctgccttagcctcccagagtactgggattacaggctctttctttttaaacataaaagttttaaattggtattaactctgtactctgccctagattgttttagcttctgttctgtaatcatgagtttggttggagatattctccatagatgatcttctactgaaatgcctaaagaagtcacaggctggcttctgttttattcagggatttttttaaaaagtcaatcagaaaagggatactggagcttcttcatgtatgtaacagcatattaaactggagacagtgatgaatcagctacaaaggtaatattgtattaaaatcatgtttaagatagctgcttttatgtgtattttatattgcatgcttttgtaaaaacatgctgggtgatgaaagattagttttagagagaaaatgttcatctgtgcagaggatgcattttcttccattaattctggaaaaaacgttcacagttatatatatggtattttgcaaaaggactattaatagaaccttttgagatgaattaatgtaagaatattttttaaataggcttactgtcaaattgcaactttttttttagatacagagtggaaaacagtgctaagtcatttggcacctccttacaaatatttttcatggtcacatttattaaatgttactacatttctgaatttttgaaaaatgtattttatcattaaatggcattattttaaagggtgaaaaactgacacagtcaattcagaaaatggactgaagtctgaataaggtcattgcatttaaaaagcatataactgtacttgactgatgagggaggtgttactttcattgtatataggtcttatttcataaacagatatcctgtatcaaataaaagtatttgttatatatttgaagttatgcatggaaaggagtgtgtttaaattgttacaaacaataatgcgtcattaaaggccatgctgatcttgcataactataagtactatgaatgaatttggttggttttggtgttgtacagctcacatgtttacacactcagtgccctaatttcccctgagggaatcgctttttaagtgatccttacagtggtgttttatgttactttattacagagctccttggttttttacttctgcacttaaatttttttaaataacatgatgatggtacattttcctctattgtctagctaagggctttcggtccaccagtaaataagatcaaatgctcttaaatgttcctgttaccatcctaatgtaaatactggatttttctgtcatttagcaccatgctgcttctgtctgtcttaatgctggcattaagatcatgagccctttttctccagtagtacaggctttgaaaactacttctattaagttattgatgcaatttgatattttttcataatctatatttaaacaaaattacatcattgcatcatcttttctaaattcatctccattaaaacttgccttaagctaccagattgcttttgccaccattggccatactgtgtgtttgtttgtttaatttactttcacaataaacttctgtgtagtaaaaa

SEQ ID NO: 122331 - DNA, 2971 bp, Homo sapiens
  Payload ID: 3967
  Gene Symbol: CBFB
  Gene Name: core-binding factor, beta subunit
  Uniprot ID: Q13951
  ENST ID: ENST00000412916
  CDS Start-End: 164-727
agactccccggaacgggagcccacgcgggcgggcgcctgaaacaaagggaagcgggcgtccgggcgccgcgggtgggcggtcagtcggtcagcgcggagccagccagcgggtgcccgcgcaagccccgagcgcggccggccggcgcggcctcagggcgggaagatgccgcgcgtcgtgcccgaccagagaagcaagttcgagaacgaggagttttttaggaagctgagccgcgagtgtgagattaagtacacgggcttcagggaccggccccacgaggaacgccaggcacgcttccagaacgcctgccgcgacggccgctcggaaatcgcttttgtggccacaggaaccaatctgtctctccagttttttccggccagctggcagggagaacagcgacaaacacctagccgagagtatgtcgacttagaaagagaagcaggcaaggtatatttgaaggctcccatgattctgaatggagtctgtgttatctggaaaggctggattgatctccaaagactggatggtatgggctgtctggagtttgatgaggagcgagcccagcaggaggatgcattagcacaacaggcctttgaagaggctcggagaaggacacgcgaatttgaagatagagacaggtctcatcgggaggaaatggaggcaagaagacaacaagaccctagtcctggttccaatttaggtggtggtgatgacctcaaacttcgttaattaatagcacagcagatgtgtgctgcccatctttacatacacattgcttctagttggcagaaataattgattaaaagaccagaaactgtgataactggaggtactacggtctatttctcaaccttaggcagtaatagacatcacaaactgccatggttttgcactatgattataatacctgcatttctaattttttaagcatgtagccagtaataatttgaagttttttttctatgcaagcttaccttgttggcattattttagggagttgaaactatcaactgtaaagctccttttcttccactttaatttaaaagttcatgtcatttaaaaacaagtcaagaaattaaaattgtatcagagggttttctctaatcattttttctatttttttttttgtacttctagatgttttggttatacagcttcattttagatgagcattcttattttttgttttgtttgccccatttccttttgtgtttttatagtctatagcattttaaaactgctgatgttgtttgcattatttacaggctaaaaacttagtagcatagagctgtctgccacagccttctgacaaagtttacagttattaaagttgcagtatccttttaaatgctagtaatcagcactctttcttttttttttttttaatagagacagggtctcgcagtgttgcccaggctggtctcgaactcctggcatcaagcgatcctcctgccttagcctcccagagtactgggattacaggctctttctttttaaacataaaagttttaaattggtattaactctgtactctgccctagattgttttagcttctgttctgtaatcatgagtttggttggagatattctccatagatgatcttctactgaaatgcctaaagaagtcacaggctggcttctgttttattcagggatttttttaaaaagtcaatcagaaaagggatactggagcttcttcatgtatgtaacagcatattaaactggagacagtgatgaatcagctacaaaggtaatattgtattaaaatcatgtttaagatagctgcttttatgtgtattttatattgcatgcttttgtaaaaacatgctgggtgatgaaagattagttttagagagaaaatgttcatctgtgcagaggatgcattttcttccattaattctggaaaaaacgttcacagttatatatatggtattttgcaaaaggactattaatagaaccttttgagatgaattaatgtaagaatattttttaaataggcttactgtcaaattgcaactttttttttagatacagagtggaaaacagtgctaagtcatttggcacctccttacaaatatttttcatggtcacatttattaaatgttactacatttctgaatttttgaaaaatgtattttatcattaaatggcattattttaaagggtgaaaaactgacacagtcaattcagaaaatggactgaagtctgaataaggtcattgcatttaaaaagcatataactgtacttgactgatgagggaggtgttactttcattgtatataggtcttatttcataaacagatatcctgtatcaaataaaagtatttgttatatatttgaagttatgcatggaaaggagtgtgtttaaattgttacaaacaataatgcgtcattaaaggccatgctgatcttgcataactataagtactatgaatgaatttggttggttttggtgttgtacagctcacatgtttacacactcagtgccctaatttcccctgagggaatcgctttttaagtgatccttacagtggtgttttatgttactttattacagagctccttggttttttacttctgcacttaaatttttttaaataacatgatgatggtacattttcctctattgtctagctaagggctttcggtccaccagtaaataagatcaaatgctcttaaatgttcctgttaccatcctaatgtaaatactggatttttctgtcatttagcaccatgctgcttctgtctgtcttaatgctggcattaagatcatgagccctttttctccagtagtacaggctttgaaaactacttctattaagttattgatgcaatttgatattttttcataatctatatttaaacaaaattacatcattgcatcatcttttctaaattcatctccattaaaacttgccttaagctaccagattgcttttgccaccattggccatactgtgtgtttgtttgttt

SEQ ID NO: 122332 - DNA, 509 bp, Homo sapiens
  Payload ID: 3967
  Gene Symbol: CBFB
  Gene Name: core-binding factor, beta subunit
  ENST ID: ENST00000564034
  CDS Start-End: 230-509
caacggctgaggcggcggcggcggcggcggcggcgtgggttgggctcgagcgggcggcggcgcctcagactccccggaacgggagcccacgcgggcgggcgcctgaaacaaagggaagcgggcgtccgggcgccgcgggtgggcggtcagtcggtcagcgcggagccagccagcgggtgcccgcgcaagccccgagcgcggccggccggcgcggcctcagggcgggaagatgccgcgcgtcgtgcccgaccagagaagcaagttcgagaacgaggagttttttaggaagctgagccgcgagtgtgagattaagtacacgggcttcagggaccggccccacgaggaacgccaggcacgcttccagaacgcctgccgcgacggccgctcggaaatcgtatatttgaaggctcccatgattctgaatggagtctgtgttatctggaaaggctggattgatctccaaagactggatggtatgggctgtctggagtttgatgaggagcgagccc

SEQ ID NO: 122333 - DNA, 545 bp, Homo sapiens
  Payload ID: 3967
  Gene Symbol: CBFB
  Gene Name: core-binding factor, beta subunit
  ENST ID: ENST00000563939
  CDS Start-End: 362-545
aaaatgcgaaaccagatgccgcgggccggtactcgcggggagacgcttttcctggggctcgccgcggtggcgcgtgtcggccaacggagcaccgcgagtggagctcgaacccgagccagactaaacaagcgaagggcattgtttaggcggcgacaccgaagaagggttcagggtatttgtagcaagcaaacccccattcggaaaaagaagtggagcttcattcaaggcttttgtggccacaggaaccaatctgtctctccagttttttccggccagctggcagggagaacagcgacaaacacctagccgagagtatgtcgacttagaaagagaagcaggcaaggtatatttgaaggctcccatgattctgaatggagtctgtgttatctggaaaggctggattgatctccaaagactggatggtatgggctgtctggagtttgatgaggagcgagcccagcaggaggatgcattagcacaacaggcctttgaagaggctcggagaaggacacgcgaatttgaagatagagacaggtctcatcggg

SEQ ID NO: 122334 - DNA, 584 bp, Homo sapiens
  Payload ID: 3967
  Gene Symbol: CBFB
  Gene Name: core-binding factor, beta subunit
  ENST ID: ENST00000561924
  CDS Start-End: 257-505
gtggcggcggcggcggcggcggcggccgggggcgattaagtacacgggcttcagggaccggccccacgaggaacgccaggcacgcttccagaacgcctgccgcgacggccgctcggaaatcgcttttgtggccacaggaaccaatctgtctctccagttttttccggccagctggcagggagaacagcgacaaacacctagccgagagtatgtcgacttagaaagagaagcaggcaaggtatatttgaaggctcccatgattctgaatggagtctgtgttatctggaaaggctggattgatctccaaagactggatggtatgggctgtctggagtttgatgaggagcgagcccagcaggaggatgcattagcacaacaggcctttgaagaggctcggagaaggacacgcgaatttgaagatagagacaggtctcatcgggaggaaatggaggtgagagtttcacagctgctggcagtaactggcaagaagacaacaagaccctagtcctggttccaatttaggtggtggtgatgacctcaaacttcgttaattaatagcacagcagatgtgtgctgcccatctt

SEQ ID NO: 122335 - DNA, 846 bp, Homo sapiens
  Payload ID: 3967
  Gene Symbol: CBFB
  Gene Name: core-binding factor, beta subunit
  ENST ID: ENST00000565389
  CDS Start-End: 1-181
taggaagctgagccgcgagtgtgagattaagtacacgggcttcagggaccggccccacgaggaacgccaggcacgcttccagaacgcctgccgcgacggccgctcggaaatcgcaagaagacaacaagaccctagtcctggttccaatttaggtggtggtgatgacctcaaacttcgttaattaatagcacagcagatgtgtgctgcccatctttacatacacattgcttctagttggcagaaataattgattaaaagaccagaaactgtgataactggaggtactacggtctatttctcaaccttaggcagtaatagacatcacaaactgccatggttttgcactatgattataatacctgcatttctaattttttaagcatgtagccagtaataatttgaagttttttttctatgcaagcttaccttgttggcattattttagggagttgaaactatcaactgtaaagctccttttcttccactttaatttaaaagttcatgtcatttaaaaacaagtcaagaaattaaaattgtatcagagggttttctctaatcattttttctatttttttttttgtacttctagatgttttggttatacagcttcattttagatgagcattcttattttttgttttgtttgccccatttccttttgtgtttttatagtctatagcattttaaaactgctgatgttgtttgcattatttacaggctaaaaacttagtagcatagagctgtctgccacagccttctgacaaagtttacagttattaaagttgcagtatccttttaaatgctagtaatcagcactctttcttttttttttttttaatagagaca

SEQ ID NO: 122336 - DNA, 7737 bp, Homo sapiens
  Payload ID: 3968
  Gene Symbol: CBFA2T2
  Gene Name: core-binding factor, runt domain, alpha subunit 2
  translocated to, 2
  Uniprot ID: O43439
  ENST ID: ENST00000346541
  CDS Start-End: 538-2352
ggagggagaaaaagagagagactgactgtatctggggattctggcaaggtgaagagctggtctgtttggcaggaccttcccatctgggatccatctgtgtttccctggaatgggacaggcagctctagtcagtgagaaatcgcagatgtgagagagctgacacatgtccagctaatgaaaggaggaggaaggctggtctccgattgagctttgaagattaggaggagaaaaagaggagctttggaatatctatttcaaataaatttggtgtatttaagaatctggattgtttataatttgggcatttgggaggtggggttttgccatgttgcccaggtgggtctcaaactcctgggctaaagcgatcttcccatgttggctgcccaaagtgctgggattacaggcaagagccaccataccagttcctgtctagatattatgatgaagattgaggatggtagtttttgtggagcacaatcctgactgtacctgtgatgttgcattcatcttttggaacataagcagatcaccaggtgaatggctaaagaatctggaataagcttgaaagaaatacaggtcctggcaaggcaatggaaagttggtcctgagaaaagggtgccagcgatgcctggatcgcctgtggaagtgaagatacagtccagatcctcacctcccaccatgccacccctcccaccaataaatcctggaggaccgaggccagtgtccttcactcctactgcattaagcaatggcatcaaccattctcctcctaccctgaatggtgccccatcaccgccacagagattcagcaatggtcctgcctcctccacatcatctgcactcacaaatcagcaattgccagccacttgtggtgctcgacaactcagcaagttgaaacgctttcttaccactctgcaacagtttggcaatgacatctcccctgagattggggagaaggtgcggactcttgttcttgcactggtgaactcaacagtgacaattgaggaattccactgtaagctccaagaagccacaaactttccccttcgtccttttgtgattccatttctcaaggccaacctgcccctgctgcagcgggaactgctgcactgcgctcgggcggccaagcagaccccatcccagtacctggctcagcacgaacaccttctgctcaacacaagcattgcatcgcctgctgactcgtcagagttgctcatggaggtgcacggaaatgggaagaggcccagtccagagaggagagaagagaatagttttgatagagacacaattgctcctgagcctcctgccaagagagtatgtaccatcagccctgctcctcggcacagtcctgctctcactgtgcccctcatgaatcccgggggccaattccatcctacccctccacctcttcagcattacaccttagaggatattgcaacttctcacctgtatcgggaacccaacaagatgctagagcatcgagaagttcgtgatagacaccacagtcttggtctaaatggaggctatcaagatgagttggtagatcatcgtttgacagaaagggaatgggctgatgaatggaaacatcttgaccatgcgctgaattgcattatggaaatggtagagaaaacaaggcgctctatggcagttctgcggcgctgtcaggaatcagatcgtgaagaactcaactactggaaaagacggtacaatgaaaacacagagctgaggaaaacggggaccgagttggtctccaggcagcacagccctgggagtgcagattctctcagcaatgattctcagagagagttcaacagcaggccaggtacaggatacgtacctgtggagttttggaaaaaaacagaagaagctgtgaataaggtgaaaattcaggccatgtcagaagtacagaaggccgtcgctgaggcagagcagaaagcctttgaagtgattgcaacagagagagcacgaatggagcaaaccatagcggatgtcaagcggcaggccgcagaggatgctttcctcgtcatcaatgagcaagaggagtccacggagaactgctggaactgtggccgcaaagccagcgagacatgcagtggctgcaatatcgcgcgatactgtggctctttctgccagcacaaggactgggagcggcaccaccgcctctgtggtcagaacctgcatggccagagcccccacggccagggccggccgctgcttcctgtaggcaggggctcctctgccaggtccgccgactgcagcgtgcccagcccagccctcgacaagacctcggcaaccacatcgcgttcctcaacacctgcttctgtgacagctatcgacaccaacggactctgagccccggactctgcttaccctgatggctgctcagcaccacagagtgcttgggctgagggactgactgttggaacccgtgcatgtagctgccgggtcatcagcaagaaatgaattggaggcaggaagagtccaagcctgaataataacaccccacagcctctctgtgcacttgctgtctgcggagccagtgtgccattctctgcacatgggcagccagcctgagctgcctcctccatggctttcctggtttgttcctctctccactgaagctgacttagccggccccttttcagtgtagaccaccagctcccctccccatctccttgagtcagcagactgtccaatgtgctcagccaggctggaggcggcaggcggcaggcagcaggctgtggaggaggcccctcggtcagggagcggcctgcctcacccctgaatagctccttcggccccatctccatcctcagcagatgacactgattggcctcacggggacttgggtaagcaacaggcggcattcaggactcttctcaaccctgctgttcagacttgataagatctcagagtccacaggaaagaagtcactgttgcaataaaagcacccgtagtagcaaaaacataaaacaaataaaacttcccccacatcacagatgattttggacaagattttccaaccttgctggctactttagtttgggacctgttttttttctcatttgattttgcttgtgcagaaaatagtttccagcacatggattgatctgagagagaatgaggctcagttgtggatagtctgttttctctgagcatgttggccaactagtatcgtcaaattattgagtggatcatctcttggaaatgcagaacttctgccaccacttggctatttgcacagtcatcttgttctgtgtccttttatctctcagaccacacacatctggaacgctgtgggcatcttctgcccatgggctccatttggcacctgctgagccacagttgtcctgctggatgtgctgtgcaggttggtaggacttgcccccactgtcaaggcctggtctcatctgaaaagccctcctggacctcaaagaattcttcagacctcatagttacaggtcattatatctactatgttgatttatcatcaggcacacaacttctgtttccttctcttgtgttatctgatagcgtccctccttgagctcatcagaaaggttttatgaaatgtgaaccattttgggaaaagctgatcaatttttcttcctagcttcccattttcaaatgggacatcactcatatccctttcagaatgttaggaactgcctcccacattcttccctgtctttttgggttttgttttttgttgttgtggtggttttttaacacaaagtctcactctgttgcccaggctggagtgcagtggcatgatcttggctcactgcaacctctgccttccaggttcaagcaattctcctgcctcagcctcccgagtagctgagattacaggcgcccaccaccacgcccagctaatttttgtatttttagtagagacagggtttcaccatgttggccaggctgatctcgaactcctgacctcaggtgacctgccttggcctcccaaagtgcagggattacaagcgtgagccaccatgcccggcctgtctttttggttttgatgggagtctgaggaccccgacccctcctgctctccatctttgagcctctggcatcctctcacacccagaaatcagttggagtaagtttaattggccctgctccagctggcctttgaagcacaagtttaaatctccaccttctgtgcactgaccagagtctaaaataaaagttgtcagtaccataaaggaaaagggatccacacaggtagccttctccttggatacaggtacatcttactgtaagaatttcaagtcctggctgggcgcagtggctcactcctgtaatcccagcactttgagagaccgaggcaggcagatcacttgaggtcaggaattcaagaccaacctggccaacatggtgaaaccctgtctctaataaaaaaaaaatagaaaaatcagccgggtgtggtggcacacacctgtaatcctagctactcaggaggctgaggcaagagaatctcttgaacctgtgagccagaggttgcagtgagccgagattccaccactgcactccagcctgggcaacagagcaaaactctgtctcaaaaaaaaaaaaaaaaaggcaaaattaaagaatttcaagtccctaatttactctaaccaagcattttcagtcttacaaagaaatctagtgcacgacacctttaaaatgcctagatttccattgcctaaagtaaggtgtgaccagtgaaacaacagcagagaatcatgttcctttgctgtggaacacataagccccacagttttccagtcagcctaatacatgggtatcccccgaccccatctgcctccttaagccacagtccttggtggggaactctaagggggacggagtcagtaccccggacagggccacatttgcatgagacatggctgtctcacaggtcacagagccattacaacagcttactagtttttcatggatttgttggattaacaccttaagcaggttttttattgttattttgtttgtttgtttgttttgagacgggagtttctctcttgtctcccaggctggagtgcaatcgcgcaatctcggctcacggtaacctctgcctcccaggttcaagcgagtctcctgcctcagccttctgagtagctgggattacaggcatgcgccaccacgcccaactaattttgtatttttagtagagacggggtttctccttgttggtcaggctggtctcaaaccccggacctcaggtgatccccccaccttggcctcccaaagtgccaggattacaggcatgagccactgtgtccggtcttgagcaggtttttaaaatctccagtggccataaaactagccagggtagctcatgcttttactggttggaataaggagccaaaaccaacaaaataatatttattagggctcgatgcccatttctgtggctaaggcttaggtttggtgtgcagagcctggcctgctcttgtgggctgtggttgctgtgacagtttcgttttctgaatctttgtaatgctcttccaccctgctcgtgctgcccagaggctgatctgcaaacctgggcagtattccacactgaagctcagtttgcaaaccttctgctgtgttaattctggtcagtttcacacagaagtcacgagggcctctgcccaggaccttctattcacatttcaagaatccctttctgaaattctccaactctctggtcaggaggaggagcaccattggggcggggtaggcagctagaggcgcaggagcgaatccaggttccttgcgtggttcccagcctctgctgacagcacctcagctaccaggtggggagtggaaattcagcctgcttagaggactgacctctacagttcatatttgcagtgacataaaaggcaaagaggagctggcatggtggtacagaaggtatcagtcaagcgcaggctcttcagaaacctagaaactaaaaagagatgcaacatgtgactggccatcagccagacatgtctagggtgagaccagtgctcagcaccacccgccaaggaacactgatgagttgtgggacattatggtcggccaagtgaggaatgattgcagggaccagagaagaccaaagatgccagatgtccccagagtttcttgagggctgggtttcacgtctttgcttgtcctttttgtccccacttgcctgcaccgtgcctgactcatccagtggggaaggtgactcaagaagttgtttaagcctaggcctaggcagtccacttcgggaggtgggggcactccacactggggggccctgcagctccagggctggtgctctagcagatccgctcaggcacggttgggtgaccgtggggtcaccgattgcgtagattatttctagggcagtgctgggttagaaatgtctgtctggaaacaggacacatcttgccaccacaagtccacacctggccttggctgctgcccgctctctgcagcgtggatttcctttgcccatttgggccagaaggtcaccaggagttcatcactgcttagtgtcaacttgacatcttcagcttccagacagaaaacccatgctttactttgtacagccctgtcccagagttagtaagcctcggcttgtcacctgcttgcaaagggtatagacatcattctgggtagttctagaggatatcgcaacaagtgcgtttgaaggttcagcacagctggaattgtacggtagtgagctcttcaaaatgaaaacagaatgaccggatggccatctgtcctggaaactgtagaattgaataaatcactgaaaatagaacacttcttggaggctttcttcagaactgaactagaaacaaggtttccaggctcccaggtcagtagaccaaaccaacttccttagatttttttttttaagctgtttgcagaaaactgggtggtagcgtgtctgaaccaaacggaagaatagccagcggagcatggactgttccagcacgggccagatggccagctgtcgagagcagccctgcccagattgcggtgggggctgtgccagcggctccgcagggcccttccaactctggagtgtctgtagttcttgtgaaaccaaaacgttgactacctgcctctttcctcgggcatcgacgtgctcatttccaaagatgatggtgcaggtgaccttttccatcgtgagctaagagaaggttaggaggcctgaggggcgggccttgtgtcccctcctccccctccacagcccctgaggtggagcttccctcacagaccccatctggtcgagcctacggctgcccagtgtacactcagtgatgcttataccaaatagggcatgtgcgctggtgtctgttggggacagccccatccctaccttggagtcggcagagaagcagcaataagcattaggcgaatgattgaaagggctgctgcgccaagaggccttcagtccccttaacgtggctttccaacttcctgacgaggctacaaaggctccgctcacaaaagaaagccaataatgtaaataaatagaaaacgaagcctccacgcgtggtttttaaagggggatgatgaatgtgacaccacccacagaatgcattagaatctggtttttctgtgctttgtcattttactctgataggaatttttgttacctaactctgtgcataacttatttaatgtactgtataaatgaaccaaaactgttaaatatgtatttagtttgttctacttaaagtagtcaataaaaaggctatattcctt

SEQ ID NO: 122337 - DNA, 1181 bp, Homo sapiens
  Payload ID: 3968
  Gene Symbol: CBFA2T2
  Gene Name: core-binding factor, runt domain, alpha subunit 2
  translocated to, 2
  Uniprot ID: O43439
  ENST ID: ENST00000344201
  CDS Start-End: 368-1159
ggaagggtagtggagagagaggaagcaggagggagggagaaaaagagagagactgactgtatctggggattctggcaaggtgaagagctggtctgtttggcaggaccttcccatctgggatccatctgtgtttccctggaatgggacaggcagctctagtcagtgagaaatcgcagatgtgagagagctgacacatgtccagctaatgaaaggaggaggaaggctggtctccgattgagctttgaagattaggaggagaaaaagaggagctttggaatatctatttcaaataaatttggtgtatttaagaatctggattgtttataatttgggcatttgggttggtcctgagaaaagggtgccagcgatgcctggatcgcctgtggaagtgaagatacagtccagatcctcacctcccaccatgccacccctcccaccaataaatcctggaggaccgaggccagtgtccttcactcctactgcattaagcaatggcatcaaccattctcctcctaccctgaatggtgccccatcaccgccacagagattcagcaatggtcctgcctcctccacatcatctgcactcacaaatcagcaattgccagccacttgtggtgctcgacaactcagcaagttgaaacgctttcttaccactctgcaacagtttggcaatgacatctcccctgagattggggagaaggtgcggactcttgttcttgcactggtgaactcaacagtgacaattgaggaattccactgtaagctccaagaagccacaaactttccccttcgtccttttgtgattccatttctcaaggccaacctgcccctgctgcagcgggaactgctgcactgcgctcgggcggccaagcagaccccatcccagtacctggctcagcacgaacaccttctgctcaacacaagcattgcatcgcctgctgactcgtcagagttgctcatggaggtgcacggaaatgggaagaggcccagtccagagagctgcataatacatctaaaatctatgggagtagcttccagacatgagtatttttcgggaactcttcagatgcctgcacacccggtaagaaactctactctagagaatttatgggtcgactgttccagaagcctcaggagtacagttctgccttttccttgatgctgtttgtagaaagaattgg

SEQ ID NO: 122338 - DNA, 2864 bp, Homo sapiens
  Payload ID: 3968
  Gene Symbol: CBFA2T2
  Gene Name: core-binding factor, runt domain, alpha subunit 2
  translocated to, 2
  Uniprot ID: O43439
  ENST ID: ENST00000342704
  CDS Start-End: 182-1969
aacggcggcggcggcggcggcgacggcgacagcagcggtggtggtgtctggttagctcggcggctgcagatctcgcggcgacgcctgcgagggacccgggccgcgggtcgaggcgggcggcgcctgcgagggacccgtgtcgcgggtagaggcgggcggcgcgcggcggcggcgctcggcgatggtaggcgtccctggagcggccgccttccagcttggtcctgagaaaagggtgccagcgatgcctggatcgcctgtggaagtgaagatacagtccagatcctcacctcccaccatgccacccctcccaccaataaatcctggaggaccgaggccagtgtccttcactcctactgcattaagcaatggcatcaaccattctcctcctaccctgaatggtgccccatcaccgccacagagattcagcaatggtcctgcctcctccacatcatctgcactcacaaatcagcaattgccagccacttgtggtgctcgacaactcagcaagttgaaacgctttcttaccactctgcaacagtttggcaatgacatctcccctgagattggggagaaggtgcggactcttgttcttgcactggtgaactcaacagtgacaattgaggaattccactgtaagctccaagaagccacaaactttccccttcgtccttttgtgattccatttctcaaggccaacctgcccctgctgcagcgggaactgctgcactgcgctcgggcggccaagcagaccccatcccagtacctggctcagcacgaacaccttctgctcaacacaagcattgcatcgcctgctgactcgtcagagttgctcatggaggtgcacggaaatgggaagaggcccagtccagagaggagagaagagaatagttttgatagagacacaattgctcctgagcctcctgccaagagagtatgtaccatcagccctgctcctcggcacagtcctgctctcactgtgcccctcatgaatcccgggggccaattccatcctacccctccacctcttcagcattacaccttagaggatattgcaacttctcacctgtatcgggaacccaacaagatgctagagcatcgagaagttcgtgatagacaccacagtcttggtctaaatggaggctatcaagatgagttggtagatcatcgtttgacagaaagggaatgggctgatgaatggaaacatcttgaccatgcgctgaattgcattatggaaatggtagagaaaacaaggcgctctatggcagttctgcggcgctgtcaggaatcagatcgtgaagaactcaactactggaaaagacggtacaatgaaaacacagagctgaggaaaacggggaccgagttggtctccaggcagcacagccctgggagtgcagattctctcagcaatgattctcagagagagttcaacagcaggccaggtacaggatacgtacctgtggagttttggaaaaaaacagaagaagctgtgaataaggtgaaaattcaggccatgtcagaagtacagaaggccgtcgctgaggcagagcagaaagcctttgaagtgattgcaacagagagagcacgaatggagcaaaccatagcggatgtcaagcggcaggccgcagaggatgctttcctcgtcatcaatgagcaagaggagtccacggagaactgctggaactgtggccgcaaagccagcgagacatgcagtggctgcaatatcgcgcgatactgtggctctttctgccagcacaaggactgggagcggcaccaccgcctctgtggtcagaacctgcatggccagagcccccacggccagggccggccgctgcttcctgtaggcaggggctcctctgccaggtccgccgactgcagcgtgcccagcccagccctcgacaagacctcggcaaccacatcgcgttcctcaacacctgcttctgtgacagctatcgacaccaacggactctgagccccggactctgcttaccctgatggctgctcagcaccacagagtgcttgggctgagggactgactgttggaacccgtgcatgtagctgccgggtcatcagcaagaaatgaattggaggcaggaagagtccaagcctgaataataacaccccacagcctctctgtgcacttgctgtctgcggagccagtgtgccattctctgcacatgggcagccagcctgagctgcctcctccatggctttcctggtttgttcctctctccactgaagctgacttagccggccccttttcagtgtagaccaccagctcccctccccatctccttgagtcagcagactgtccaatgtgctcagccaggctggaggcggcaggcggcaggcagcaggctgtggaggaggcccctcggtcagggagcggcctgcctcacccctgaatagctccttcggccccatctccatcctcagcagatgacactgattggcctcacggggacttgggtaagcaacaggcggcattcaggactcttctcaaccctgctgttcagacttgataagatctcagagtccacaggaaagaagtcactgttgcaataaaagcacccgtagtagcaaaaacataaaacaaataaaacttcccccacatcacagatgattttggacaagattttccaaccttgctggctactttagtttgggacctgttttttttctcatttgattttgcttgtgcagaaaatagtttccagcacatggattgatctgagagagaatgaggctcagttgtggatagtctgttttctctgagcatgttggccaactagtatcgtcaaattattgagtggatcatctcttggaaatgcagaacttctgccaccacttggctatttgcacagtca

SEQ ID NO: 122339 - DNA, 7274 bp, Homo sapiens
  Payload ID: 3968
  Gene Symbol: CBFA2T2
  Gene Name: core-binding factor, runt domain, alpha subunit 2
  translocated to, 2
  Uniprot ID: O43439
  ENST ID: ENST00000359606
  CDS Start-End: 40-1884
cgcctgccaccatgcccagctaatttttgtttagtagagatggggtttcaccatgttggccaggctcgtcttgaactcctgacctcaggtgatctgcctgcattggcctcccaacgtgctgggattacagttggtcctgagaaaagggtgccagcgatgcctggatcgcctgtggaagtgaagatacagtccagatcctcacctcccaccatgccacccctcccaccaataaatcctggaggaccgaggccagtgtccttcactcctactgcattaagcaatggcatcaaccattctcctcctaccctgaatggtgccccatcaccgccacagagattcagcaatggtcctgcctcctccacatcatctgcactcacaaatcagcaattgccagccacttgtggtgctcgacaactcagcaagttgaaacgctttcttaccactctgcaacagtttggcaatgacatctcccctgagattggggagaaggtgcggactcttgttcttgcactggtgaactcaacagtgacaattgaggaattccactgtaagctccaagaagccacaaactttccccttcgtccttttgtgattccatttctcaaggccaacctgcccctgctgcagcgggaactgctgcactgcgctcgggcggccaagcagaccccatcccagtacctggctcagcacgaacaccttctgctcaacacaagcattgcatcgcctgctgactcgtcagagttgctcatggaggtgcacggaaatgggaagaggcccagtccagagaggagagaagagaatagttttgatagagacacaattgctcctgagcctcctgccaagagagtatgtaccatcagccctgctcctcggcacagtcctgctctcactgtgcccctcatgaatcccgggggccaattccatcctacccctccacctcttcagcattacaccttagaggatattgcaacttctcacctgtatcgggaacccaacaagatgctagagcatcgagaagttcgtgatagacaccacagtcttggtctaaatggaggctatcaagatgagttggtagatcatcgtttgacagaaagggaatgggctgatgaatggaaacatcttgaccatgcgctgaattgcattatggaaatggtagagaaaacaaggcgctctatggcagttctgcggcgctgtcaggaatcagatcgtgaagaactcaactactggaaaagacggtacaatgaaaacacagagctgaggaaaacggggaccgagttggtctccaggcagcacagccctgggagtgcagattctctcagcaatgattctcagagagagttcaacagcaggccaggtacaggatacgtacctgtggagttttggaaaaaaacagaagaagctgtgaataaggtgaaaattcaggccatgtcagaagtacagaaggccgtcgctgaggcagagcagaaagcctttgaagtgattgcaacagagagagcacgaatggagcaaaccatagcggatgtcaagcggcaggccgcagaggatgctttcctcgtcatcaatgagcaagaggagtccacggagaactgctggaactgtggccgcaaagccagcgagacatgcagtggctgcaatatcgcgcgatactgtggctctttctgccagcacaaggactgggagcggcaccaccgcctctgtggtcagaacctgcatggccagagcccccacggccagggccggccgctgcttcctgtaggcaggggctcctctgccaggtccgccgactgcagcgtgcccagcccagccctcgacaagacctcggcaaccacatcgcgttcctcaacacctgcttctgtgacagctatcgacaccaacggactctgagccccggactctgcttaccctgatggctgctcagcaccacagagtgcttgggctgagggactgactgttggaacccgtgcatgtagctgccgggtcatcagcaagaaatgaattggaggcaggaagagtccaagcctgaataataacaccccacagcctctctgtgcacttgctgtctgcggagccagtgtgccattctctgcacatgggcagccagcctgagctgcctcctccatggctttcctggtttgttcctctctccactgaagctgacttagccggccccttttcagtgtagaccaccagctcccctccccatctccttgagtcagcagactgtccaatgtgctcagccaggctggaggcggcaggcggcaggcagcaggctgtggaggaggcccctcggtcagggagcggcctgcctcacccctgaatagctccttcggccccatctccatcctcagcagatgacactgattggcctcacggggacttgggtaagcaacaggcggcattcaggactcttctcaaccctgctgttcagacttgataagatctcagagtccacaggaaagaagtcactgttgcaataaaagcacccgtagtagcaaaaacataaaacaaataaaacttcccccacatcacagatgattttggacaagattttccaaccttgctggctactttagtttgggacctgttttttttctcatttgattttgcttgtgcagaaaatagtttccagcacatggattgatctgagagagaatgaggctcagttgtggatagtctgttttctctgagcatgttggccaactagtatcgtcaaattattgagtggatcatctcttggaaatgcagaacttctgccaccacttggctatttgcacagtcatcttgttctgtgtccttttatctctcagaccacacacatctggaacgctgtgggcatcttctgcccatgggctccatttggcacctgctgagccacagttgtcctgctggatgtgctgtgcaggttggtaggacttgcccccactgtcaaggcctggtctcatctgaaaagccctcctggacctcaaagaattcttcagacctcatagttacaggtcattatatctactatgttgatttatcatcaggcacacaacttctgtttccttctcttgtgttatctgatagcgtccctccttgagctcatcagaaaggttttatgaaatgtgaaccattttgggaaaagctgatcaatttttcttcctagcttcccattttcaaatgggacatcactcatatccctttcagaatgttaggaactgcctcccacattcttccctgtctttttgggttttgttttttgttgttgtggtggttttttaacacaaagtctcactctgttgcccaggctggagtgcagtggcatgatcttggctcactgcaacctctgccttccaggttcaagcaattctcctgcctcagcctcccgagtagctgagattacaggcgcccaccaccacgcccagctaatttttgtatttttagtagagacagggtttcaccatgttggccaggctgatctcgaactcctgacctcaggtgacctgccttggcctcccaaagtgcagggattacaagcgtgagccaccatgcccggcctgtctttttggttttgatgggagtctgaggaccccgacccctcctgctctccatctttgagcctctggcatcctctcacacccagaaatcagttggagtaagtttaattggccctgctccagctggcctttgaagcacaagtttaaatctccaccttctgtgcactgaccagagtctaaaataaaagttgtcagtaccataaaggaaaagggatccacacaggtagccttctccttggatacaggtacatcttactgtaagaatttcaagtcctggctgggcgcagtggctcactcctgtaatcccagcactttgagagaccgaggcaggcagatcacttgaggtcaggaattcaagaccaacctggccaacatggtgaaaccctgtctctaataaaaaaaaaatagaaaaatcagccgggtgtggtggcacacacctgtaatcctagctactcaggaggctgaggcaagagaatctcttgaacctgtgagccagaggttgcagtgagccgagattccaccactgcactccagcctgggcaacagagcaaaactctgtctcaaaaaaaaaaaaaaaaaggcaaaattaaagaatttcaagtccctaatttactctaaccaagcattttcagtcttacaaagaaatctagtgcacgacacctttaaaatgcctagatttccattgcctaaagtaaggtgtgaccagtgaaacaacagcagagaatcatgttcctttgctgtggaacacataagccccacagttttccagtcagcctaatacatgggtatcccccgaccccatctgcctccttaagccacagtccttggtggggaactctaagggggacggagtcagtaccccggacagggccacatttgcatgagacatggctgtctcacaggtcacagagccattacaacagcttactagtttttcatggatttgttggattaacaccttaagcaggttttttattgttattttgtttgtttgtttgttttgagacgggagtttctctcttgtctcccaggctggagtgcaatcgcgcaatctcggctcacggtaacctctgcctcccaggttcaagcgagtctcctgcctcagccttctgagtagctgggattacaggcatgcgccaccacgcccaactaattttgtatttttagtagagacggggtttctccttgttggtcaggctggtctcaaaccccggacctcaggtgatccccccaccttggcctcccaaagtgccaggattacaggcatgagccactgtgtccggtcttgagcaggtttttaaaatctccagtggccataaaactagccagggtagctcatgcttttactggttggaataaggagccaaaaccaacaaaataatatttattagggctcgatgcccatttctgtggctaaggcttaggtttggtgtgcagagcctggcctgctcttgtgggctgtggttgctgtgacagtttcgttttctgaatctttgtaatgctcttccaccctgctcgtgctgcccagaggctgatctgcaaacctgggcagtattccacactgaagctcagtttgcaaaccttctgctgtgttaattctggtcagtttcacacagaagtcacgagggcctctgcccaggaccttctattcacatttcaagaatccctttctgaaattctccaactctctggtcaggaggaggagcaccattggggcggggtaggcagctagaggcgcaggagcgaatccaggttccttgcgtggttcccagcctctgctgacagcacctcagctaccaggtggggagtggaaattcagcctgcttagaggactgacctctacagttcatatttgcagtgacataaaaggcaaagaggagctggcatggtggtacagaaggtatcagtcaagcgcaggctcttcagaaacctagaaactaaaaagagatgcaacatgtgactggccatcagccagacatgtctagggtgagaccagtgctcagcaccacccgccaaggaacactgatgagttgtgggacattatggtcggccaagtgaggaatgattgcagggaccagagaagaccaaagatgccagatgtccccagagtttcttgagggctgggtttcacgtctttgcttgtcctttttgtccccacttgcctgcaccgtgcctgactcatccagtggggaaggtgactcaagaagttgtttaagcctaggcctaggcagtccacttcgggaggtgggggcactccacactggggggccctgcagctccagggctggtgctctagcagatccgctcaggcacggttgggtgaccgtggggtcaccgattgcgtagattatttctagggcagtgctgggttagaaatgtctgtctggaaacaggacacatcttgccaccacaagtccacacctggccttggctgctgcccgctctctgcagcgtggatttcctttgcccatttgggccagaaggtcaccaggagttcatcactgcttagtgtcaacttgacatcttcagcttccagacagaaaacccatgctttactttgtacagccctgtcccagagttagtaagcctcggcttgtcacctgcttgcaaagggtatagacatcattctgggtagttctagaggatatcgcaacaagtgcgtttgaaggttcagcacagctggaattgtacggtagtgagctcttcaaaatgaaaacagaatgaccggatggccatctgtcctggaaactgtagaattgaataaatcactgaaaatagaacacttcttggaggctttcttcagaactgaactagaaacaaggtttccaggctcccaggtcagtagaccaaaccaacttccttagatttttttttttaagctgtttgcagaaaactgggtggtagcgtgtctgaaccaaacggaagaatagccagcggagcatggactgttccagcacgggccagatggccagctgtcgagagcagccctgcccagattgcggtgggggctgtgccagcggctccgcagggcccttccaactctggagtgtctgtagttcttgtgaaaccaaaacgttgactacctgcctctttcctcgggcatcgacgtgctcatttccaaagatgatggtgcaggtgaccttttccatcgtgagctaagagaaggttaggaggcctgaggggcgggccttgtgtcccctcctccccctccacagcccctgaggtggagcttccctcacagaccccatctggtcgagcctacggctgcccagtgtacactcagtgatgcttataccaaatagggcatgtgcgctggtgtctgttggggacagccccatccctaccttggagtcggcagagaagcagcaataagcattaggcgaatgattgaaagggctgctgcgccaagaggccttcagtccccttaacgtggctttccaacttcctgacgaggctacaaaggctccgctcacaaaagaaagccaataatgtaaataaatagaaaacgaagcctccacgcgtggtttttaaagggggatgatgaatgtgacaccacccacagaatgcattagaatctggtttttctgtgctttgtcattttactctgataggaatttttgttacctaactctgtgcataacttatttaatgtactgtataaatgaaccaaaactgttaaatatgtatttagtttgttctacttaaagtagtcaataaaaaggctatattccttttctg

SEQ ID NO: 122340 - DNA, 7617 bp, Homo sapiens
  Payload ID: 3968
  Gene Symbol: CBFA2T2
  Gene Name: core-binding factor, runt domain, alpha subunit 2
  translocated to, 2
  Uniprot ID: O43439
  ENST ID: ENST00000375279
  CDS Start-End: 413-2227
agcagcggtggtggtgtctggttagctcggcggctgcagatctcgcggcgacgcctgcgagggacccgggccgcgggtcgaggcgggcggcgcctgcgagggacccgtgtcgcgggtagaggcgggcggcgcgcggcggcggcgctcggcgatggtaggcgtccctggagcggccgccttccagcaggtggggttttgccatgttgcccaggtgggtctcaaactcctgggctaaagcgatcttcccatgttggctgcccaaagtgctgggattacaggcaagagccaccataccagttcctgtctagatattatgatgaagattgaggatggtagtttttgtggagcacaatcctgactgtacctgtgatgttgcattcatcttttggaacataagcagatcaccaggtgaatggctaaagaatctggaataagcttgaaagaaatacaggtcctggcaaggcaatggaaagttggtcctgagaaaagggtgccagcgatgcctggatcgcctgtggaagtgaagatacagtccagatcctcacctcccaccatgccacccctcccaccaataaatcctggaggaccgaggccagtgtccttcactcctactgcattaagcaatggcatcaaccattctcctcctaccctgaatggtgccccatcaccgccacagagattcagcaatggtcctgcctcctccacatcatctgcactcacaaatcagcaattgccagccacttgtggtgctcgacaactcagcaagttgaaacgctttcttaccactctgcaacagtttggcaatgacatctcccctgagattggggagaaggtgcggactcttgttcttgcactggtgaactcaacagtgacaattgaggaattccactgtaagctccaagaagccacaaactttccccttcgtccttttgtgattccatttctcaaggccaacctgcccctgctgcagcgggaactgctgcactgcgctcgggcggccaagcagaccccatcccagtacctggctcagcacgaacaccttctgctcaacacaagcattgcatcgcctgctgactcgtcagagttgctcatggaggtgcacggaaatgggaagaggcccagtccagagaggagagaagagaatagttttgatagagacacaattgctcctgagcctcctgccaagagagtatgtaccatcagccctgctcctcggcacagtcctgctctcactgtgcccctcatgaatcccgggggccaattccatcctacccctccacctcttcagcattacaccttagaggatattgcaacttctcacctgtatcgggaacccaacaagatgctagagcatcgagaagttcgtgatagacaccacagtcttggtctaaatggaggctatcaagatgagttggtagatcatcgtttgacagaaagggaatgggctgatgaatggaaacatcttgaccatgcgctgaattgcattatggaaatggtagagaaaacaaggcgctctatggcagttctgcggcgctgtcaggaatcagatcgtgaagaactcaactactggaaaagacggtacaatgaaaacacagagctgaggaaaacggggaccgagttggtctccaggcagcacagccctgggagtgcagattctctcagcaatgattctcagagagagttcaacagcaggccaggtacaggatacgtacctgtggagttttggaaaaaaacagaagaagctgtgaataaggtgaaaattcaggccatgtcagaagtacagaaggccgtcgctgaggcagagcagaaagcctttgaagtgattgcaacagagagagcacgaatggagcaaaccatagcggatgtcaagcggcaggccgcagaggatgctttcctcgtcatcaatgagcaagaggagtccacggagaactgctggaactgtggccgcaaagccagcgagacatgcagtggctgcaatatcgcgcgatactgtggctctttctgccagcacaaggactgggagcggcaccaccgcctctgtggtcagaacctgcatggccagagcccccacggccagggccggccgctgcttcctgtaggcaggggctcctctgccaggtccgccgactgcagcgtgcccagcccagccctcgacaagacctcggcaaccacatcgcgttcctcaacacctgcttctgtgacagctatcgacaccaacggactctgagccccggactctgcttaccctgatggctgctcagcaccacagagtgcttgggctgagggactgactgttggaacccgtgcatgtagctgccgggtcatcagcaagaaatgaattggaggcaggaagagtccaagcctgaataataacaccccacagcctctctgtgcacttgctgtctgcggagccagtgtgccattctctgcacatgggcagccagcctgagctgcctcctccatggctttcctggtttgttcctctctccactgaagctgacttagccggccccttttcagtgtagaccaccagctcccctccccatctccttgagtcagcagactgtccaatgtgctcagccaggctggaggcggcaggcggcaggcagcaggctgtggaggaggcccctcggtcagggagcggcctgcctcacccctgaatagctccttcggccccatctccatcctcagcagatgacactgattggcctcacggggacttgggtaagcaacaggcggcattcaggactcttctcaaccctgctgttcagacttgataagatctcagagtccacaggaaagaagtcactgttgcaataaaagcacccgtagtagcaaaaacataaaacaaataaaacttcccccacatcacagatgattttggacaagattttccaaccttgctggctactttagtttgggacctgttttttttctcatttgattttgcttgtgcagaaaatagtttccagcacatggattgatctgagagagaatgaggctcagttgtggatagtctgttttctctgagcatgttggccaactagtatcgtcaaattattgagtggatcatctcttggaaatgcagaacttctgccaccacttggctatttgcacagtcatcttgttctgtgtccttttatctctcagaccacacacatctggaacgctgtgggcatcttctgcccatgggctccatttggcacctgctgagccacagttgtcctgctggatgtgctgtgcaggttggtaggacttgcccccactgtcaaggcctggtctcatctgaaaagccctcctggacctcaaagaattcttcagacctcatagttacaggtcattatatctactatgttgatttatcatcaggcacacaacttctgtttccttctcttgtgttatctgatagcgtccctccttgagctcatcagaaaggttttatgaaatgtgaaccattttgggaaaagctgatcaatttttcttcctagcttcccattttcaaatgggacatcactcatatccctttcagaatgttaggaactgcctcccacattcttccctgtctttttgggttttgttttttgttgttgtggtggttttttaacacaaagtctcactctgttgcccaggctggagtgcagtggcatgatcttggctcactgcaacctctgccttccaggttcaagcaattctcctgcctcagcctcccgagtagctgagattacaggcgcccaccaccacgcccagctaatttttgtatttttagtagagacagggtttcaccatgttggccaggctgatctcgaactcctgacctcaggtgacctgccttggcctcccaaagtgcagggattacaagcgtgagccaccatgcccggcctgtctttttggttttgatgggagtctgaggaccccgacccctcctgctctccatctttgagcctctggcatcctctcacacccagaaatcagttggagtaagtttaattggccctgctccagctggcctttgaagcacaagtttaaatctccaccttctgtgcactgaccagagtctaaaataaaagttgtcagtaccataaaggaaaagggatccacacaggtagccttctccttggatacaggtacatcttactgtaagaatttcaagtcctggctgggcgcagtggctcactcctgtaatcccagcactttgagagaccgaggcaggcagatcacttgaggtcaggaattcaagaccaacctggccaacatggtgaaaccctgtctctaataaaaaaaaaatagaaaaatcagccgggtgtggtggcacacacctgtaatcctagctactcaggaggctgaggcaagagaatctcttgaacctgtgagccagaggttgcagtgagccgagattccaccactgcactccagcctgggcaacagagcaaaactctgtctcaaaaaaaaaaaaaaaaaggcaaaattaaagaatttcaagtccctaatttactctaaccaagcattttcagtcttacaaagaaatctagtgcacgacacctttaaaatgcctagatttccattgcctaaagtaaggtgtgaccagtgaaacaacagcagagaatcatgttcctttgctgtggaacacataagccccacagttttccagtcagcctaatacatgggtatcccccgaccccatctgcctccttaagccacagtccttggtggggaactctaagggggacggagtcagtaccccggacagggccacatttgcatgagacatggctgtctcacaggtcacagagccattacaacagcttactagtttttcatggatttgttggattaacaccttaagcaggttttttattgttattttgtttgtttgtttgttttgagacgggagtttctctcttgtctcccaggctggagtgcaatcgcgcaatctcggctcacggtaacctctgcctcccaggttcaagcgagtctcctgcctcagccttctgagtagctgggattacaggcatgcgccaccacgcccaactaattttgtatttttagtagagacggggtttctccttgttggtcaggctggtctcaaaccccggacctcaggtgatccccccaccttggcctcccaaagtgccaggattacaggcatgagccactgtgtccggtcttgagcaggtttttaaaatctccagtggccataaaactagccagggtagctcatgcttttactggttggaataaggagccaaaaccaacaaaataatatttattagggctcgatgcccatttctgtggctaaggcttaggtttggtgtgcagagcctggcctgctcttgtgggctgtggttgctgtgacagtttcgttttctgaatctttgtaatgctcttccaccctgctcgtgctgcccagaggctgatctgcaaacctgggcagtattccacactgaagctcagtttgcaaaccttctgctgtgttaattctggtcagtttcacacagaagtcacgagggcctctgcccaggaccttctattcacatttcaagaatccctttctgaaattctccaactctctggtcaggaggaggagcaccattggggcggggtaggcagctagaggcgcaggagcgaatccaggttccttgcgtggttcccagcctctgctgacagcacctcagctaccaggtggggagtggaaattcagcctgcttagaggactgacctctacagttcatatttgcagtgacataaaaggcaaagaggagctggcatggtggtacagaaggtatcagtcaagcgcaggctcttcagaaacctagaaactaaaaagagatgcaacatgtgactggccatcagccagacatgtctagggtgagaccagtgctcagcaccacccgccaaggaacactgatgagttgtgggacattatggtcggccaagtgaggaatgattgcagggaccagagaagaccaaagatgccagatgtccccagagtttcttgagggctgggtttcacgtctttgcttgtcctttttgtccccacttgcctgcaccgtgcctgactcatccagtggggaaggtgactcaagaagttgtttaagcctaggcctaggcagtccacttcgggaggtgggggcactccacactggggggccctgcagctccagggctggtgctctagcagatccgctcaggcacggttgggtgaccgtggggtcaccgattgcgtagattatttctagggcagtgctgggttagaaatgtctgtctggaaacaggacacatcttgccaccacaagtccacacctggccttggctgctgcccgctctctgcagcgtggatttcctttgcccatttgggccagaaggtcaccaggagttcatcactgcttagtgtcaacttgacatcttcagcttccagacagaaaacccatgctttactttgtacagccctgtcccagagttagtaagcctcggcttgtcacctgcttgcaaagggtatagacatcattctgggtagttctagaggatatcgcaacaagtgcgtttgaaggttcagcacagctggaattgtacggtagtgagctcttcaaaatgaaaacagaatgaccggatggccatctgtcctggaaactgtagaattgaataaatcactgaaaatagaacacttcttggaggctttcttcagaactgaactagaaacaaggtttccaggctcccaggtcagtagaccaaaccaacttccttagatttttttttttaagctgtttgcagaaaactgggtggtagcgtgtctgaaccaaacggaagaatagccagcggagcatggactgttccagcacgggccagatggccagctgtcgagagcagccctgcccagattgcggtgggggctgtgccagcggctccgcagggcccttccaactctggagtgtctgtagttcttgtgaaaccaaaacgttgactacctgcctctttcctcgggcatcgacgtgctcatttccaaagatgatggtgcaggtgaccttttccatcgtgagctaagagaaggttaggaggcctgaggggcgggccttgtgtcccctcctccccctccacagcccctgaggtggagcttccctcacagaccccatctggtcgagcctacggctgcccagtgtacactcagtgatgcttataccaaatagggcatgtgcgctggtgtctgttggggacagccccatccctaccttggagtcggcagagaagcagcaataagcattaggcgaatgattgaaagggctgctgcgccaagaggccttcagtccccttaacgtggctttccaacttcctgacgaggctacaaaggctccgctcacaaaagaaagccaataatgtaaataaatagaaaacgaagcctccacgcgtggtttttaaagggggatgatgaatgtgacaccacccacagaatgcattagaatctggtttttctgtgctttgtcattttactctgataggaatttttgttacctaactctgtgcataacttatttaatgtactgtataaatgaaccaaaactgttaaatatgtatttagtttgttctacttaaagtagtcaataaaaaggctatattccttttctg

SEQ ID NO: 122341 - DNA, 7449 bp, Homo sapiens
  Payload ID: 3968
  Gene Symbol: CBFA2T2
  Gene Name: core-binding factor, runt domain, alpha subunit 2
  translocated to, 2
  Uniprot ID: O43439
  ENST ID: ENST00000397800
  CDS Start-End: 337-2064
ggagggagaaaaagagagagactgactgtatctggggattctggcaaggtgaagagctggtctgtttggcaggaccttcccatctgggatccatctgtgtttccctggaatgggacaggcagctctagtcagtgagaaatcgcagatgtgagagagctgacacatgtccagctaatgaaaggaggaggaaggctggtctccgattgagctttgaagattaggaggagaaaaagaggagctttggaatatctatttcaaataaatttggtgtatttaagaatctggattgtttataatttgggcatttgggttggtcctgagaaaagggtgccagcgatgcctggatcgcctgtggaagtgaagatacagtccagatcctcacctcccaccatgccacccctcccaccaataaatcctggaggaccgaggccagtgtccttcactcctactgcattaagcaatggcatcaaccattctcctcctaccctgaatggtgccccatcaccgccacagagattcagcaatggtcctgcctcctccacatcatctgcactcacaaatcagcaattgccagccacttgtggtgctcgacaactcagcaagttgaaacgctttcttaccactctgcaacagtttggcaatgacatctcccctgagattggggagaaggtgcggactcttgttcttgcactggtgaactcaacagtgacaattgaggaattccactgtaagctccaagaagccacaaactttccccttcgtccttttgtgattccatttctcaaggccaacctgcccctgctgcagcgggaactgctgcactgcgctcgggcggccaagcagaccccatcccagtacctggctcagcacgaacaccttctgctcaacacaagcattgcatcgcctgctgactcgtcagagttgctcatggaggtgcacggaaatgggaagaggcccagtccagagaggagagaagagaatagttttgatagagacacaattgctcctgagcctcctgccaagagagtatgtaccatcagccctgctcctcggcacagtcctgctctcactgtgcccctcatgaatcccgggggccaattccatcctacccctccacctcttcagcattacaccttagaggatattgcaacttctcacctgtatcgggaacccaacaagatgctagagcatcgagaagttcgtgatagacaccacagtcttggtctaaatggaggctatcaagatgagttggtagatcatcgtttgacagaaagggaatgggctgatgaatggaaacatcttgaccatgcgctgaattgcattatggaaatggtagagaaaacaaggcgctctatggcagttctgcggcgctgtcaggaatcagatcgtgaagaactcaactactggaaaagacggtacaatgaaaacacagagctgaggaaaacggggaccgagttggtctccaggcagcacagccctgggagtgcagattctctcagcaatgattctcagagagagttcaacagcaggccaggtacaggatacgtacctgtggagttttggaaaaaaacagaagaagctgtgaataaggtgaaaattcaggccatgtcagaagtacagaaggccgtcgctgaggcagagcagaaagcctttgaagtgattgcaacagagagagcacgaatggagcaaaccatagcggatgtcaagcggcaggccgcagaggatgctttcctcgtcatcaatgagcaagaggagtccacggagaactgctggaactgtggccgcaaagccagcgagacatgcagtggctgcaatatcgcgcgatactgtggctctttctgccagcacaaggactgggagcggcaccaccgcctctgtggtcagaacctgcatggccagagcccccacggccagggccggccgctgcttcctgtaggcaggggctcctctgccaggtccgccgactgcagcgtgcccagcccagccctcgacaagacctcggcaaccacatcgcgttcctcaacacctgcttctgtgacagctatcgacaccaacggactctgagccccggactctgcttaccctgatggctgctcagcaccacagagtgcttgggctgagggactgactgttggaacccgtgcatgtagctgccgggtcatcagcaagaaatgaattggaggcaggaagagtccaagcctgaataataacaccccacagcctctctgtgcacttgctgtctgcggagccagtgtgccattctctgcacatgggcagccagcctgagctgcctcctccatggctttcctggtttgttcctctctccactgaagctgacttagccggccccttttcagtgtagaccaccagctcccctccccatctccttgagtcagcagactgtccaatgtgctcagccaggctggaggcggcaggcggcaggcagcaggctgtggaggaggcccctcggtcagggagcggcctgcctcacccctgaatagctccttcggccccatctccatcctcagcagatgacactgattggcctcacggggacttgggtaagcaacaggcggcattcaggactcttctcaaccctgctgttcagacttgataagatctcagagtccacaggaaagaagtcactgttgcaataaaagcacccgtagtagcaaaaacataaaacaaataaaacttcccccacatcacagatgattttggacaagattttccaaccttgctggctactttagtttgggacctgttttttttctcatttgattttgcttgtgcagaaaatagtttccagcacatggattgatctgagagagaatgaggctcagttgtggatagtctgttttctctgagcatgttggccaactagtatcgtcaaattattgagtggatcatctcttggaaatgcagaacttctgccaccacttggctatttgcacagtcatcttgttctgtgtccttttatctctcagaccacacacatctggaacgctgtgggcatcttctgcccatgggctccatttggcacctgctgagccacagttgtcctgctggatgtgctgtgcaggttggtaggacttgcccccactgtcaaggcctggtctcatctgaaaagccctcctggacctcaaagaattcttcagacctcatagttacaggtcattatatctactatgttgatttatcatcaggcacacaacttctgtttccttctcttgtgttatctgatagcgtccctccttgagctcatcagaaaggttttatgaaatgtgaaccattttgggaaaagctgatcaatttttcttcctagcttcccattttcaaatgggacatcactcatatccctttcagaatgttaggaactgcctcccacattcttccctgtctttttgggttttgttttttgttgttgtggtggttttttaacacaaagtctcactctgttgcccaggctggagtgcagtggcatgatcttggctcactgcaacctctgccttccaggttcaagcaattctcctgcctcagcctcccgagtagctgagattacaggcgcccaccaccacgcccagctaatttttgtatttttagtagagacagggtttcaccatgttggccaggctgatctcgaactcctgacctcaggtgacctgccttggcctcccaaagtgcagggattacaagcgtgagccaccatgcccggcctgtctttttggttttgatgggagtctgaggaccccgacccctcctgctctccatctttgagcctctggcatcctctcacacccagaaatcagttggagtaagtttaattggccctgctccagctggcctttgaagcacaagtttaaatctccaccttctgtgcactgaccagagtctaaaataaaagttgtcagtaccataaaggaaaagggatccacacaggtagccttctccttggatacaggtacatcttactgtaagaatttcaagtcctggctgggcgcagtggctcactcctgtaatcccagcactttgagagaccgaggcaggcagatcacttgaggtcaggaattcaagaccaacctggccaacatggtgaaaccctgtctctaataaaaaaaaaatagaaaaatcagccgggtgtggtggcacacacctgtaatcctagctactcaggaggctgaggcaagagaatctcttgaacctgtgagccagaggttgcagtgagccgagattccaccactgcactccagcctgggcaacagagcaaaactctgtctcaaaaaaaaaaaaaaaaaggcaaaattaaagaatttcaagtccctaatttactctaaccaagcattttcagtcttacaaagaaatctagtgcacgacacctttaaaatgcctagatttccattgcctaaagtaaggtgtgaccagtgaaacaacagcagagaatcatgttcctttgctgtggaacacataagccccacagttttccagtcagcctaatacatgggtatcccccgaccccatctgcctccttaagccacagtccttggtggggaactctaagggggacggagtcagtaccccggacagggccacatttgcatgagacatggctgtctcacaggtcacagagccattacaacagcttactagtttttcatggatttgttggattaacaccttaagcaggttttttattgttattttgtttgtttgtttgttttgagacgggagtttctctcttgtctcccaggctggagtgcaatcgcgcaatctcggctcacggtaacctctgcctcccaggttcaagcgagtctcctgcctcagccttctgagtagctgggattacaggcatgcgccaccacgcccaactaattttgtatttttagtagagacggggtttctccttgttggtcaggctggtctcaaaccccggacctcaggtgatccccccaccttggcctcccaaagtgccaggattacaggcatgagccactgtgtccggtcttgagcaggtttttaaaatctccagtggccataaaactagccagggtagctcatgcttttactggttggaataaggagccaaaaccaacaaaataatatttattagggctcgatgcccatttctgtggctaaggcttaggtttggtgtgcagagcctggcctgctcttgtgggctgtggttgctgtgacagtttcgttttctgaatctttgtaatgctcttccaccctgctcgtgctgcccagaggctgatctgcaaacctgggcagtattccacactgaagctcagtttgcaaaccttctgctgtgttaattctggtcagtttcacacagaagtcacgagggcctctgcccaggaccttctattcacatttcaagaatccctttctgaaattctccaactctctggtcaggaggaggagcaccattggggcggggtaggcagctagaggcgcaggagcgaatccaggttccttgcgtggttcccagcctctgctgacagcacctcagctaccaggtggggagtggaaattcagcctgcttagaggactgacctctacagttcatatttgcagtgacataaaaggcaaagaggagctggcatggtggtacagaaggtatcagtcaagcgcaggctcttcagaaacctagaaactaaaaagagatgcaacatgtgactggccatcagccagacatgtctagggtgagaccagtgctcagcaccacccgccaaggaacactgatgagttgtgggacattatggtcggccaagtgaggaatgattgcagggaccagagaagaccaaagatgccagatgtccccagagtttcttgagggctgggtttcacgtctttgcttgtcctttttgtccccacttgcctgcaccgtgcctgactcatccagtggggaaggtgactcaagaagttgtttaagcctaggcctaggcagtccacttcgggaggtgggggcactccacactggggggccctgcagctccagggctggtgctctagcagatccgctcaggcacggttgggtgaccgtggggtcaccgattgcgtagattatttctagggcagtgctgggttagaaatgtctgtctggaaacaggacacatcttgccaccacaagtccacacctggccttggctgctgcccgctctctgcagcgtggatttcctttgcccatttgggccagaaggtcaccaggagttcatcactgcttagtgtcaacttgacatcttcagcttccagacagaaaacccatgctttactttgtacagccctgtcccagagttagtaagcctcggcttgtcacctgcttgcaaagggtatagacatcattctgggtagttctagaggatatcgcaacaagtgcgtttgaaggttcagcacagctggaattgtacggtagtgagctcttcaaaatgaaaacagaatgaccggatggccatctgtcctggaaactgtagaattgaataaatcactgaaaatagaacacttcttggaggctttcttcagaactgaactagaaacaaggtttccaggctcccaggtcagtagaccaaaccaacttccttagatttttttttttaagctgtttgcagaaaactgggtggtagcgtgtctgaaccaaacggaagaatagccagcggagcatggactgttccagcacgggccagatggccagctgtcgagagcagccctgcccagattgcggtgggggctgtgccagcggctccgcagggcccttccaactctggagtgtctgtagttcttgtgaaaccaaaacgttgactacctgcctctttcctcgggcatcgacgtgctcatttccaaagatgatggtgcaggtgaccttttccatcgtgagctaagagaaggttaggaggcctgaggggcgggccttgtgtcccctcctccccctccacagcccctgaggtggagcttccctcacagaccccatctggtcgagcctacggctgcccagtgtacactcagtgatgcttataccaaatagggcatgtgcgctggtgtctgttggggacagccccatccctaccttggagtcggcagagaagcagcaataagcattaggcgaatgattgaaagggctgctgcgccaagaggccttcagtccccttaacgtggctttccaacttcctgacgaggctacaaaggctccgctcacaaaagaaagccaataatgtaaataaatagaaaacgaagcctccacgcgtggtttttaaagggggatgatgaatgtgacaccacccacagaatgcattagaatctggtttttctgtgctttgtcattttactctgataggaatttttgttacctaactctgtgcataacttatttaatgtactgtataaatgaaccaaaactgttaaatatgtatttagtttgttctacttaaagtagtcaataaaaaggctatattcctt

SEQ ID NO: 122342 - DNA, 7803 bp, Homo sapiens
  Payload ID: 3968
  Gene Symbol: CBFA2T2
  Gene Name: core-binding factor, runt domain, alpha subunit 2
  translocated to, 2
  Uniprot ID: O43439
  ENST ID: ENST00000492345
  CDS Start-End: 686-2413
gagagactgactgtatctggggattctggcaaggtgaagagctggtctgtttggcaggaccttcccatctgggatccatctgtgtttccctggaatgggacaggcagctctagtcagtgagaaatcgcagatgtgagagagctgacacatgtccagctaatgaaaggaggaggaaggctggtctccgattgagctttgaagattaggaggagaaaaagaggagctttggaatatctatttcaaataaatttggtgtatttaagaatctggattgtttataatttgggcatttgggaggtggggttttgccatgttgcccaggtgggtctcaaactcctgggctaaagcgatcttcccatgttggctgcccaaagtgctgggattacaggcaagagccaccataccagttcctgtctagatattatgatgaagattgaggatggtagtttttgtggagcacaatcctgactgtacctgtgatgttgcattcatcttttggaacataagcagatcaccaggtgaatggctaaagaatctggaataagcttgaaagaaatacaggtcctggcaaggcaatggaaagggtctcaccctgtcactcaggctggagcacagtggtgtgatcacagctcactgcagcctcgacctcctggactcagttggtcctgagaaaagggtgccagcgatgcctggatcgcctgtggaagtgaagatacagtccagatcctcacctcccaccatgccacccctcccaccaataaatcctggaggaccgaggccagtgtccttcactcctactgcattaagcaatggcatcaaccattctcctcctaccctgaatggtgccccatcaccgccacagagattcagcaatggtcctgcctcctccacatcatctgcactcacaaatcagcaattgccagccacttgtggtgctcgacaactcagcaagttgaaacgctttcttaccactctgcaacagtttggcaatgacatctcccctgagattggggagaaggtgcggactcttgttcttgcactggtgaactcaacagtgacaattgaggaattccactgtaagctccaagaagccacaaactttccccttcgtccttttgtgattccatttctcaaggccaacctgcccctgctgcagcgggaactgctgcactgcgctcgggcggccaagcagaccccatcccagtacctggctcagcacgaacaccttctgctcaacacaagcattgcatcgcctgctgactcgtcagagttgctcatggaggtgcacggaaatgggaagaggcccagtccagagaggagagaagagaatagttttgatagagacacaattgctcctgagcctcctgccaagagagtatgtaccatcagccctgctcctcggcacagtcctgctctcactgtgcccctcatgaatcccgggggccaattccatcctacccctccacctcttcagcattacaccttagaggatattgcaacttctcacctgtatcgggaacccaacaagatgctagagcatcgagaagttcgtgatagacaccacagtcttggtctaaatggaggctatcaagatgagttggtagatcatcgtttgacagaaagggaatgggctgatgaatggaaacatcttgaccatgcgctgaattgcattatggaaatggtagagaaaacaaggcgctctatggcagttctgcggcgctgtcaggaatcagatcgtgaagaactcaactactggaaaagacggtacaatgaaaacacagagctgaggaaaacggggaccgagttggtctccaggcagcacagccctgggagtgcagattctctcagcaatgattctcagagagagttcaacagcaggccaggtacaggatacgtacctgtggagttttggaaaaaaacagaagaagctgtgaataaggtgaaaattcaggccatgtcagaagtacagaaggccgtcgctgaggcagagcagaaagcctttgaagtgattgcaacagagagagcacgaatggagcaaaccatagcggatgtcaagcggcaggccgcagaggatgctttcctcgtcatcaatgagcaagaggagtccacggagaactgctggaactgtggccgcaaagccagcgagacatgcagtggctgcaatatcgcgcgatactgtggctctttctgccagcacaaggactgggagcggcaccaccgcctctgtggtcagaacctgcatggccagagcccccacggccagggccggccgctgcttcctgtaggcaggggctcctctgccaggtccgccgactgcagcgtgcccagcccagccctcgacaagacctcggcaaccacatcgcgttcctcaacacctgcttctgtgacagctatcgacaccaacggactctgagccccggactctgcttaccctgatggctgctcagcaccacagagtgcttgggctgagggactgactgttggaacccgtgcatgtagctgccgggtcatcagcaagaaatgaattggaggcaggaagagtccaagcctgaataataacaccccacagcctctctgtgcacttgctgtctgcggagccagtgtgccattctctgcacatgggcagccagcctgagctgcctcctccatggctttcctggtttgttcctctctccactgaagctgacttagccggccccttttcagtgtagaccaccagctcccctccccatctccttgagtcagcagactgtccaatgtgctcagccaggctggaggcggcaggcggcaggcagcaggctgtggaggaggcccctcggtcagggagcggcctgcctcacccctgaatagctccttcggccccatctccatcctcagcagatgacactgattggcctcacggggacttgggtaagcaacaggcggcattcaggactcttctcaaccctgctgttcagacttgataagatctcagagtccacaggaaagaagtcactgttgcaataaaagcacccgtagtagcaaaaacataaaacaaataaaacttcccccacatcacagatgattttggacaagattttccaaccttgctggctactttagtttgggacctgttttttttctcatttgattttgcttgtgcagaaaatagtttccagcacatggattgatctgagagagaatgaggctcagttgtggatagtctgttttctctgagcatgttggccaactagtatcgtcaaattattgagtggatcatctcttggaaatgcagaacttctgccaccacttggctatttgcacagtcatcttgttctgtgtccttttatctctcagaccacacacatctggaacgctgtgggcatcttctgcccatgggctccatttggcacctgctgagccacagttgtcctgctggatgtgctgtgcaggttggtaggacttgcccccactgtcaaggcctggtctcatctgaaaagccctcctggacctcaaagaattcttcagacctcatagttacaggtcattatatctactatgttgatttatcatcaggcacacaacttctgtttccttctcttgtgttatctgatagcgtccctccttgagctcatcagaaaggttttatgaaatgtgaaccattttgggaaaagctgatcaatttttcttcctagcttcccattttcaaatgggacatcactcatatccctttcagaatgttaggaactgcctcccacattcttccctgtctttttgggttttgttttttgttgttgtggtggttttttaacacaaagtctcactctgttgcccaggctggagtgcagtggcatgatcttggctcactgcaacctctgccttccaggttcaagcaattctcctgcctcagcctcccgagtagctgagattacaggcgcccaccaccacgcccagctaatttttgtatttttagtagagacagggtttcaccatgttggccaggctgatctcgaactcctgacctcaggtgacctgccttggcctcccaaagtgcagggattacaagcgtgagccaccatgcccggcctgtctttttggttttgatgggagtctgaggaccccgacccctcctgctctccatctttgagcctctggcatcctctcacacccagaaatcagttggagtaagtttaattggccctgctccagctggcctttgaagcacaagtttaaatctccaccttctgtgcactgaccagagtctaaaataaaagttgtcagtaccataaaggaaaagggatccacacaggtagccttctccttggatacaggtacatcttactgtaagaatttcaagtcctggctgggcgcagtggctcactcctgtaatcccagcactttgagagaccgaggcaggcagatcacttgaggtcaggaattcaagaccaacctggccaacatggtgaaaccctgtctctaataaaaaaaaaatagaaaaatcagccgggtgtggtggcacacacctgtaatcctagctactcaggaggctgaggcaagagaatctcttgaacctgtgagccagaggttgcagtgagccgagattccaccactgcactccagcctgggcaacagagcaaaactctgtctcaaaaaaaaaaaaaaaaaggcaaaattaaagaatttcaagtccctaatttactctaaccaagcattttcagtcttacaaagaaatctagtgcacgacacctttaaaatgcctagatttccattgcctaaagtaaggtgtgaccagtgaaacaacagcagagaatcatgttcctttgctgtggaacacataagccccacagttttccagtcagcctaatacatgggtatcccccgaccccatctgcctccttaagccacagtccttggtggggaactctaagggggacggagtcagtaccccggacagggccacatttgcatgagacatggctgtctcacaggtcacagagccattacaacagcttactagtttttcatggatttgttggattaacaccttaagcaggttttttattgttattttgtttgtttgtttgttttgagacgggagtttctctcttgtctcccaggctggagtgcaatcgcgcaatctcggctcacggtaacctctgcctcccaggttcaagcgagtctcctgcctcagccttctgagtagctgggattacaggcatgcgccaccacgcccaactaattttgtatttttagtagagacggggtttctccttgttggtcaggctggtctcaaaccccggacctcaggtgatccccccaccttggcctcccaaagtgccaggattacaggcatgagccactgtgtccggtcttgagcaggtttttaaaatctccagtggccataaaactagccagggtagctcatgcttttactggttggaataaggagccaaaaccaacaaaataatatttattagggctcgatgcccatttctgtggctaaggcttaggtttggtgtgcagagcctggcctgctcttgtgggctgtggttgctgtgacagtttcgttttctgaatctttgtaatgctcttccaccctgctcgtgctgcccagaggctgatctgcaaacctgggcagtattccacactgaagctcagtttgcaaaccttctgctgtgttaattctggtcagtttcacacagaagtcacgagggcctctgcccaggaccttctattcacatttcaagaatccctttctgaaattctccaactctctggtcaggaggaggagcaccattggggcggggtaggcagctagaggcgcaggagcgaatccaggttccttgcgtggttcccagcctctgctgacagcacctcagctaccaggtggggagtggaaattcagcctgcttagaggactgacctctacagttcatatttgcagtgacataaaaggcaaagaggagctggcatggtggtacagaaggtatcagtcaagcgcaggctcttcagaaacctagaaactaaaaagagatgcaacatgtgactggccatcagccagacatgtctagggtgagaccagtgctcagcaccacccgccaaggaacactgatgagttgtgggacattatggtcggccaagtgaggaatgattgcagggaccagagaagaccaaagatgccagatgtccccagagtttcttgagggctgggtttcacgtctttgcttgtcctttttgtccccacttgcctgcaccgtgcctgactcatccagtggggaaggtgactcaagaagttgtttaagcctaggcctaggcagtccacttcgggaggtgggggcactccacactggggggccctgcagctccagggctggtgctctagcagatccgctcaggcacggttgggtgaccgtggggtcaccgattgcgtagattatttctagggcagtgctgggttagaaatgtctgtctggaaacaggacacatcttgccaccacaagtccacacctggccttggctgctgcccgctctctgcagcgtggatttcctttgcccatttgggccagaaggtcaccaggagttcatcactgcttagtgtcaacttgacatcttcagcttccagacagaaaacccatgctttactttgtacagccctgtcccagagttagtaagcctcggcttgtcacctgcttgcaaagggtatagacatcattctgggtagttctagaggatatcgcaacaagtgcgtttgaaggttcagcacagctggaattgtacggtagtgagctcttcaaaatgaaaacagaatgaccggatggccatctgtcctggaaactgtagaattgaataaatcactgaaaatagaacacttcttggaggctttcttcagaactgaactagaaacaaggtttccaggctcccaggtcagtagaccaaaccaacttccttagatttttttttttaagctgtttgcagaaaactgggtggtagcgtgtctgaaccaaacggaagaatagccagcggagcatggactgttccagcacgggccagatggccagctgtcgagagcagccctgcccagattgcggtgggggctgtgccagcggctccgcagggcccttccaactctggagtgtctgtagttcttgtgaaaccaaaacgttgactacctgcctctttcctcgggcatcgacgtgctcatttccaaagatgatggtgcaggtgaccttttccatcgtgagctaagagaaggttaggaggcctgaggggcgggccttgtgtcccctcctccccctccacagcccctgaggtggagcttccctcacagaccccatctggtcgagcctacggctgcccagtgtacactcagtgatgcttataccaaatagggcatgtgcgctggtgtctgttggggacagccccatccctaccttggagtcggcagagaagcagcaataagcattaggcgaatgattgaaagggctgctgcgccaagaggccttcagtccccttaacgtggctttccaacttcctgacgaggctacaaaggctccgctcacaaaagaaagccaataatgtaaataaatagaaaacgaagcctccacgcgtggtttttaaagggggatgatgaatgtgacaccacccacagaatgcattagaatctggtttttctgtgctttgtcattttactctgataggaatttttgttacctaactctgtgcataacttatttaatgtactgtataaatgaaccaaaactgttaaatatgtatttagtttgttctacttaaagtagtcaataaaaaggctatattccttttctg

SEQ ID NO: 122343 - DNA, 3502 bp, Homo sapiens
  Payload ID: 3968
  Gene Symbol: CBFA2T2
  Gene Name: core-binding factor, runt domain, alpha subunit 2
  translocated to, 2
  ENST ID: ENST00000543126
  CDS Start-End: 1000-1458
gtattttgggacttcacattcacattctcattgggctgaggctcaaacatatggaatgtgttattttgcagcgtctacattagggaaatcaagcagggcattggtgatgggaggaagtgaacaggaaccaggtaggatgatggtaagtggacagggtttaaaaacccagggcttttggcagtctgcccaaatctatgtctttagcccttgtttgtgcacctagtcttatttatttaattgcctcctggccatttacacctggatgccccagaggcacctccaccttctcacttgcctccacactagctttgtgtggactgtccatttcattgcctagctttagcattcttctctttcacctccacttccaggcccttcggtgctcccaacctttttctgcctcatcccttcctcagtgccacttattcctgcctaaattcagcctcttctatcagttcaatcattgcaccagcctcccggttgctatctctgtctttaatcttccccttgcatagaatcctttatggagtttcctttgaaaataaagtcaagccgactgggcacggtggctcatgcctgtaatcccagcactttgggaggccaaggtgggcggatcacgaggtcaagagatcgagaccatcctggctaacatggtgaaaccctgtctctattaaaaatacaaaaaattagccaggtgtggtggcgggcacctgtagtcccagctactcaggaggctgaggcaggagaatggcgtgaacccgggaggcggagcttgcagtgagcagagattacgccactgcactccagcctgggcaacagagcgggactccgtcgcaaaaaaaaaaaaagaaaataagttcaagccgggggtggtgcctcacccctataacactttaacaccaacgctttgggaggctgaggtaggaggatcacttgagcgcaggagttcgagacaagccttagcaacataaagctgtgaataaggtgaaaattcaggccatgtcagaagtacagaaggccgtcgctgaggcagagcagaaagcctttgaagtgattgcaacagagagagcacgaatggagcaaaccatagcggatgtcaagcggcaggccgcagaggatgctttcctcgtcatcaatgagcaagaggagtccacggagaactgctggaactgtggccgcaaagccagcgagacatgcagtggctgcaatatcgcgcgatactgtggctctttctgccagcacaaggactgggagcggcaccaccgcctctgtggtcagaacctgcatggccagagcccccacggccagggccggccgctgcttcctgtaggcaggggctcctctgccaggtccgccgactgcagcgtgcccagcccagccctcgacaagacctcggcaaccacatcgcgttcctcaacacctgcttctgtgacagctatcgacaccaacggactctgagccccggactctgcttaccctgatggctgctcagcaccacagagtgcttgggctgagggactgactgttggaacccgtgcatgtagctgccgggtcatcagcaagaaatgaattggaggcaggaagagtccaagcctgaataataacaccccacagcctctctgtgcacttgctgtctgcggagccagtgtgccattctctgcacatgggcagccagcctgagctgcctcctccatggctttcctggtttgttcctctctccactgaagctgacttagccggccccttttcagtgtagaccaccagctcccctccccatctccttgagtcagcagactgtccaatgtgctcagccaggctggaggcggcaggcggcaggcagcaggctgtggaggaggcccctcggtcagggagcggcctgcctcacccctgaatagctccttcggccccatctccatcctcagcagatgacactgattggcctcacggggacttgggtaagcaacaggcggcattcaggactcttctcaaccctgctgttcagacttgataagatctcagagtccacaggaaagaagtcactgttgcaataaaagcacccgtagtagcaaaaacataaaacaaataaaacttcccccacatcacagatgattttggacaagattttccaaccttgctggctactttagtttgggacctgttttttttctcatttgattttgcttgtgcagaaaatagtttccagcacatggattgatctgagagagaatgaggctcagttgtggatagtctgttttctctgagcatgttggccaactagtatcgtcaaattattgagtggatcatctcttggaaatgcagaacttctgccaccacttggctatttgcacagtcatcttgttctgtgtccttttatctctcagaccacacacatctggaacgctgtgggcatcttctgcccatgggctccatttggcacctgctgagccacagttgtcctgctggatgtgctgtgcaggttggtaggacttgcccccactgtcaaggcctggtctcatctgaaaagccctcctggacctcaaagaattcttcagacctcatagttacaggtcattatatctactatgttgatttatcatcaggcacacaacttctgtttccttctcttgtgttatctgatagcgtccctccttgagctcatcagaaaggttttatgaaatgtgaaccattttgggaaaagctgatcaatttttcttcctagcttcccattttcaaatgggacatcactcatatccctttcagaatgttaggaactgcctcccacattcttccctgtctttttgggttttgttttttgttgttgtggtggttttttaacacaaagtctcactctgttgcccaggctggagtgcagtggcatgatcttggctcactgcaacctctgccttccaggttcaagcaattctcctgcctcagcctcccgagtagctgagattacaggcgcccaccaccacgcccagctaatttttgtatttttagtagagacagggtttcaccatgttggccaggctgatctcgaactcctgacctcaggtgacctgccttggcctcccaaagtgcagggattacaagcgtgagccaccatgcccggcctgtctttttggttttgatgggagtctgaggaccccgacccctcctgctctccatctttgagcctctggcatcctctcacacccagaaatcagttggagtaagtttaattggccctgctccagctggcctttgaagcacaagtttaaatctccaccttctgtgcactgaccagagtctaaaataaaagttgtcagtaccataaaggaaaagggatccacacaggtagccttctccttggatacaggtacatcttactgtaagaatttcaagtcctggctgggcgcagtggctcactcctgtaatcccagcactttgagagaccgaggcaggcagatcacttgaggtcaggaattcaagaccaacctggccaacatggtgaaaccctgtctct

SEQ ID NO: 122344 - DNA, 4477 bp, Homo sapiens
  Payload ID: 3969
  Gene Symbol: CBFA2T3
  Gene Name: core-binding factor, runt domain, alpha subunit 2
  translocated to, 3
  Uniprot ID: O75081
  ENST ID: ENST00000268679
  CDS Start-End: 398-2359
ccggaatggcccgagggaaggccgcgcagggcagggccccagatggttcctgtcagggaagtggcgggcgcagctgcaggcctccggccccggcattatcacggggacacagctggctgcctcacccgcaggctgcagggagaccttccccagcctgcagccccaggcccgccccgcgtcacatgagccccagggctcccaccccctccccagggcagaggacacccagttggtggccgggagggcctcggctttccagggacagaggcccaactccaggacgccccagctggcccagcccctcctctttccctcaaggctgcaggaggtcgggaaaggcagtcctggtagaggcctgtcctgggctccaggttggcccctgagggtggccctcctcatgccggcttcaagactgagggacagggcagccagttcagcctcgggatccacctgtggctccatgtcccagacgcaccctgtgctggagagcggcctcctggcatctgccggctgctccgcaccccggggtcccaggaagggcggcccagccccagtggacaggaaagctaaggcctcagcgatgccggactccccagcggaggtgaagacgcagccccggtccacaccccccagcatgccgcccccaccgcctgccgcatcccagggggccacacgccccccctccttcacgccacacacacatcgagaggacgggcctgcgacgctgccccacggccgttttcatggctgcttaaaatggtctatggtctgtctcttgatgaacggcagcagccactcaccaacagccatcaatggtgcaccgtgcacacccaacggcttcagcaatggcccggccacctcgtccacagcctccttgtccacacagcacctgcccccagcctgcggggcccggcagctcagcaagctcaagcgcttcctcaccacactgcagcagtttggcagcgacatctccccagagattggggagcgcgtgcgcacactggtgctgggcctggtgaactcgacattgacgatcgaggagtttcattccaagcttcaggaggccaccaacttccctctgcggccgtttgtcattcccttcctgaaggcaaacctgcccttgctgcagcgggagctcctgcactgtgcacgcctggccaagcagacgcccgcccagtacttggcccagcatgagcagctcctgctggacgccagcgcctcctcccccatcgactcctcagagctgctactggaagtcaacgagaacggcaagaggaggacgcccgacaggaccaaagagaacgggtcagaccgcgacccgctgcaccccgagcacctcagcaaacggccatgcaccctgaaccctgcccagcgctacagccccagcaacgggccaccgcagcccacaccgccgccgcactaccgcctggaggacatagccatggcccaccacttccgagatgcctaccgccacccagacccccgggagctacgagagcgccatcggccgcttgtggtgcctgggtcccggcaggaagaagtgatcgaccacaagctcacagagcgtgagtgggcagaagagtggaagcacctcaacaacctcctgaactgcatcatggacatggtggagaagacgcggcgctcgctcacggtgctgcgcaggtgccaggaggccgaccgcgaggagctcaaccactgggcgcggcgctacagcgacgccgaggacacaaagaagggccccgctcccgccgcggcccggccccgcagcagctccgccggtcccgaagggcctcagctagacgtgcctcgcgagttcctgccgaggaccctcaccggctacgtgcctgaggacatctggaggaaggctgaagaggccgtgaatgaggtgaagcggcaggccatgtcggagctgcagaaagccgtgtcggacgcggagcgcaaagcgcacgagctcatcaccacggagcgtgccaagatggagcgggccctggccgaggcgaagcggcaggcctccgaggacgccctgacggtcatcaaccagcaggaggactccagcgagagctgctggaactgcgggcggaaagccagtgagacgtgcagcggctgcaacgcggcacgctactgcgggtccttctgccagcatcgggactgggagaagcatcaccacgtgtgtggccagagcctgcagggccccacagccgtggtggccgacccggtgcctggaccgcccgaagccgcccacagcctgggcccctccctgcctgtgggtgctgccagccccagcgaagccggctctgcggggccttctcgccccggctcccccagcccacctggcccactggacaccgtgccccgctgaccccactggcccctggcctgccggacacagcaccgtgccaaccccacccagctccaggcccaccggatgctgtgcctggcctccgatgcctggcctgccagacactgcgccccgcctgacctgggggagccgaccaattagtcactgctgctactgcccctctccgaaagaagacacagaaccaacaaaaccgcattcagtgcacctgcctcagctacctaatgattccgcgcggagacctcctgacaacgtctcttcaagcatcctcagaagcctcgactgagctttagacagcagagcagatgccgcaggcgcggcggctctgcccacctctcttttcctctctgtctgtctctccccctctgtcttctctatcctctctctctctatgactatcacacactttctcttcaatgaaaaaatcgaattggtggcttatattttcagcaaagaattttggggggttttgtgtgttggcaaaagagctactcagaaatggacaaagaaaacgggggggttctccccctcctgattaaaaagggagaaagaaaactgcgattttatagctggagatctgaacccagctgtgcccctcccccaggggcgtgaggctgatcagcgaagacgggaggaaagatttcgatttctgactcaagatgcatttttggtttcagatttttttttcctgtaatgttaaactctttggctttaagtaaaaatccaaaaagtttttttaaaaaagcaaaggaagcatacttgtgaactaccttgctagctagccagccaaggataccggacacacctctgctccaaaggaaatccaaaaaagcaaacacaagaaatcaaaatccaaaatttgtttgtcactgccaaagtatttttttcactgtttcacttgctcttgggtttgtttggatgtgggtctttttctcttctgttctgattttgtttgtgggtgtcgggatatttgggtgcagagggtttgtgcccagttagaagcgacttttgttctcttctgcgtaggcgttggtgcgtccgccgcgtgtgcgtggtccgtgtgccgttgctccggcctgcgtctccatatgtgtaggaaaggacacgccgtctgtcctcacgccccctgtgacttttcatatttccgttttccacttgtggaaaaaaagtgctaaagttttcttcccagagagagcataattccgaaacaaaactgtgacaatcttttgggttgattctcgactgcttttcgagcatgcggagccagcaggcctccctgaaacactgcttctcggccagcccgtcctcctctacctctctcctctccgcgccctccgacctctctcggccccctcaccccagctccgacctctctcagccccatcgccccaactccaacctctcggccccatcgccccaccgcagctactcccctttcttccaaacttttgcagaaaaaacaaaaaaactacaaacaaaagcagccctctgcctcctccccagggaagaccctgaccgtgtacatagccctggtgctcctgcccagccacccctcagatgcgttcgcctctggccctggggtgtgtctcggtgacgttttctatcagacgtgctccctcccatcctccagccctgcccaccctccctccactcctctcaactgcctcagcgatttcaagaaggaaataaagggataaagaaattcatgcttgcaccgagtacaaggacagacagcaggcacggcccgcagcctggcatctgtgcgtgtggcgtggcccgtggcttggcatctgtgtgcgtggtgtggcccgtggcctggcatctgtgtgcgtggcgtggcccgtggcctggcatctgtgtgtgtggcgtggcccgtggcctggcatctgtgcgcgtggcgtggcccgtggcctggcatctgtgtgcgtggctatcaggagttctaggaactcagtgcaatacgggagtgacccagctactgaaccagccacgaacagcccgccagaggcctgaagctgagcgtgtacgttaatgtgaatgtatatagtctttgcagaggtccaaatgatattcatgatggtaataaacgagatgtttgccaaataaaaaacagaaaccgca

SEQ ID NO: 122345 - DNA, 4033 bp, Homo sapiens
  Payload ID: 3969
  Gene Symbol: CBFA2T3
  Gene Name: core-binding factor, runt domain, alpha subunit 2
  translocated to, 3
  Uniprot ID: O75081
  ENST ID: ENST00000327483
  CDS Start-End: 212-1915
ggccgccccgcgcgccccagccccgccgcgcgcctgagcccggtgcggcgccagaagacagcgcgcagccgcccctgagtcgtggaggcggggaccaagctggaaggagcagcgactcccggaccgagtcgcgagtgtgcgccgtccgccgcccgccggatcccccggaccccccgaccccccagtggacaggaaagctaaggcctcagcgatgccggactccccagcggaggtgaagacgcagccccggtccacaccccccagcatgccgcccccaccgcctgccgcatcccagggggccacacgccccccctccttcacgccacacacactgatgaacggcagcagccactcaccaacagccatcaatggtgcaccgtgcacacccaacggcttcagcaatggcccggccacctcgtccacagcctccttgtccacacagcacctgcccccagcctgcggggcccggcagctcagcaagctcaagcgcttcctcaccacactgcagcagtttggcagcgacatctccccagagattggggagcgcgtgcgcacactggtgctgggcctggtgaactcgacattgacgatcgaggagtttcattccaagcttcaggaggccaccaacttccctctgcggccgtttgtcattcccttcctgaaggcaaacctgcccttgctgcagcgggagctcctgcactgtgcacgcctggccaagcagacgcccgcccagtacttggcccagcatgagcagctcctgctggacgccagcgcctcctcccccatcgactcctcagagctgctactggaagtcaacgagaacggcaagaggaggacgcccgacaggaccaaagagaacgggtcagaccgcgacccgctgcaccccgagcacctcagcaaacggccatgcaccctgaaccctgcccagcgctacagccccagcaacgggccaccgcagcccacaccgccgccgcactaccgcctggaggacatagccatggcccaccacttccgagatgcctaccgccacccagacccccgggagctacgagagcgccatcggccgcttgtggtgcctgggtcccggcaggaagaagtgatcgaccacaagctcacagagcgtgagtgggcagaagagtggaagcacctcaacaacctcctgaactgcatcatggacatggtggagaagacgcggcgctcgctcacggtgctgcgcaggtgccaggaggccgaccgcgaggagctcaaccactgggcgcggcgctacagcgacgccgaggacacaaagaagggccccgctcccgccgcggcccggccccgcagcagctccgccggtcccgaagggcctcagctagacgtgcctcgcgagttcctgccgaggaccctcaccggctacgtgcctgaggacatctggaggaaggctgaagaggccgtgaatgaggtgaagcggcaggccatgtcggagctgcagaaagccgtgtcggacgcggagcgcaaagcgcacgagctcatcaccacggagcgtgccaagatggagcgggccctggccgaggcgaagcggcaggcctccgaggacgccctgacggtcatcaaccagcaggaggactccagcgagagctgctggaactgcgggcggaaagccagtgagacgtgcagcggctgcaacgcggcacgctactgcgggtccttctgccagcatcgggactgggagaagcatcaccacgtgtgtggccagagcctgcagggccccacagccgtggtggccgacccggtgcctggaccgcccgaagccgcccacagcctgggcccctccctgcctgtgggtgctgccagccccagcgaagccggctctgcggggccttctcgccccggctcccccagcccacctggcccactggacaccgtgccccgctgaccccactggcccctggcctgccggacacagcaccgtgccaaccccacccagctccaggcccaccggatgctgtgcctggcctccgatgcctggcctgccagacactgcgccccgcctgacctgggggagccgaccaattagtcactgctgctactgcccctctccgaaagaagacacagaaccaacaaaaccgcattcagtgcacctgcctcagctacctaatgattccgcgcggagacctcctgacaacgtctcttcaagcatcctcagaagcctcgactgagctttagacagcagagcagatgccgcaggcgcggcggctctgcccacctctcttttcctctctgtctgtctctccccctctgtcttctctatcctctctctctctatgactatcacacactttctcttcaatgaaaaaatcgaattggtggcttatattttcagcaaagaattttggggggttttgtgtgttggcaaaagagctactcagaaatggacaaagaaaacgggggggttctccccctcctgattaaaaagggagaaagaaaactgcgattttatagctggagatctgaacccagctgtgcccctcccccaggggcgtgaggctgatcagcgaagacgggaggaaagatttcgatttctgactcaagatgcatttttggtttcagatttttttttcctgtaatgttaaactctttggctttaagtaaaaatccaaaaagtttttttaaaaaagcaaaggaagcatacttgtgaactaccttgctagctagccagccaaggataccggacacacctctgctccaaaggaaatccaaaaaagcaaacacaagaaatcaaaatccaaaatttgtttgtcactgccaaagtatttttttcactgtttcacttgctcttgggtttgtttggatgtgggtctttttctcttctgttctgattttgtttgtgggtgtcgggatatttgggtgcagagggtttgtgcccagttagaagcgacttttgttctcttctgcgtaggcgttggtgcgtccgccgcgtgtgcgtggtccgtgtgccgttgctccggcctgcgtctccatatgtgtaggaaaggacacgccgtctgtcctcacgccccctgtgacttttcatatttccgttttccacttgtggaaaaaaagtgctaaagttttcttcccagagagagcataattccgaaacaaaactgtgacaatcttttgggttgattctcgactgcttttcgagcatgcggagccagcaggcctccctgaaacactgcttctcggccagcccgtcctcctctacctctctcctctccgcgccctccgacctctctcggccccctcaccccagctccgacctctctcagccccatcgccccaactccaacctctcggccccatcgccccaccgcagctactcccctttcttccaaacttttgcagaaaaaacaaaaaaactacaaacaaaagcagccctctgcctcctccccagggaagaccctgaccgtgtacatagccctggtgctcctgcccagccacccctcagatgcgttcgcctctggccctggggtgtgtctcggtgacgttttctatcagacgtgctccctcccatcctccagccctgcccaccctccctccactcctctcaactgcctcagcgatttcaagaaggaaataaagggataaagaaattcatgcttgcaccgagtacaaggacagacagcaggcacggcccgcagcctggcatctgtgcgtgtggcgtggcccgtggcttggcatctgtgtgcgtggtgtggcccgtggcctggcatctgtgtgcgtggcgtggcccgtggcctggcatctgtgtgtgtggcgtggcccgtggcctggcatctgtgcgcgtggcgtggcccgtggcctggcatctgtgtgcgtggctatcaggagttctaggaactcagtgcaatacgggagtgacccagctactgaaccagccacgaacagcccgccagaggcctgaagctgagcgtgtacgttaatgtgaatgtatatagtctttgcagaggtccaaatgatattcatgatggtaataaacgagatgtttgccaaataaaaaacagaaaccgca

SEQ ID NO: 122346 - DNA, 399 bp, Homo sapiens
  Payload ID: 3969
  Gene Symbol: CBFA2T3
  Gene Name: core-binding factor, runt domain, alpha subunit 2
  translocated to, 3
  ENST ID: ENST00000564416
  CDS Start-End: 214-399
gcggccgccccgcgcgccccagccccgccgcgcgcctgagcccggtgcggcgccagaagacagcgcgcagccgcccctgagtcgtggaggcggggaccaagctggaaggagcagcgactcccggaccgagtcgcgagtgtgcgccgtccgccgcccgccggatcccccggaccccccgaccccccagtggacaggaaagctaaggcctcagcgatgccggactccccagcggaggtgaagacgcagccccggtccacaccccccagcatgccgcccccaccgcctgccgcatcccagggggccacacgccccccctccttcacgccacacacacatcgagaggacgggcctgcgacgctgccccacggccgttttcatggctgcttaaaatggtctatg

SEQ ID NO: 122347 - DNA, 1327 bp, Homo sapiens
  Payload ID: 3969
  Gene Symbol: CBFA2T3
  Gene Name: core-binding factor, runt domain, alpha subunit 2
  translocated to, 3
  ENST ID: ENST00000569464
  CDS Start-End: 72-1327
tctaaagctgcgaggcccgcggccgccgactgctgcgagccccagtggacaggaaagctaaggcctcagcgatgccggactccccagcggaggtgaagacgcagccccggtccacaccccccagcatgccgcccccaccgcctgccgcatcccagggggccacacgccccccctccttcacgccacacacacatcgagaggacgggcctgcgacgctgccccacggccgttttcatggctgcttaaaatggtctatggtctgtctcttgatgaacggcagcagccactcaccaacagccatcaatggtgcaccgtgcacacccaacggcttcagcaatggcccggccacctcgtccacagcctccttgtccacacagcacctgcccccagcctgcggggcccggcagctcagcaagctcaagcgcttcctcaccacactgcagcagtttggcagcgacatctccccagagattggggagcgcgtgcgcacactggtgctgggcctggtgaactcgacattgacgatcgaggagtttcattccaagcttcaggaggccaccaacttccctctgcggccgtttgtcattcccttcctgaaggcaaacctgcccttgctgcagcgggagctcctgcactgtgcacgcctggccaagcagacgcccgcccagtacttggcccagcatgagcagctcctgctggacgccagcgcctcctcccccatcgactcctcagagctgctactggaagtcaacgagaacggcaagaggaggacgcccgacaggaccaaagagaacgggtcagaccgcgacccgctgcaccccgagcacctcagcaaacggccatgcaccctgaaccctgcccagcgctacagccccagcaacgggccaccgcagcccacaccgccgccgcactaccgcctggaggacatagccatggcccaccacttccgagatgcctaccgccacccagacccccgggagctacgagagcgccatcggccgcttgtggtgcctgggtcccggcaggaagaagtgatcgaccacaagctcacagagcgtgagtgggcagaagagtggaagcacctcaacaacctcctgaactgcatcatggacatggtggagaagacgcggcgctcgctcacggtgctgcgcaggtgccaggaggccgaccgcgaggagctcaaccactgggcgcggcgctacagcgacgccgaggacacaaagaagggccccgctcccgccgcggcccggccccgcagcagctccgccggtcccgaagggcctcagctaggaaaacacgggctggtctgccaggaagcctggagctc

SEQ ID NO: 122348 - DNA, 664 bp, Homo sapiens
  Payload ID: 3969
  Gene Symbol: CBFA2T3
  Gene Name: core-binding factor, runt domain, alpha subunit 2
  translocated to, 3
  ENST ID: ENST00000563640
  CDS Start-End: 274-664
cccgcaggctgcagggagaccttccccagcctgcagccccaggcccgccccgcgtcacatgagccccagggctcccaccccctccccagggcagaggacacccagttggtggccgggagggcctcggctttccagggacagaggcccaactccaggacgccccagctggcccagcccctcctctttccctcaaggctgcaggaggtcgggaaaggcagtcctggtagaggcctgtcctgggctccaggttggcccctgagggtggccctcctcatgccggcttcaagactgagggacagggcagccagttcagcctcgggatccacctgtggctccatgtcccagacgcaccctgtgctggagagcggcctcctggcatctgccggctgctccgcaccccggggtcccaggaagggcggcccagccccagtggacaggaaagctaaggcctcagcgatgccggactccccagcggaggtgaagacgcagccccggtccacaccccccagcatgccgcccccaccgcctgccgcatcccagggggccacacgccccccctccttcacgccacacacactgatgaacggcagcagccactcaccaacagccatcaatggtgcaccgtgcacacccaacggcttcagcaatggcccggccacctcgt

SEQ ID NO: 122349 - DNA, 284 bp, Homo sapiens
  Payload ID: 3969
  Gene Symbol: CBFA2T3
  Gene Name: core-binding factor, runt domain, alpha subunit 2
  translocated to, 3
  ENST ID: ENST00000570046
  CDS Start-End: 218-284
gcgggatcctgtgtccagctcttccactcgcccgtgttttctgggtccatccccactggagcgtgtgtcggacctgccttccttcttatgtctgaataagtgtgcactgcatctgcttttgagtttatctgtgctcggctgacagtctatggagaaccttgtctcaccacagctgtgtgtctcagccccagtggacaggaaagctaaggcctcagcgatgccggactccccagcggaggtgaagacgcagccccggtccacaccccccagcatgccgcccccac

SEQ ID NO: 122350 - DNA, 539 bp, Homo sapiens
  Payload ID: 3969
  Gene Symbol: CBFA2T3
  Gene Name: core-binding factor, runt domain, alpha subunit 2
  translocated to, 3
  ENST ID: ENST00000562719
  CDS Start-End: 143-539
caccagcgccttgagcgttttcctgccgtctccggacacagctggccctgggtggagcttctcagacttcagggagcctcagaccacgagggaatcttgttcagctgcagccccagtggacaggaaagctaaggcctcagcgatgccggactccccagcggaggtgaagacgcagccccggtccacaccccccagcatgccgcccccaccgcctgccgcatcccagggggccacacgccccccctccttcacgccacacacacatcgagaggacgggcctgcgacgctgccccacggccgttttcatggctgcttaaaatggtctatggtctgtctcttgatgaacggcagcagccactcaccaacagccatcaatggtgcaccgtgcacacccaacggcttcagcaatggcccggccacctcgtccacagcctccttgtccacacagcacctgcccccagcctgcggggcccggcagctcagcaagctcaagcgcttcctcaccacactgcagcagtttggcagcgacatctccccag

SEQ ID NO: 122351 - DNA, 469 bp, Homo sapiens
  Payload ID: 3969
  Gene Symbol: CBFA2T3
  Gene Name: core-binding factor, runt domain, alpha subunit 2
  translocated to, 3
  ENST ID: ENST00000569443
  CDS Start-End: 107-469
gttcagcctcccgcgcggccgccagaagccgcggttctaaagctgcgaggcccgcggccgccgactgctgcgagccccagtggacaggaaagctaaggcctcagcgatgccggactccccagcggaggtgaagacgcagccccggtccacaccccccagcatgccgcccccaccgcctgccgcatcccagggggccacacgccccccctccttcacgccacacacactgatgaacggcagcagccactcaccaacagccatcaatggtgcaccgtgcacacccaacggcttcagcaatggcccggccacctcgtccacagcctccttgtccacacagcacctgcccccagcctgcggggcccggcagctcagcaagctcaagcgcttcctcaccacactgcagcagtttggcagcgacatctccccagagattggggagcgcgtgcgcacactggtgctgggcctggtg

SEQ ID NO: 122352 - DNA, 284 bp, Homo sapiens
  Payload ID: 3969
  Gene Symbol: CBFA2T3
  Gene Name: core-binding factor, runt domain, alpha subunit 2
  translocated to, 3
  ENST ID: ENST00000566868
  CDS Start-End: 1-103
cggtcccgaagggcctcagctaggaaaacacgggctggtctgccaggaagcctggagctcagagcgtctggtgggccagaggctcggagctgggaggccctgagggtctctgcttctccgcctcagcgacgaatgctgacacaggagaggcccaggacacacacggctcccagccgagtccaagacgtgcctcgcgagttcctgccgaggaccctcaccggctacgtgcctgaggacatctggaggaaggctgaagaggccgtgaatgaggtgaagcggcaggc

SEQ ID NO: 122353 - DNA, 1921 bp, Homo sapiens
  Payload ID: 3970
  Gene Symbol: CIR1
  Gene Name: corepressor interacting with RBPJ, 1
  Uniprot ID: Q86X95
  ENST ID: ENST00000342016
  CDS Start-End: 94-1446
cttgctgctggaaacgcagttccggttaggcggctgagtttgtttacgttgctaacagatctagcccctgctttccctagttccagttccaagatggggaaatccttcgccaacttcatgtgcaagaaagactttcatcctgcctccaaatccaatatcaaaaaagtatggatggcagaacagaaaatatcatatgataagaagaaacaagaagaattgatgcagcaatatcttaaagaacaagaatcatatgataatagattgcttatgggagatgaacgtgtaaagaatggccttaatttcatgtatgaagccccaccaggagctaaaaaagaaaacaaagagaaagaagaaacagaaggagagaccgaatacaaatttgaatggcagaaaggagccccacgagaaaaatatgccaaagatgacatgaacatcagagatcagccctttggtattcaggttcgaaatgtgaggtgcattaaatgtcacaaatggggtcatgtcaacacagatcgagaatgtcctttgtttggtctttctggaatcaatgcaagttcggttcccactgatggctcagggccatcgatgcacccctcggagctaatagcggagatgagaaacagtgggtttgcactgaaacgaaatgtactggggagaaacttgaccgcaaatgatccatcacaggagtatgttgcaagtgagggtgaagaagatccagaagttgaatttttaaagtcactaacaaccaaacaaaaacagaaacttctcaggaaattagatcgactggagaagaaaaaaaagaaaaaagatagaaaaaagaaaaagtttcagaagagcagaagtaaacacaaaaaacataagtcctcttcttcctcatcttcctcctcctcctcctcttcctctactgagacttcagaaagcagtagtgagagtgagagtaacaataaagaaaaaaaaatacaaaggaagaaaagaaagaaaaacaagtgttcagggcataacaacagtgattctgaagagaaggacaagtctaagaagagaaagcttcatgaagaactttctagcagtcaccataaccgggaaaaagccaaggaaaagcccaggttcttaaaacacgagagttctagggaggacagcaaatggagccattctgattctgacaaaaagtccagaacccataaacatagcccagagaagagaggctctgaaagaaaggaggggagcagcagaagccacggcagggaggaaaggagccggagaagccggagcagaagtcctggtagttacaagcaaagggagacaaggaaacgggcacagcgaaatcctggtgaagagcaaagcagaagaaatgacagcagaagccatggcacagacttgtatagaggagaaaaaatgtacagagagcacccaggaggtacacatactaaagtgacacaaagagaatgaagcagaagtagagaagaaagactgtatgtgacaattacctgggaataaaaatatctccacttttttattgaatacctttagcaaggggtaaattatgtactgttgtctttctaataaaaaagctcaattttaatttttcatctctagactgtcaattcaagtacaaaactacatgagtactataagaatgaattttgcaaatatttgtaagtaagctattttggggctgtggaaatattttctgttggtaactgtttcttgttccccataccagataaaaaccgcatataactctgtgacattttctttgttctgaaacatcattaaaagaatgacagtacattgaatgggtataatttacttttttcaattcaaatttgttattctaggatttgaatttgcttgaagtgaattgtaataattattcaaattcattagtataaattaaggattaataaatctttaagacttttaa

SEQ ID NO: 122354 - DNA, 561 bp, Homo sapiens
  Payload ID: 3970
  Gene Symbol: CIR1
  Gene Name: corepressor interacting with RBPJ, 1
  ENST ID: ENST00000377973
  CDS Start-End: 1-289
tgaatggcagaaaggagccccacgagaaaaatatgccaaagatgacatgaacatcagagatcagccctttggtattcaggttcgaaatgtgaggtgcattaaatgtcacaaatggggtcatgtcaacacagatcgagaatgtcctttgtttggtctttctggaatcaatgcaagttcggttcccactgatggctcaggccgggcacagtggctcacgcctgtaatcccagcactttgggaggccaaggctggtggatcatttgaggtcaggagttcgagaccagcctgaccaacatgatgaaaccccgtctctactgaaatacaaaaattagccgggttttgtggccagcgcctgtaatcacagctgctgggaggctgaggcaggagaatcgcttgaacccaggaggtggaagttgcagtgagctgagatggtgtcattgcacttcagcctgggcgatagagcaagattccctctcaaaaaaataaaaataaataaaaataaaatatcttcattgtgtaaggcaaagtttctaataaacagtgattttttttactagcata

SEQ ID NO: 122355 - DNA, 4852 bp, Homo sapiens
  Payload ID: 3971
  Gene Symbol: CORIN
  Gene Name: corin, serine peptidase
  Uniprot ID: Q9Y5Q5
  ENST ID: ENST00000273857
  CDS Start-End: 1-3129
atgaaacagtctcctgccctcgctccggaagagcgctgccgcagagccgggtccccaaagccggtcttgagagctgatgacaataacatgggcaatggctgctctcagaagctggcgactgctaacctcctccggttcctattgctggtcctgattccatgtatctgtgctctcgttctcttgctggtgatcctgctttcctatgttggaacattacaaaaggtctattttaaatcaaatgggagtgaacctttggtcactgatggtgaaatccaagggtccgatgttattcttacaaatacaatttataaccagagcactgtggtgtctactgcacatcccgaccaacacgttccagcctggactacggatgcttctctcccaggggaccaaagtcacaggaatacaagtgcctgtatgaacatcacccacagccagtgtcagatgctgccctaccacgccacgctgacacctctcctctcagttgtcagaaacatggaaatggaaaagttcctcaagtttttcacatatctccatcgcctcagttgctatcaacatatcatgctgtttggctgtaccctcgccttccctgagtgcatcattgatggcgatgacagtcatggactcctgccctgtaggtccttctgtgaggctgcaaaagaaggctgtgaatcagtcctggggatggtgaattactcctggccggatttcctcagatgctcccagtttagaaaccaaactgaaagcagcaatgtcagcagaatttgcttctcacctcagcaggaaaacggaaagcaattgctctgtggaaggggtgagaactttctgtgtgccagtggaatctgcatccccgggaaactgcaatgtaatggctacaacgactgtgacgactggagtgacgaggctcattgcaactgcagcgagaatctgtttcactgtcacacaggcaagtgccttaattacagccttgtgtgtgatggatatgatgactgtggggatttgagtgatgagcaaaactgtgattgcaatcccacaacagagcatcgctgcggggacgggcgctgcatcgccatggagtgggtgtgtgatggtgaccacgactgtgtggataagtctgacgaggtcaactgctcctgtcacagccagggtctggtggaatgcagaaatggacaatgtatccccagcacgtttcaatgtgatggtgacgaggactgcaaggatgggagtgatgaggagaactgcagcgtcattcagacttcatgtcaagaaggagaccaaagatgcctctacaatccctgccttgattcatgtggtggtagctctctctgtgacccgaacaacagtctgaataactgtagtcaatgtgaaccaattacattggaactctgcatgaatttgccctacaacagtacaagttatccaaattattttggccacaggactcaaaaggaagcatccatcagctgggagtcttctcttttccctgcacttgttcaaaccaactgttataaatacctcatgttcttttcttgcaccattttggtaccaaaatgtgatgtgaatacaggcgagcatatccctccttgcagggcattgtgtgaacactctaaagaacgctgtgagtctgttcttgggattgtgggcctacagtggcctgaagacacagattgcagtcaatttccagaggaaaattcagacaatcaaacctgcctgatgcctgatgaatatgtggaagaatgctcacctagtcatttcaagtgccgctcaggacagtgtgttctggcttccagaagatgtgatggccaggccgactgtgacgatgacagtgatgaggaaaactgtggttgtaaagagagagatctttgggaatgtccatccaataaacaatgtttgaagcacacagtgatctgcgatgggttcccagactgccctgattacatggacgagaaaaactgctcattttgccaagatgatgagctggaatgtgcaaaccatgcgtgtgtgtcacgtgacctgtggtgtgatggtgaagccgactgctcagacagttcagatgaatgggactgtgtgaccctctctataaatgtgaactcctcttcctttctgatggttcacagagctgccacagaacaccatgtgtgtgcagatggctggcaggagatattgagtcagctggcctgcaagcagatgggtttaggagaaccatctgtgaccaaattgatacaggaacaggagaaagagccgcggtggctgacattacactccaactgggagagcctcaatgggaccactttacatgaacttctagtaaatgggcagtcttgtgagagcagaagtaaaatttctcttctgtgtactaaacaagactgtgggcgccgccctgctgcccgaatgaacaaaaggatccttggaggtcggacgagtcgccctggaaggtggccatggcagtgttctctgcagagtgaacccagtggacatatctgtggctgtgtcctcattgccaagaagtgggttctgacagttgcccactgcttcgaggggagagagaatgctgcagtttggaaagtggtgcttggcatcaacaatctagaccatccatcagtgttcatgcagacacgctttgtgaagaccatcatcctgcatccccgctacagtcgagcagtggtggactatgacatcagcatcgttgagctgagtgaagacatcagtgagactggctacgtccggcctgtctgcttgcccaacccggagcagtggctagagcctgacacgtactgctatatcacaggctggggccacatgggcaataaaatgccatttaagctgcaagagggagaggtccgcattatttctctggaacattgtcagtcctactttgacatgaagaccatcaccactcggatgatatgtgctggctatgagtctggcacagttgattcatgcatgggtgacagcggtgggcctcttgtttgtgagaagcctggaggacggtggacattatttggattaacttcatggggctccgtctgcttttccaaagtcctggggcctggcgtttatagtaatgtgtcatatttcgtcgaatggattaaaagacagatttacatccagacctttctcctaaactaattataaggatgatcagagacttttgccagctacactaaaagaaaatggccttcttgactgtgaagagctgcctgcagagagctgtacagaagcacttttcatggacagaaatgctcaatcgtgcactgcaaatttgcatgtttgttttggactaatttttttcaatttattttttcaccttcatttttctcttatttcaagttcaatgaaagactttacaaaagcaaacaaagcagactttgtccttttgccaggcctaaccatgactgcagcacaaaattatcgactctggcgagatttaaaatcaggtgctacagtaacaggttatggaatggtctcttttatcctatcacaaaaaaagacatagatatttaggctgattaattatctctaccagtttttgtttctcaagctcagtgcatagtggtaaatttcagtgttaacattggagacttgcttttctttttctttttttataccccacaattcttttttattacacttcgaattttagggtacacgagcacaacgtgcaggttagttacatatgtatacatgtgccatgttggtgtgctgaacccagtaactcgtcatttgatttattaaaagccaagataatttacatgtttaaagtatttactattacccccttctaatgtttgcataattctgagaactgataaaagacagcaataaaagaccagtgtcatccatttaggtagcaagacatattgaatgcaaagttctttagatatcaatattaacacttgacattattggaccccccattctggatgtatatcaagatcataattttatagaagagtctctatagaactgtcctcatagctgggtttgttcaggatatatgagttggctgattgagactgcaacaactacatctatatttatgggcaatattttgttttacttatgtggcaaagaactggatattaaactttgcaaaagagaatttagatgagagatgcaattttttaaaaagaaaattaatttgcatccctcgtttaattaaatttatttttcagttttcttgcgttcatccataccaacaaagtcataaagagcatattttagagcacagtaagactttgcatggagtaaaacattttgtaattttcctcaaaagatgtttaatatctggtttcttctcattggtaattaaaattttagaaatgatttttagctctaggccactttacgcaactcaatttctgaagcaattagtggtaaaaagtatttttccccactaaaaaactttaaaacacaaatcttcatatatacttaatttaattagtcaggcatccattttgccttttaaacaactaggattccctactaacctccaccagcaacctggactgcctcagcattccaaatagatactacctgcaattttatacatgtatttttgtatcttttctgtgtgtaaacatagttgaaattcaaaaagttgtagcaatttctatactattcatctcctgtccttcagtttgtataaacctaaggagagtgtgaaatccagcaactgaattgtggtcacgattgtatgaaagttcaagaacatatgtcagttttgttacagttgtagctacatactcaatgtatcaacttttagcctgctcaacttaggctcagtgaaatatatatattatacttattttaaataattcttaatacaaataaaatggtaatggtctaatca

SEQ ID NO: 122356 - DNA, 2417 bp, Homo sapiens
  Payload ID: 3971
  Gene Symbol: CORIN
  Gene Name: corin, serine peptidase
  ENST ID: ENST00000504584
  CDS Start-End: 158-2362
agagcagacaaaatatggggcccctggcgcttaaagttcagtttgtctctcttgagcttggagaaaatcatccgtagtgcctccccgggggacacgtagaggagagaaaagcgaccaagataaaagtggacagaagaataagcgagactttttatccatgaaacagtctcctgccctcgctccggaagagcgctgccgcagagccgggtccccaaagccggtcttgagagctgatgacaataacatgggcaatggctgctctcagaagctggcgactgctaacctcctccggttcctattgctggtcctgattccatgtatctgtgctctcgttctcttgctggtgatcctgctttcctatgttggaacattacaaaaggtctattttaaatcaaatgggagtgaacctttggtcactgatggtgaaatccaagggtccgatgttattcttacaaatacaatttataaccagagcactgtggtgtctactgcacatcccgaccaacacgttccagcctggactacggatgcttctctcccaggggaccaaagtcacaggaatacaagtgcctgtatgaacatcacccacagccagtgtcagatgctgccctaccacgccacgctgacacctctcctctcagttgtcagaaacatggaaatggaaaagttcctcaagtttttcacatatctccatcgcctcagttgctatcaacatatcatgctgtttggctgtaccctcgccttccctgagtgcatcattgatggcgatgacagtcatggactcctgccctgtaggtccttctgtgaggctgcaaaagaaggctgtgaatcagtcctggggatggtgaattactcctggccggatttcctcagatgctcccagtttagaaaccaaactgaaagcagcaatgtcagcagaatttgcttctcacctcagcaggaaaacggaaagcaattgctctgtggaaggggtgagaactttctgtgtgccagtggaatctgcatccccgggaaactgcaatgtaatggctacaacgactgtgacgactggagtgacgaggctcattgcaactgcagcgagaatctgtttcactgtcacacaggcaagtgccttaattacagccttgtgtgtgatggatatgatgactgtggggatttgagtgatgagcaaaactgtgcctgtcacagccagggtctggtggaatgcagaaatggacaatgtatccccagcacgtttcaatgtgatggtgacgaggactgcaaggatgggagtgatgaggagaactgcagcgtcattcagacttcatgtcaagaaggagaccaaagatgcctctacaatccctgccttgattcatgtggtggtagctctctctgtgacccgaacaacagtctgaataactgtagtcaatgtgaaccaattacattggaactctgcatgaatttgccctacaacagtacaagttatccaaattattttggccacaggactcaaaaggaagcatccatcagctgggagtcttctcttttccctgcacttgttcaaaccaactgttataaatacctcatgttcttttcttgcaccattttggtaccaaaatgtgatgtgaatacaggcgagcatatccctccttgcagggcattgtgtgaacactctaaagaacgctgtgagtctgttcttgggattgtgggcctacagtggcctgaagacacagattgcagtcaatttccagaggaaaattcagacaatcaaacctgcctgatgcctgatgaatatgtggaagaatgctcacctagtcatttcaagtgccgctcaggacagtgtgttctggcttccagaagatgtgatggccaggccgactgtgacgatgacagtgatgaggaaaactgtggttgtaaagagagagatctttgggaatgtccatccaataaacaatgtttgaagcacacagtgatctgcgatgggttcccagactgccctgattacatggacgagaaaaactgctcattttgccaagatgatgagctggaatgtgcaaaccatgcgtgtgtgtcacgtgacctgtggtgtgatggtgaagccgactgctcagacagttcagatgaatgggactgtggtgagctacttgtttctgccatctgttgtactctctcatgcctgtcagccactgaagctgaatggatcctaaattacttcctggattttactgaccaagttcatctattttgttttactgttataaaagctgatagtgctgatctatgtgtgttatttccaactcacagaaaatttccccacgaagctacttctctatttgaaatatctatattgtatggaaaaacgtttgggttcaaaatgttgtaatcatataattgctgggagaggatttaaaaactcttcattaaaacccaacttcaat

SEQ ID NO: 122357 - DNA, 3112 bp, Homo sapiens
  Payload ID: 3971
  Gene Symbol: CORIN
  Gene Name: corin, serine peptidase
  ENST ID: ENST00000502252
  CDS Start-End: 124-3051
agttcagtttgtctctcttgagcttggagaaaatcatccgtagtgcctccccgggggacacgtagaggagagaaaagcgaccaagataaaagtggacagaagaataagcgagactttttatccatgaaacagtctcctgccctcgctccggaagagcgctgccgcagagccgggtccccaaagccggtcttgagagctgatgacaataacatgggcaatggctgctctcagaagctggcgactgctaacctcctccggttcctattgctggtcctgattccatgtatctgtgctctcgttctcttgctggtgatcctgctttcctatgttggtgcctgtatgaacatcacccacagccagtgtcagatgctgccctaccacgccacgctgacacctctcctctcagttgtcagaaacatggaaatggaaaagttcctcaagtttttcacatatctccatcgcctcagttgctatcaacatatcatgctgtttggctgtaccctcgccttccctgagtgcatcattgatggcgatgacagtcatggactcctgccctgtaggtccttctgtgaggctgcaaaagaaggctgtgaatcagtcctggggatggtgaattactcctggccggatttcctcagatgctcccagtttagaaaccaaactgaaagcagcaatgtcagcagaatttgcttctcacctcagcaggaaaacggaaagcaattgctctgtggaaggggtgagaactttctgtgtgccagtggaatctgcatccccgggaaactgcaatgtaatggctacaacgactgtgacgactggagtgacgaggctcattgcaactgcagcgagaatctgtttcactgtcacacaggcaagtgccttaattacagccttgtgtgtgatggatatgatgactgtggggatttgagtgatgagcaaaactgtgattgcaatcccacaacagagcatcgctgcggggacgggcgctgcatcgccatggagtgggtgtgtgatggtgaccacgactgtgtggataagtctgacgaggtcaactgctcctgtcacagccagggtctggtggaatgcagaaatggacaatgtatccccagcacgtttcaatgtgatggtgacgaggactgcaaggatgggagtgatgaggagaactgcagcgtcattcagacttcatgtcaagaaggagaccaaagatgcctctacaatccctgccttgattcatgtggtggtagctctctctgtgacccgaacaacagtctgaataactgtagtcaatgtgaaccaattacattggaactctgcatgaatttgccctacaacagtacaagttatccaaattattttggccacaggactcaaaaggaagcatccatcagctgggagtcttctcttttccctgcacttgttcaaaccaactgttataaatacctcatgttcttttcttgcaccattttggtaccaaaatgtgatgtgaatacaggcgagcatatccctccttgcagggcattgtgtgaacactctaaagaacgctgtgagtctgttcttgggattgtgggcctacagtggcctgaagacacagattgcagtcaatttccagaggaaaattcagacaatcaaacctgcctgatgcctgatgaatatgtggaagaatgctcacctagtcatttcaagtgccgctcaggacagtgtgttctggcttccagaagatgtgatggccaggccgactgtgacgatgacagtgatgaggaaaactgtggttgtaaagagagagatctttgggaatgtccatccaataaacaatgtttgaagcacacagtgatctgcgatgggttcccagactgccctgattacatggacgagaaaaactgctcattttgccaagatgatgagctggaatgtgcaaaccatgcgtgtgtgtcacgtgacctgtggtgtgatggtgaagccgactgctcagacagttcagatgaatgggactgtgtgaccctctctataaatgtgaactcctcttcctttctgatggttcacagagctgccacagaacaccatgtgtgtgcagatggctggcaggagatattgagtcagctggcctgcaagcagatgggtttaggagaaccatctgtgaccaaattgatacaggaacaggagaaagagccgcggtggctgacattacactccaactgggagagcctcaatgggaccactttacatgaacttctagtaaatgggcagtcttgtgagagcagaagtaaaatttctcttctgtgtactaaacaagactgtgggcgccgccctgctgcccgaatgaacaaaaggatccttggaggtcggacgagtcgccctggaaggtggccatggcagtgttctctgcagagtgaacccagtggacatatctgtggctgtgtcctcattgccaagaagtgggttctgacagttgcccactgcttcgaggggagagagaatgctgcagtttggaaagtggtgcttggcatcaacaatctagaccatccatcagtgttcatgcagacacgctttgtgaagaccatcatcctgcatccccgctacagtcgagcagtggtggactatgacatcagcatcgttgagctgagtgaagacatcagtgagactggctacgtccggcctgtctgcttgcccaacccggagcagtggctagagcctgacacgtactgctatatcacaggctggggccacatgggcaataaaatgccatttaagctgcaagagggagaggtccgcattatttctctggaacattgtcagtcctactttgacatgaagaccatcaccactcggatgatatgtgctggctatgagtctggcacagttgattcatgcatgggtgacagcggtgggcctcttgtttgtgagaagcctggaggacggtggacattatttggattaacttcatggggctccgtctgcttttccaaagtcctggggcctggcgtttatagtaatgtgtcatatttcgtcgaatggattaaaagacagatttacatccagacctttctcctaaactaattataaggatgatcagagacttttgccagctacactaaaagaaaatggccttcttgactgt

SEQ ID NO: 122358 - DNA, 3018 bp, Homo sapiens
  Payload ID: 3971
  Gene Symbol: CORIN
  Gene Name: corin, serine peptidase
  ENST ID: ENST00000505909
  CDS Start-End: 1-3018
atgaaacagtctcctgccctcgctccggaagagcgctgccgcagagccgggtccccaaagccggtcttgagagctgatgacaataacatgggcaatggctgctctcagaagctggcgactgctaacctcctccggttcctattgctggtcctgattccatgtatctgtgctctcgttctcttgctggtgatcctgctttcctatgttggaacattacaaaaggtctattttaaatcaaatgggagtgaacctttggtcactgatggtgaaatccaagggtccgatgttattcttacaaatacaatttataaccagagcactgtggtgtctactgcacatcccgaccaacacgttccagcctggactacggatgcttctctcccaggggaccaaagtcacaggaatacaagtgcctgtatgaacatcacccacagccagtgtcagatgctgccctaccacgccacgctgacacctctcctctcagttgtcagaaacatggaaatggaaaagttcctcaagtttttcacatatctccatcgcctcagttgctatcaacatatcatgctgtttggctgtaccctcgccttccctgagtgcatcattgatggcgatgacagtcatggactcctgccctgtaggtccttctgtgaggctgcaaaagaaggctgtgaatcagtcctggggatggtgaattactcctggccggatttcctcagatgctcccagtttagaaaccaaactgaaagcagcaatgtcagcagaatttgcttctcacctcagcaggaaaacggaaagcaattgctctgtggaaggggtgagaactttctgtgtgccagtggaatctgcatccccgggaaactgcaatgtaatggctacaacgactgtgacgactggagtgacgaggctcattgcaactgcagcgagaatctgtttcactgtcacacaggcaagtgccttaattacagccttgtgtgtgatggatatgatgactgtggggatttgagtgatgagcaaaactgtgcctgtcacagccagggtctggtggaatgcagaaatggacaatgtatccccagcacgtttcaatgtgatggtgacgaggactgcaaggatgggagtgatgaggagaactgcagcgtcattcagacttcatgtcaagaaggagaccaaagatgcctctacaatccctgccttgattcatgtggtggtagctctctctgtgacccgaacaacagtctgaataactgtagtcaatgtgaaccaattacattggaactctgcatgaatttgccctacaacagtacaagttatccaaattattttggccacaggactcaaaaggaagcatccatcagctgggagtcttctcttttccctgcacttgttcaaaccaactgttataaatacctcatgttcttttcttgcaccattttggtaccaaaatgtgatgtgaatacaggcgagcatatccctccttgcagggcattgtgtgaacactctaaagaacgctgtgagtctgttcttgggattgtgggcctacagtggcctgaagacacagattgcagtcaatttccagaggaaaattcagacaatcaaacctgcctgatgcctgatgaatatgtggaagaatgctcacctagtcatttcaagtgccgctcaggacagtgtgttctggcttccagaagatgtgatggccaggccgactgtgacgatgacagtgatgaggaaaactgtggttgtaaagagagagatctttgggaatgtccatccaataaacaatgtttgaagcacacagtgatctgcgatgggttcccagactgccctgattacatggacgagaaaaactgctcattttgccaagatgatgagctggaatgtgcaaaccatgcgtgtgtgtcacgtgacctgtggtgtgatggtgaagccgactgctcagacagttcagatgaatgggactgtgtgaccctctctataaatgtgaactcctcttcctttctgatggttcacagagctgccacagaacaccatgtgtgtgcagatggctggcaggagatattgagtcagctggcctgcaagcagatgggtttaggagaaccatctgtgaccaaattgatacaggaacaggagaaagagccgcggtggctgacattacactccaactgggagagcctcaatgggaccactttacatgaacttctagtaaatgggcagtcttgtgagagcagaagtaaaatttctcttctgtgtactaaacaagactgtgggcgccgccctgctgcccgaatgaacaaaaggatccttggaggtcggacgagtcgccctggaaggtggccatggcagtgttctctgcagagtgaacccagtggacatatctgtggctgtgtcctcattgccaagaagtgggttctgacagttgcccactgcttcgaggggagagagaatgctgcagtttggaaagtggtgcttggcatcaacaatctagaccatccatcagtgttcatgcagacacgctttgtgaagaccatcatcctgcatccccgctacagtcgagcagtggtggactatgacatcagcatcgttgagctgagtgaagacatcagtgagactggctacgtccggcctgtctgcttgcccaacccggagcagtggctagagcctgacacgtactgctatatcacaggctggggccacatgggcaataaaatgccatttaagctgcaagagggagaggtccgcattatttctctggaacattgtcagtcctactttgacatgaagaccatcaccactcggatgatatgtgctggctatgagtctggcacagttgattcatgcatgggtgacagcggtgggcctcttgtttgtgagaagcctggaggacggtggacattatttggattaacttcatggggctccgtctgcttttccaaagtcctggggcctggcgtttatagtaatgtgtcatatttcgtcgaatggattaaaagacagatttacatccagacctttctcctaaactaa

SEQ ID NO: 122359 - DNA, 3200 bp, Homo sapiens
  Payload ID: 3971
  Gene Symbol: CORIN
  Gene Name: corin, serine peptidase
  ENST ID: ENST00000508498
  CDS Start-End: 250-2961
ttttacttggctgtctcaccacagccagccccatgaagaggaacattacaaaaggtctattttaaatcaaatgggagtgaacctttggtcactgatggtgaaatccaagggtccgatgttattcttacaaatacaatttataaccagagcactgtggtgtctactgcacatcccgaccaacacgttccagcctggactacggatgcttctctcccaggggaccaaagtcacaggaatacaagtgcctgtatgaacatcacccacagccagtgtcagatgctgccctaccacgccacgctgacacctctcctctcagttgtcagaaacatggaaatggaaaagttcctcaagtttttcacatatctccatcgcctcagttgctatcaacatatcatgctgtttggctgtaccctcgccttccctgagtgcatcattgatggcgatgacagtcatggactcctgccctgtaggtccttctgtgaggctgcaaaagaaggctgtgaatcagtcctggggatggtgaattactcctggccggatttcctcagatgctcccagtttagaaaccaaactgaaagcagcaatgtcagcagaatttgcttctcacctcagcaggaaaacggaaagcaattgctctgtggaaggggtgagaactttctgtgtgccagtggaatctgcatccccgggaaactgcaatgtaatggctacaacgactgtgacgactggagtgacgaggctcattgcaactgcagcgagaatctgtttcactgtcacacaggcaagtgccttaattacagccttgtgtgtgatggatatgatgactgtggggatttgagtgatgagcaaaactgtgattgcaatcccacaacagagcatcgctgcggggacgggcgctgcatcgccatggagtgggtgtgtgatggtgaccacgactgtgtggataagtctgacgaggtcaactgctcctgtcacagccagggtctggtggaatgcagaaatggacaatgtatccccagcacgtttcaatgtgatggtgacgaggactgcaaggatgggagtgatgaggagaactgcagcgtcattcagacttcatgtcaagaaggagaccaaagatgcctctacaatccctgccttgattcatgtggtggtagctctctctgtgacccgaacaacagtctgaataactgtagtcaatgtgaaccaattacattggaactctgcatgaatttgccctacaacagtacaagttatccaaattattttggccacaggactcaaaaggaagcatccatcagctgggagtcttctcttttccctgcacttgttcaaaccaactgttataaatacctcatgttcttttcttgcaccattttggtaccaaaatgtgatgtgaatacaggcgagcatatccctccttgcagggcattgtgtgaacactctaaagaacgctgtgagtctgttcttgggattgtgggcctacagtggcctgaagacacagattgcagtcaatttccagaggaaaattcagacaatcaaacctgcctgatgcctgatgaatatgtggaagaatgctcacctagtcatttcaagtgccgctcaggacagtgtgttctggcttccagaagatgtgatggccaggccgactgtgacgatgacagtgatgaggaaaactgtggttgtaaagagagagatctttgggaatgtccatccaataaacaatgtttgaagcacacagtgatctgcgatgggttcccagactgccctgattacatggacgagaaaaactgctcattttgccaagatgatgagctggaatgtgcaaaccatgcgtgtgtgtcacgtgacctgtggtgtgatggtgaagccgactgctcagacagttcagatgaatgggactgtgtgaccctctctataaatgtgaactcctcttcctttctgatggttcacagagctgccacagaacaccatgtgtgtgcagatggctggcaggagatattgagtcagctggcctgcaagcagatgggtttaggagaaccatctgtgaccaaattgatacaggaacaggagaaagagccgcggtggctgacattacactccaactgggagagcctcaatgggaccactttacatgaacttctagtaaatgggcagtcttgtgagagcagaagtaaaatttctcttctgtgtactaaacaagactgtgggcgccgccctgctgcccgaatgaacaaaaggatccttggaggtcggacgagtcgccctggaaggtggccatggcagtgttctctgcagagtgaacccagtggacatatctgtggctgtgtcctcattgccaagaagtgggttctgacagttgcccactgcttcgaggggagagagaatgctgcagtttggaaagtggtgcttggcatcaacaatctagaccatccatcagtgttcatgcagacacgctttgtgaagaccatcatcctgcatccccgctacagtcgagcagtggtggactatgacatcagcatcgttgagctgagtgaagacatcagtgagactggctacgtccggcctgtctgcttgcccaacccggagcagtggctagagcctgacacgtactgctatatcacaggctggggccacatgggcaataaaatgccatttaagctgcaagagggagaggtccgcattatttctctggaacattgtcagtcctactttgacatgaagaccatcaccactcggatgatatgtgctggctatgagtctggcacagttgattcatgcatgggtgacagcggtgggcctcttgtttgtgagaagcctggaggacggtggacattatttggattaacttcatggggctccgtctgcttttccaaagtcctggggcctggcgtttatagtaatgtgtcatatttcgtcgaatggattaaaagacagatttacatccagacctttctcctaaactaattataaggatgatcagagacttttgccagctacactaaaagaaaatggccttcttgactgtgaagagctgcctgcagagagctgtacagaagcacttttcatggacagaaatgctcaatcgtgcactgcaaatttgcatgtttgttttggactaatttttttcaatttattttttcaccttcatttttctcttatttcaagttcaatgaaagactttacaaaagcaaacaaagcagact

SEQ ID NO: 122360 - DNA, 4696 bp, Homo sapiens
  Payload ID: 3971
  Gene Symbol: CORIN
  Gene Name: corin, serine peptidase
  ENST ID: ENST00000610355
  CDS Start-End: 158-2974
agagcagacaaaatatggggcccctggcgcttaaagttcagtttgtctctcttgagcttggagaaaatcatccgtagtgcctccccgggggacacgtagaggagagaaaagcgaccaagataaaagtggacagaagaataagcgagactttttatccatgaaacagtctcctgccctcgctccggaagagcgctgccgcagagccgggtccccaaagccggtcttgagagctgatgacaataacatgggcaatggctgctctcagaagctggcgactgctaacctcctccggttcctattgctggtcctgattccatgtatctgtgctctcgttctcttgctggtgatcctgctttcctatgttggtgcctgtatgaacatcacccacagccagtgtcagatgctgccctaccacgccacgctgacacctctcctctcagttgtcagaaacatggaaatggaaaagttcctcaagtttttcacatatctccatcgcctcagttgctatcaacatatcatgctgtttggctgtaccctcgccttccctgagtgcatcattgatggcgatgacagtcatggactcctgccctgtaggtccttctgtgaggctgcaaaagaaggctgtgaatcagtcctggggatggtgaattactcctggccggatttcctcagatgctcccagtttagaaaccaaactgaaagcagcaatgtcagcagaatttgcttctcacctcagcaggaaaacggaaagcaattgctctgtggaaggggtgagaactttctgtgtgccagtggaatctgcatccccgggaaactgcaatgtaatggctacaacgactgtgacgactggagtgacgaggctcattgcaactgcagcgagaatctgtttcactgtcacacaggcaagtgccttaattacagccttgtgtgtgatggatatgatgactgtggggatttgagtgatgagcaaaactgtgcctgtcacagccagggtctggtggaatgcagaaatggacaatgtatccccagcacgtttcaatgtgatggtgacgaggactgcaaggatgggagtgatgaggagaactgcagcgtcattcagacttcatgtcaagaaggagaccaaagatgcctctacaatccctgccttgattcatgtggtggtagctctctctgtgacccgaacaacagtctgaataactgtagtcaatgtgaaccaattacattggaactctgcatgaatttgccctacaacagtacaagttatccaaattattttggccacaggactcaaaaggaagcatccatcagctgggagtcttctcttttccctgcacttgttcaaaccaactgttataaatacctcatgttcttttcttgcaccattttggtaccaaaatgtgatgtgaatacaggcgagcatatccctccttgcagggcattgtgtgaacactctaaagaacgctgtgagtctgttcttgggattgtgggcctacagtggcctgaagacacagattgcagtcaatttccagaggaaaattcagacaatcaaacctgcctgatgcctgatgaatatgtggaagaatgctcacctagtcatttcaagtgccgctcaggacagtgtgttctggcttccagaagatgtgatggccaggccgactgtgacgatgacagtgatgaggaaaactgtggttgtaaagagagagatctttgggaatgtccatccaataaacaatgtttgaagcacacagtgatctgcgatgggttcccagactgccctgattacatggacgagaaaaactgctcattttgccaagatgatgagctggaatgtgcaaaccatgcgtgtgtgtcacgtgacctgtggtgtgatggtgaagccgactgctcagacagttcagatgaatgggactgtgtgaccctctctataaatgtgaactcctcttcctttctgatggttcacagagctgccacagaacaccatgtgtgtgcagatggctggcaggagatattgagtcagctggcctgcaagcagatgggtttaggagaaccatctgtgaccaaattgatacaggaacaggagaaagagccgcggtggctgacattacactccaactgggagagcctcaatgggaccactttacatgaacttctagtaaatgggcagtcttgtgagagcagaagtaaaatttctcttctgtgtactaaacaagactgtgggcgccgccctgctgcccgaatgaacaaaaggatccttggaggtcggacgagtcgccctggaaggtggccatggcagtgttctctgcagagtgaacccagtggacatatctgtggctgtgtcctcattgccaagaagtgggttctgacagttgcccactgcttcgaggggagagagaatgctgcagtttggaaagtggtgcttggcatcaacaatctagaccatccatcagtgttcatgcagacacgctttgtgaagaccatcatcctgcatccccgctacagtcgagcagtggtggactatgacatcagcatcgttgagctgagtgaagacatcagtgagactggctacgtccggcctgtctgcttgcccaacccggagcagtggctagagcctgacacgtactgctatatcacaggctggggccacatgggcaataaaatgccatttaagctgcaagagggagaggtccgcattatttctctggaacattgtcagtcctactttgacatgaagaccatcaccactcggatgatatgtgctggctatgagtctggcacagttgattcatgcatgggtgacagcggtgggcctcttgtttgtgagaagcctggaggacggtggacattatttggattaacttcatggggctccgtctgcttttccaaagtcctggggcctggcgtttatagtaatgtgtcatatttcgtcgaatggattaaaagacagatttacatccagacctttctcctaaactaattataaggatgatcagagacttttgccagctacactaaaagaaaatggccttcttgactgtgaagagctgcctgcagagagctgtacagaagcacttttcatggacagaaatgctcaatcgtgcactgcaaatttgcatgtttgttttggactaatttttttcaatttattttttcaccttcatttttctcttatttcaagttcaatgaaagactttacaaaagcaaacaaagcagactttgtccttttgccaggcctaaccatgactgcagcacaaaattatcgactctggcgagatttaaaatcaggtgctacagtaacaggttatggaatggtctcttttatcctatcacaaaaaaagacatagatatttaggctgattaattatctctaccagtttttgtttctcaagctcagtgcatagtggtaaatttcagtgttaacattggagacttgcttttctttttctttttttataccccacaattcttttttattacacttcgaattttagggtacacgagcacaacgtgcaggttagttacatatgtatacatgtgccatgttggtgtgctgaacccagtaactcgtcatttgatttattaaaagccaagataatttacatgtttaaagtatttactattacccccttctaatgtttgcataattctgagaactgataaaagacagcaataaaagaccagtgtcatccatttaggtagcaagacatattgaatgcaaagttctttagatatcaatattaacacttgacattattggaccccccattctggatgtatatcaagatcataattttatagaagagtctctatagaactgtcctcatagctgggtttgttcaggatatatgagttggctgattgagactgcaacaactacatctatatttatgggcaatattttgttttacttatgtggcaaagaactggatattaaactttgcaaaagagaatttagatgagagatgcaattttttaaaaagaaaattaatttgcatccctcgtttaattaaatttatttttcagttttcttgcgttcatccataccaacaaagtcataaagagcatattttagagcacagtaagactttgcatggagtaaaacattttgtaattttcctcaaaagatgtttaatatctggtttcttctcattggtaattaaaattttagaaatgatttttagctctaggccactttacgcaactcaatttctgaagcaattagtggtaaaaagtatttttccccactaaaaaactttaaaacacaaatcttcatatatacttaatttaattagtcaggcatccattttgccttttaaacaactaggattccctactaacctccaccagcaacctggactgcctcagcattccaaatagatactacctgcaattttatacatgtatttttgtatcttttctgtgtgtaaacatagttgaaattcaaaaagttgtagcaatttctatactattcatctcctgtccttcagtttgtataaacctaaggagagtgtgaaatccagcaactgaattgtggtcacgattgtatgaaagttcaagaacatatgtcagttttgttacagttgtagctacatactcaatgtatcaacttttagcctgctcaacttaggctcagtgaaatatatatattatacttattttaaataattcttaatacaaataaaatggtaatggtctaatc

SEQ ID NO: 122361 - DNA, 2549 bp, Homo sapiens
  Payload ID: 3972
  Gene Symbol: CDSN
  Gene Name: corneodesmosin
  Uniprot ID: Q15517
  ENST ID: ENST00000259726
  CDS Start-End: 28-1614
atcagtcaggaggccgtgcagtccgagatgggctcgtctcgggcaccctggatggggcgtgtgggtgggcacgggatgttggcactgctgctggctggtctcctcctgccagggaccttggctaagagcattggcaccttctcagacccctgtaaggaccccacgcgtatcacctcccctaacgacccctgcctcactgggaagggtgactccagcggcttcagtagctacagtggctccagcagttctggcagctccatttccagtgccagaagctctggtggtggctccagtggtagctccagcggatccagcattgcccagggtggttctgcaggatcttttaagccaggaacggggtattcccaggtcagctactcctccggatctggctctagtctacaaggtgcatccggttcctcccagctggggagcagcagctctcactcgggaagcagcggctctcactcgggcagcagctctcattcgagcagcagcagcagctttcagttcagcagcagcagcttccaagtagggaatggctctgctctgccaaccaatgacaactcttaccgcggaatactaaacccttcccagcctggacaaagctcttcctcttcccagacctttggggtatccagcagtggccaaagcgtcagctccaaccagcgtccctgtagttcggacatccccgactctccctgcagtggagggcccatcgtctcgcactccggcccctacatccccagctcccactctgtgtcagggggtcagaggcctgtggtggtggtggtggaccagcacggttctggtgcccctggagtggttcaaggtcccccctgtagcaatggtggccttccaggcaagccctgtcccccaatcacctctgtagacaaatcctatggtggctacgaggtggtgggtggctcctctgacagttatctggttccaggcatgacctacagtaagggtaaaatctaccctgtgggctacttcaccaaagagaaccctgtgaaaggctctccaggggtcccttcctttgcagctgggccccccatctctgagggcaaatacttctccagcaaccccatcatccccagccagtcggcagcttcctcggccattgcattccagccagtggggactggtggggtccagctctgtggaggcggctccacgggctccaagggaccctgctctccctccagttctcgagtccccagcagttctagcatttccagcagctccggtttaccctaccatccctgcggcagtgcttcccagagcccctgctccccaccaggcaccggctccttcagcagcagctccagttcccaatccagtggcaaaatcatccttcagccttgcggcagcaagtccagctcttctggtcacccttgcatgtctgtctcctccttgacactgactgggggccccgatggctctccccatcctgatccctccgctggtgccaagccctgtggctccagcagtgctggaaagatcccctgccgctccatccgggatatcctagcccaagtgaagcctctggggccccagctagctgaccctgaagttttcctaccccaaggagagttactcgacagtccataagaagtcaactgttgtgtgtgtgcatgccttgggcacaaacaagcacatacactatatcccatatgggagaagtccagtgcccaggcatagggttagctcagtttccctccttcccaaaagagtggttctgctttctccactaccccaaggttgcagactctctcttatcaccccttcctccttcctcttctcaaaatggtagattcaaagctcctctcttgattctctcctactgtttaaattcccattccaccacagtgcccctcagccagatcaccaccccttacaattccctctactgtgtggaaatggtccattgagtaacacccccatcagcttctcaactgggaaacccctgaaatgctctcagagcacctctgacgcctgaagaagttataccttcctcttcccctttaccaaataaagcaaagtcaaaccatcatctggaaacagtggccacttttcactgacctttcttcgacatctagtcaacccacccaatatgccactgggctctcgctcccaattccaccccaccctccattacagagctcaccacgccctcctagatcaccgtccccaacacacccattgcctctcaaggcccttatctcagccccttcctgtggccacttccctcagtgctcagatgattccctgggtgagggagacactggggcaccctcagaggttggagcaggctccctgctgtccctggatcctggacagatggctcagtaaactgtggggactaggtgcagactttttgccttcttggagtcctgggtctcctctgagagtctgggtggtgctcctcctacgcctctagaggtctctgtgttcctcattttccttcaaaagcgggctgtatttctcttctaccttccagctcctcccacagaggaggaagacaataaatatttgttgaactgaaa

SEQ ID NO: 122362 - DNA, 2552 bp, Homo sapiens
  Payload ID: 3972
  Gene Symbol: CDSN
  Gene Name: corneodesmosin
  ENST ID: ENST00000376288
  CDS Start-End: 28-1617
atcagtcaggaggccgtgcagtccgagatgggctcgtctcgggcaccctggatggggcgtgtgggtgggcacgggatgatggcactgctgctggctggtctcctcctgccagggaccttggctaagagcattggcaccttctcagacccttgtaaggaccccacgcgtatcacctcccctaacgacccctgcctcactgggaagggtgactccagcggtttcagtagctacagtggctccagcagttctggcagctccatttccagtgccagaagctctggtggtggctccagtggtagctccagcggatccagcattgcccagggtggttctgcaggatcttttaagccaggaacggggtattcccaggtcagctactcctccggatctggctctagtctacaaggtgcatccggttcctcccagctggggagcagcagctctcactcgggaaacagcggctctcactcgggaagcagcagctctcattcgagcagcagcagcagctttcagttcagcagcagcagcttccaagtagggaatggctctgctctgccaaccaatgacaactcttaccgcggaatactaaacccttcccagcctggacaaagctcttcctcttcccagacctttggggtatccagcagtggccaaagcgtcagctccaaccagcgtccctgtagttcggacatccccgactctccctgcagtggagggcccatcgtctcgcactccggcccctacatccccagctcccactctgtgtcagggggtcagaggcctgtggtggtggtggtggaccagcacggttctggtgcccctggagtggttcaaggtcccccctgtagcaatggtggccttccaggcaagccctgtcccccaatcacctctgtagacaaatcctatggtggctacgaggtggtgggtggctcctctgacagttatctggttccaggcatgacctacagtaagggtaaaatctaccctgtgggctacttcaccaaagagaaccctgtgaaaggctctccaggggtcccttcctttgcagctgggccccccatctctgagggcaaatacttctccagcaaccccatcatccccagccagtcggcagcttcctcggccattgcattccagccagtggggactggtggggtccagctctgtggaggcggctccacgggctccaagggaccctgctctccctccagttctcgagtccccagcagttctagcatttccagcagctccggtttaccctaccatccctgcggcagtgcttcccagagcccctgctccccaccaggcaccggctccttcagcagcagctccagttcccaatccagtggcaaaatcatccttcagccttgtggcagcaagtccagctcttctggtcacccttgcatgtctgtctcctccttgacactgactgggggccccgatggctctccccatcctgatccctccgctggtgccaagccctgtggctccagcagtgctggaaagatcccctgccgctccatccgggatatcctagcccaagtgaagcctctggggccccagctagctgaccctgaagttttcctaccccaaggagagttactcaacagtccataagaagtcaactgttgtgtgtgtgcatgccttgggcacaaacaagcacatacactatatcccatatgggagaagtccagtgcccaggcatagggttagctcagtttccctccttcccaaaagagtggttctgctttctccactaccccaaggttgcagactctctcttatcaccccttcctccttcctcttctcaaaatggtagattcaaagctcctctcttgattctctcctactgtttaaattcccattccaccacagtgcccctcagccagatcaccaccccttacaattccctctactgtgtggaaatggtccattgagtaacacccccatcagcttctcaactgggaaacccctgaaatgctctcagagcacctctgacgcctgaagaagttataccttcctcttcccctttaccaaataaagcaaagtcaaaccatcatctggaaacagtggccacttttcactgacctttcttcgacatctagtcaacccacccaatatgccactgggctctcgctcccaattccaccccaccctccattacagagctcaccacgccctcctagatcaccgtccccaacacacccattgcctctcaaggcccttatctcagccccttcctgtggccacttccctcagtgctcagatgattccctgggtgagggagacactggggcaccctcagaggttgaagcaggctccctgctgtccctggatcctggacagatggctcagtaaactgtggggactaggtgcagactttttgccttcttggagtcctgggtctcctctgagagtctgggtggtgctcttcctacgcctctagaggtctctgtgttcctcattttccttcaaaagcgggctgtgtttctcttctaccttccagctgctcccacagaggaggaagacaataaatatttgttgaactgaaa

SEQ ID NO: 122363 - DNA, 2549 bp, Homo sapiens
  Payload ID: 3972
  Gene Symbol: CDSN
  Gene Name: corneodesmosin
  ENST ID: ENST00000383531
  CDS Start-End: 28-1617
atcagtcaggaggccgtgcagtccgagatgggctcgtctcgggcaccctggatggggcgtgtgggtgggcacgggatgatggcactgctgctggctggtctcctcctgccagggaccttggctaagagcattggcaccttctcagacccctgtaaggaccccacgcgtatcacctcccctaacgacccctgcctcactgggaagggtgactccagcggcttcagtagctacagtggctccagcagttctggcagctccatttccagtgccagaagctctggtggtggctccagtggtagctccagcggatccagcattgcccagggtggttctgcaggatcttttaagccaggaacggggtattcccaggtcagctactcctccggatctggctctagtctacaaggtgcatccggttcctcccagctggggagcagcagctctcactcgggaagcagcggctctcactcgggaagcagcagctctcattcgagcagcagcagcagctttcagttcagcagcagcagcttccaagtagggaatggctctgctctgccaaccaatgacaactcttaccgcggaatactaaacccttcccagcctggacaaagctcttcctcttcccaaacctttggggtatccagcagtggccaaagcgtcagctccaaccagcgtccctgtagttcggacatccccgactctccctgcagtggagggcccatcgtctcgcactctggcccctacatccccagctcccactctgtgtcagggggtcagagacctgtggtggtggtggtggaccagcacggttctggtgcccctggagtggttcaaggtcccccctgtagcaatggtggccttccaggcaagccctgtcccccaatcacctctgtagacaaatcctatggtggctacgaggtggtgggtggctcctctgacagttatctggttccaggcatgacctacagtaagggtaaaatctaccctgtgggctacttcaccaaagagaaccctgtgaaaggctctccaggggtcccttcctttgcagctgggccccccatctctgagggcaaatacttctccagcaaccccatcatccccagccagtcggcagcttcctcggccattgcgttccagccagtggggactggtggggtccagctctgtggaggcggctccacgggctccaagggaccctgctctccctccagttctcgagtccccagcagttctagcatttccagcagcgccggttcaccctaccatccctgcggcagtgcttcccagagcccctgctccccaccaggcaccggctccttcagcagcagctccagttcccaatcgagtggcaaaatcatccttcagccttgtggcagcaagtccagctcttctggtcacccttgcatgtctgtctcctccttgacactgactgggggccccgatggctctccccatcctgatccctccgctggtgccaagccctgtggctccagcagtgctggaaagatcccctgccgctccatccgggatatcctagcccaagtgaagcctctggggccccagctagctgaccctgaagttttcctaccccaaggagagttactcgacagtccataagtcaactgttgtgtgtgtgcatgccttgggcacaaacaagcacatacactatatcccatatgggagaagtccagtgcccaggcatagggttagctcagtttccctccttcccaaaagagtggttctgctttctctactaccctaaggttgcagactctctcttatcaccccttcctccttcctcttctcaaaatggtagattcaaagctcctctcttgattctctcctactgtttaaattcccattccaccacagtgcccctcagccagatcaccaccccttacaattccctctactgtgttgaaatggtccattgagtaacacccccatcaccttctcaactgggaaacccctgaaatgctctcagagcacctctgacgcctgaagaagttataccttcctcttcccctttaccaaataaagcaaagtcaaaccatcatctggaaacagtggccacttttcactgacctctcttcgacatctagtcaacccacccaatatgccactgggctttcgctcccaattccaccccaccctccattacagagctcaccacgccctcctagatcaccgtccccaacacacccattgcctctcaaggcccttatctcagccccttcctgtggccatttccctcagtgcccagatgattccctgggtgagggagacactggggcaccctcagaggttggagcaggctccctgctgtccctggatcctggacagatggctcagtaaactgtggggactaggtgcagactttttgccttcttggaatcctgggtctcctctgagagtctgggtggtgctcttcctacgcctctagaggtctctgtgtccctcattttccttcaaaagcgggctgtgtttctcttctaccttccagctcctcccacagaggaggaagacaataaatatttgttgaactgaaa

SEQ ID NO: 122364 - DNA, 2503 bp, Homo sapiens
  Payload ID: 3972
  Gene Symbol: CDSN
  Gene Name: corneodesmosin
  Uniprot ID: Q15517
  ENST ID: ENST00000445893
  CDS Start-End: 28-1617
atcagtcaggaggccgtgcagcccgagatgggctcgtctcgggcaccctggatggggcgtgtgggtgggcacgggatgatggcactgctgctggctggtctcctcctgccagggaccttggctaagagcattggcaccttctcagacccctgtaaggaccccacgcgtatcacctcccctaacgacccctgcctcactgggaagggtgactccagcggcttcagtagctacagtggctccagcagttctggcagctccatttccagtgccagaagctctggtggtggctccagtggtagctccagcggatccagcattgcccagggtggttctgcaggatcttttaagccaggaacggggtattcccaggtcagctactcctccggatctggctctagtctacaaggtgcatccggttcctcccagctggggagcagcagctctcactcgggaagcagcggctctcactcgggaagcagcagctctcattcgagcagcagcagcagctttcagttcagcagcagcagcttccaagtagggaatggctctgctctgccaaccaatgacaactcttaccgcggaatactaaacccttcccagcctggacaaagctcttcctcttcccaaacctctggggtatccagcagtggccaaagcgtcagctccaaccagcgtccctgtagttcggacatccccgactctccctgcagtggagggcccatcgtctcgcactctggcccctacatccccagctcccactctgtgtcagggggtcagaggcctgtggtggtggtggtggaccagcacggttctggtgcccctggagtggttcaaggtcccccctgtagcaatggtggccttccaggcaagccctgtcccccaatcacctctgtagacaaatcctatggtggctacgaggtggtgggtggctcctctgacagttatctggttccaggcatgacctacagtaagggtaaaatctatcctgtgggctacttcaccaaagagaaccctgtgaaaggctctccaggggtcccttcctttgcagctgggccccccatctctgagggcaaatacttctccagcaaccccatcatccccagccagtcggcagcttcctcggccattgcgttccagccagtggggactggtggggtccagctctgtggaggcggctccacgggctccaagggaccctgctctccctccagttctcgagtccccagcagttctagcatttccagcagctccggttcaccctaccatccctgcggcagtgcttcccagagcccctgctccccaccaggcaccggctccttcagcagcagctccagttcccaatcgagtggcaaaatcatccttcagccttgtggcagcaagtccagctcttctggtcacccttgcatgtctgtctcctccttgacactgactgggggccccgatggctctccccatcctgatccctccgctggtgccaagccctgtggctccagcagtgctggaaagatcccctgccgctccatccgggatatcctagcccaagtgaagcctctggggccccagctagctgaccctgaagttttcctaccccaaggagagttactcgacagtccataagtcaactgttgtgtgtgtgcatgccttgggcacaaacaagcacatacactatatcccatatgggagaaggccagtgcccaggcatagggttagctcagtttccctccttcccaaaagagtggttctgctttctctactaccctaaggttgcagactctctcttatcaccccttcctccttcctcttctcaaaatggtagattcaaagctcctctcttgattctctcctactgtttaaattcccattccaccacagtgcccctcagccagatcaccaccccttacaattccctctactgtgttgaaatggtccattgagtaacacccccatcaccttctcaactgggaaacccctgaaatgctctcagagcacctctgacgcctgaagaagttataccttcctcttcccctttaccaaataaagcaaagtcaaaccatcatctggaaacagtggccacttttcactgacctctcttcgacatctagtcaacccacccaatatgccactgggctttcgctcccaattccaccccaccctccattacagagctcaccacgccctcctagatcaccgtccccaacacacccattgcctctcaaggcccttatctcagccccttcctgtggccatttccctcagtgcccagatgattccctgggtgagggagacactggggcaccctcagaggttggagcaggctccctgctgtccctggatcctggacagatggctcagtaaactgtggggactaggtgcagactttttgccttcttggagtcctgggtctcctctgagagtctgggtggtgctcttcctacgcctctagaggtctctgtgtccctcattttccttcaaaagcgggctgtgtttctcttctaccttccag

SEQ ID NO: 122365 - DNA, 2536 bp, Homo sapiens
  Payload ID: 3972
  Gene Symbol: CDSN
  Gene Name: corneodesmosin
  Uniprot ID: Q15517
  ENST ID: ENST00000418599
  CDS Start-End: 15-1604
ccgtgcagcccgagatgggctcgtctcgggcaccctggatggggcgtgtgggtgggcacgggatgatggcactgctgctggctggtctcctcctgccagggaccttggctaagagcattggcaccttctcagacccctgtaaggaccccacgcgtatcacctcccctaacgacccctgcctcactgggaagggtgactccagcggcttcagtagctacagtggctccagcagttctggcagctccatttccagtgccagaagctctggtggtggctccagtggtagctccagcggatccagcattgcccagggtggttctgcaggatcttttaagccaggaacggggtattcccaggtcagctactcctccggatctggctctagtctacaaggtgcatccggttcctcccagctggggagcagcagctctcactcgggaagcagcggctctcactcgggaagcagcagctctcattcgagcagcagcagcagctttcagttcagcagcagcagcttccaagtagggaatggctctgctctgccaaccaatgacaactcttaccgcggaatactaaacccttcccagcctggacaaagctcttcctcttcccaaacctttggggtatccagcagtggccaaagcgtcagctccaaccagcgtccctgtagttcggacatccccgactctccctgcagtggagggcccatcgtctcgcactctggcccctacatccccagctcccactctgtgtcagggggtcagaggcctgtggtggtggtggtggaccagcacggttctggtgcccctggagtggttcaaggtcccccctgtagcaatggtggccttccaggcaagccctgtcccccaatcacctctgtagacaaatcctatggtggctacgaggtggtgggtggctcctctgacagttatctggttccaggcatgacctacagtaagggtaaaatctatcctgtgggctacttcaccaaagagaaccctgtgaaaggctctccaggggtcccttcctttgcagctgggccccccatctctgagggcaaatacttctccagcaaccccatcatccccagccagtcggcagcttcctcggccattgcgttccagccagtggggactggtggggtccagctctgtggaggcggctccacgggctccaagggaccctgctctccctccagttctcgagtccccagcagttctagcatttccagcagctccggttcaccctaccatccctgcggcagtgcttcccagagcccctgctccccaccaggcaccggctccttcagcagcagctccagttcccaatcgagtggcaaaatcatccttcagccttgtggcagcaagtccagctcttctggtcacccttgcatgtctgtctcctccttgacactgactgggggccccgatggctctccccatcctgatccctccgctggtgccaagccctgtggctccagcagtgctggaaagatcccctgccgctccatccgggatatcctagcccaagtgaagcctctggggccccagctagctgaccctgaagttttcctaccccaaggagagttactcgacagtccataagtcaactgttgtgtgtgtgcatgccttgggcacaaacaagcacatacactatatcccatatgggagaaggccagtgcccaggcatagggttagctcagtttccctccttcccaaaagagtggttctgctttctctactaccctaaggttgcagactctctcttatcaccccttcctccttcctcttctcaaaatggtagattcaaagctcctctcttgattctctcctactgtttaaattcccattccaccacagtgcccctcagccagatcaccaccccttacaattccctctactgtgttgaaatggtccattgagtaacacccccatcaccttctcaactgggaaacccctgaaatgctctcagagcacctctgacgcctgaagaagttataccttcctcttcccctttaccaaataaagcaaagtcaaaccatcatctggaaacagtggccacttttcactgacctctcttcgacatctagtcaacccacccaatatgccactgggctttcgctcccaattccaccccaccctccattacagagctcaccacgccctcctagatcaccgtccccaacacacccattgcctctcaaggcccttatctcagccccttcctgtggccatttccctcagtgcccagatgattccctgggtgagggagacactggggcaccctcagaggttggagcaggctccctgctgtccctggatcctggacagatggctcagtaaactgtggggactaggtgcagactttttgccttcttggagtcctgggtctcctctgagagtctgggtggtgctcttcctacgcctctagaggtctctgtgtccctcattttccttcaaaagcgggctgtgtttctcttctaccttccagctcctcccacagaggaggaagacaataaatatttgttgaactgaaa

SEQ ID NO: 122366 - DNA, 2549 bp, Homo sapiens
  Payload ID: 3972
  Gene Symbol: CDSN
  Gene Name: corneodesmosin
  Uniprot ID: Q15517
  ENST ID: ENST00000457875
  CDS Start-End: 28-1617
atcagtcaggaggccgtgcagcccgagatgggctcgtctcgggcaccctggatggggcgtgtgggtgggcacgggatgatggcactgctgctggctggtctcctcctgccagggaccttggctaagagcattggcaccttctcagacccctgtaaggaccccacgcgtatcacctcccctaacgacccctgcctcactgggaagggtgactccagcggcttcagtagctacagtggctccagcagttctggcagctccatttccagtgccagaagctctggtggtggctccagtggtagctccagcggatccagcattgcccagggtggttctgcaggatcttttaagccaggaacggggtattcccaggtcagctactcctccggatctggctctagtctacaaggtgcatccggttcctcccagctggggagcagcagctctcactcgggaagcagcggctctcactcgggaagcagcagctctcattcgagcagcagcagcagctttcagttcagcagcagcagcttccaagtagggaatggctctgctctgccaaccaatgacaactcttaccgcggaatactaaacccttcccagcctggacaaagctcttcctcttcccaaacctctggggtatccagcagtggccaaagcgtcagctccaaccagcgtccctgtagttcggacatccccgactctccctgcagtggagggcccatcgtctcgcactctggcccctacatccccagctcccactctgtgtcagggggtcagaggcctgtggtggtggtggtggaccagcacggttctggtgcccctggagtggttcaaggtcccccctgtagcaatggtggccttccaggcaagccctgtcccccaatcacctctgtagacaaatcctatggtggctacgaggtggtgggtggctcctctgacagttatctggttccaggcatgacctacagtaagggtaaaatctatcctgtgggctacttcaccaaagagaaccctgtgaaaggctctccaggggtcccttcctttgcagctgggccccccatctctgagggcaaatacttctccagcaaccccatcatccccagccagtcggcagcttcctcggccattgcgttccagccagtggggactggtggggtccagctctgtggaggcggctccacgggctccaagggaccctgctctccctccagttctcgagtccccagcagttctagcatttccagcagctccggttcaccctaccatccctgcggcagtgcttcccagagcccctgctccccaccaggcaccggctccttcagcagcagctccagttcccaatcgagtggcaaaatcatccttcagccttgtggcagcaagtccagctcttctggtcacccttgcatgtctgtctcctccttgacactgactgggggccccgatggctctccccatcctgatccctccgctggtgccaagccctgtggctccagcagtgctggaaagatcccctgccgctccatccgggatatcctagcccaagtgaagcctctggggccccagctagctgaccctgaagttttcctaccccaaggagagttactcgacagtccataagtcaactgttgtgtgtgtgcatgccttgggcacaaacaagcacatacactatatcccatatgggagaaggccagtgcccaggcatagggttagctcagtttccctccttcccaaaagagtggttctgctttctctactaccctaaggttgcagactctctcttatcaccccttcctccttcctcttctcaaaatggtagattcaaagctcctctcttgattctctcctactgtttaaattcccattccaccacagtgcccctcagccagatcaccaccccttacaattccctctactgtgttgaaatggtccattgagtaacacccccatcaccttctcaactgggaaacccctgaaatgctctcagagcacctctgacgcctgaagaagttataccttcctcttcccctttaccaaataaagcaaagtcaaaccatcatctggaaacagtggccacttttcactgacctctcttcgacatctagtcaacccacccaatatgccactgggctttcgctcccaattccaccccaccctccattacagagctcaccacgccctcctagatcaccgtccccaacacacccattgcctctcaaggcccttatctcagccccttcctgtggccatttccctcagtgcccagatgattccctgggtgagggagacactggggcaccctcagaggttggagcaggctccctgctgtccctggatcctggacagatggctcagtaaactgtggggactaggtgcagactttttgccttcttggagtcctgggtctcctctgagagtctgggtggtgctcttcctacgcctctagaggtctctgtgtccctcattttccttcaaaagcgggctgtgtttctcttctaccttccagctcctcccacagaggaggaagacaataaatatttgttgaactgaaa

SEQ ID NO: 122367 - DNA, 4793 bp, Homo sapiens
  Payload ID: 3973
  Gene Symbol: CNIH1
  Gene Name: cornichon family AMPA receptor auxiliary protein 1
  Uniprot ID: O95406
  ENST ID: ENST00000216416
  CDS Start-End: 105-539
cggtcgcggctgtggccgggggaagtgaatggttttacccagagggccctgcgccgcctttctccgctggcaacggcgccgctccccgctcctcctccccagccatggcgttcacgttcgcggccttctgctacatgctggcgctgctgctcactgccgcgctcatcttcttcgccatttggcacattatagcatttgatgagctgaagactgattacaagaatcctatagaccagtgtaataccctgaatccccttgtactcccagagtacctcatccacgctttcttctgtgtcatgtttctttgtgcagcagagtggcttacactgggtctcaatatgcccctcttggcatatcatatttggaggtatatgagtagaccagtgatgagtggcccaggactctatgaccctacaaccatcatgaatgcagatattctagcatattgtcagaaggaaggatggtgcaaattagctttttatcttctagcatttttttactacctatatggcatgatctatgttttggtgagctcttagaacaacacacagaagaattggtccagttaagtgcatgcaaaaagccaccaaatgaagggattctatccagcaagatcctgtccaagagtagcctgtggaatctgatcagttactttaaaaaatgactccttattttttaaatgtttccacatttttgcttgtggaaagactgttttcatatgttatactcagataaagattttaaatggtattacgtataaattaatataaaatgattacctctggtgttgacaggtttgaacttgcacttcttaaggaacagccataatcctctgaatgatgcattaattactgactgtcctagtacattggaagcttttgtttataggaacttgtagggctcattttggtttcattgaaacagtatctaattataaattagctgtagatatcaggtgcttctgatgaagtgaaaatgtatatctgactagtgggaaacttcatgggtttcctcatctgtcatgtcgatgattatatatggatacatttacaaaaataaaaagcgggaattttcccttcgcttgaatattatccctgtatattgcatgaatgagagatttcccatatttccatcagagtaataaatatacttgctttaattcttaagcataagtaaacatgatataaaaatatatgctgaattacttgtgaagaatgcatttaaagctattttaaatgtgtttttatttgtaagacattacttattaagaaattggttattatgcttactgttctaatctggtggtaaaggtattcttaagaatttgcaggtactacagattttcaaaactgaatgagagaaaattgtataaccatcctgctgttcctttagtgcaatacaataaaactctgaaattaagactcactttcagtgcattgtttgagattaaaaatagtatttcttaaacttgcttaatccatgataaagacatgttgctgtcatttttaaaaagtgacgtactacattatgggttttctgaaaaataccatgcctagatctaaaaaggaaaatttttaaatgccgagcacattaacctcttttgtcatttgacaagattcataaacgtggatggcatagcatcatcatttctcttaccaattaagaaaaattatggtggcacttaaaatattttactttgatttttcctttttggaacagtcagttttaaggtaaaatggcttgtaaatttgagtttttgctgctgcttgtaaggcaggtaaattatggcttgcatgttttcataagcataaataaatcttgtgctttatttgggatgaggaagttaaggcagttgaaaataaaataagtggtttggaagtttcttgagaagaggatcaaaagaaagagaaccaatatatagaaatttcacatgatcaaggaagtttatggatgcgtttgtggaaatcttactctatgaacttgttggattagatgctgttttattctctactaagtgaaaagtgctttatttcagtgctttcccatggttgggagagagtagctgttaactattctgggtaatgggggtgagtatgttgaggaagagatttagaaccagaagagtgaagagactcaaactgttccataacaaggaaagctttaaagaccttgtatttcacagtctggagaactagagggatctgactcttggtcagttcatgtaacaaattatttattgagtacttgctgggctctcaagattcatgctttgagcacaggcagtcattcagtttccagtccacctgattacatcagcatgcacttagttttctttcttgttcacaaggacttttgatcatgcaagacctggccaagtcttctataatccagatgggtttcctggggctgttacttgagtattcctgtcaaaatattttcgtgaaccctgcctctcttagcaaacactacttcataagtgttaacaaacatccttttaataatctattccagaatattctccaggagtaagtttactggttgggatttgtggaagccattttctcatgtttcccaaataagatatgtagtcttcagctgattcctcaaagatgattgacagggagtttcacccatctttgtggtagtttgtgagttcctaggcatgtaagtgattaaaagattgagtacctgctctcctaatatctacccacttttaccatgtcagtgttttatgaattagatcacttaccaagagaaagcagaaacgaaatacttgaatctgacaatatccgactggctcttttcattgctctggatttattttccacatcaatctctttggggtggccctagcctattattcctgtgggttcagctgaggcatggttagcctgggtttataattcagtttacgttaaacattccctgtgcagcaacagctgttcatttaggtactctttttttttttctccttattacagttacttttggtattatgtgctttatctttaaaagctttctagctctaggaaattgttttccctgtttgtgtctattttattgcatcttgtgtaacactgtggttatatctataccaacaactttttgttgctatggataccacagattgtcctgaattaaaaccctaacataataaatgtctgtttagccgttactttactgagtaataatactatattgtggcagtatggccctttaatactaaggaggtatggtgtagaaattatttgaacactcatatccaaatgttattaatgatgtttgacagttttctcaatgcttaatgatattcctcactcctcattccagggtagaggagggtttggtcccaggctatggacaaactgctaatttgtttgaagtttgaattatttttcatgggaaagggaagtgataggaaatgaccaagaccatccacttttgacttgagtatggatcgagtataagtaatagtttcctagcctcactgattgtaccatgaactgacagacctaccagtcaaattcatgtacccagataatggtctctcacatggcaacaaagtacacagcagtttgcagtatgtgtctcttttaaagccagttcagtgttttcaccttgacgaccactcctgcaaacagttctcatagagctcttctctgctccccaaatcaatatattttgaagctatgtcaaatatttacatagaaaggaaataaagttgtatgtgctttgaaaccagcaaaatcctttgtacaacacctctcttctccttctatgtttatgaatagagttcgtggaatattgccatagtgcaaataatgacttccgtgtatcacttataccctgtaggggtgagctttcaccttaggtgtggttatatcctagcagtgtatcaagcccactcaaataatggtctatatttaaaagtatgtgtctagtttacttatttatgtcatttaacatccataaatgtacatctctcagttgtatatcatgattgtaaatcagaaattttgatggcaaaaatattctaaaacaacattcttcaggggaaagaaaaacatggataccttatctagcattgctcataaaagtactcatgttcatcctttttggaaactattaatcatgctagccttagatcattttaagctcctttgctcaaaccaatcattgatgtgcagtatgaccagcagctagtaagtctgtggtgctaccagtatagcttggaagatggttctgaattaatacctcagaatgatatcaaaagtaaaagagtggttctattgctaaatatattgactagctttcttataacaattttactttgaaattcaaagttccaaagctaaatgtctaaaagaagtaactgcagcttgttctgctgattttggaaaatagtattaaccatgtaagatctttggggttggagtgaaggtcttatctgcattaattttgttaatgcacattgtagatgtggagaacatcttgacctgcataaggattgcgtctcattttattgtgtagtgctttttcgaaatatttacatttctttggttcccatgttcatgtattctggagaagtaaaatttcttgattactgggcagaccctaaaactactaagagaaacataacatgtagttagctgtctgctcatggtttgttcaaatctaagctaaccttaatggtgctgtgtccgctgtccacagaaaacgcccttaagtagccctaccttactccttagagcttattttgcttttgtatttaataaaagctgtcttaaatgttt

SEQ ID NO: 122368 - DNA, 1233 bp, Homo sapiens
  Payload ID: 3973
  Gene Symbol: CNIH1
  Gene Name: cornichon family AMPA receptor auxiliary protein 1
  ENST ID: ENST00000395573
  CDS Start-End: 65-355
agagggccctgcgccgcctttctccgctggcaacggcgccgctccccgctcctcctccccagccatggcgttcacgttcgcggccttctgctacatgctggcgctgctgctcactgccgcgctcatcttcttcgccatttggcacattatagcatttgatgagctgaagactgattacaagaatcctatagaccagtgtaataccctgaatccccttgtactcccagagtacctcatccacgctttcttctgtgtcatgtttctttgtgcagcagagtggcttacactgggtctcaatatgcccctcttggcatatcatatttggagcatgatctatgttttggtgagctcttagaacaacacacagaagaattggtccagttaagtgcatgcaaaaagccaccaaatgaagggattctatccagcaagatcctgtccaagagtagcctgtggaatctgatcagttactttaaaaaatgactccttattttttaaatgtttccacatttttgcttgtggaaagactgttttcatatgttatactcagataaagattttaaatggtattacgtataaattaatataaaatgattacctctggtgttgacaggtttgaacttgcacttcttaaggaacagccataatcctctgaatgatgcattaattactgactgtcctagtacattggaagcttttgtttataggaacttgtagggctcattttggtttcattgaaacagtatctaattataaattagctgtagatatcaggtgcttctgatgaagtgaaaatgtatatctgactagtgggaaacttcatgggtttcctcatctgtcatgtcgatgattatatatggatacatttacaaaaataaaaagcgggaattttcccttcgcttgaatattatccctgtatattgcatgaatgagagatttcccatatttccatcagagtaataaatatacttgctttaattcttaagcataagtaaacatgatataaaaatatatgctgaattacttgtgaagaatgcatttaaagctattttaaatgtgtttttatttgtaagacattacttattaagaaattggttattatgcttactgttctaatctggtggtaaaggtattcttaagaatttgcaggtactacagattttcaaaactgaatgagagaaaattgtataaccatcctgctgttcctttagtgcaatacaataaaactctgaaatt

SEQ ID NO: 122369 - DNA, 523 bp, Homo sapiens
  Payload ID: 3973
  Gene Symbol: CNIH1
  Gene Name: cornichon family AMPA receptor auxiliary protein 1
  ENST ID: ENST00000556113
  CDS Start-End: 14-424
ctcctccccagccatggcgttcacgttcgcggccttctgctacatgctggcgctgctgctcactgccgcgctcatcttcttcgccatttggcacattatagcatttgatgagctgaagactgattacaagaatcctatagaccagtgtaataccctgaatccccttgtactcccagagtacctcatccacgctttcttctgtgtcatgtttctttgtgcagcagagtggcttacactgggtctcaatatgcccctcttggcatatcatatttggaggtatatgagtagaccagtgatgagtggcccaggactctatgaccctacaaccatcatgaatgcagatattctagcatattgtcagaaggaaggatggtgcaaattagctttttatcttctagcatttttttactacctatatgggtaagttgaaaaggtaaaatgaaatatgctttcactttgctgctttaaaagtttgcaggcattatggttttcacacctcaaaatccatttgaagaataactta

SEQ ID NO: 122370 - DNA, 856 bp, Homo sapiens
  Payload ID: 3973
  Gene Symbol: CNIH1
  Gene Name: cornichon family AMPA receptor auxiliary protein 1
  ENST ID: ENST00000557659
  CDS Start-End: 50-211
gcctttctccgctggcaacggcgccgctccccgctcctcctccccagccatggcgttcacgttcgcggccttctgctacatgctggcgctgctgctcactgccgcgctcatcttcttcgccatttggcacattatagcatttgatgagctgaagactgattacaagaatcctatagaccagtgtaataccctgaatcccgtatatgagtagaccagtgatgagtggcccaggactctatgaccctacaaccatcatgaatgcagatattctagcatattgtcagaaggaaggatggtgcaaattagctttttatcttctagcatttttttactacctatatggcatgatctatgttttggtgagctcttagaacaacacacagaagaattggtccagttaagtgcatgcaaaaagccaccaaatgaagggattctatccagcaagatcctgtccaagagtagcctgtggaatctgatcagttactttaaaaaatgactccttattttttaaatgtttccacatttttgcttgtggaaagactgttttcatatgttatactcagataaagattttaaatggtattacgtataaattaatataaaatgattacctctggtgttgacaggtttgaacttgcacttcttaaggaacagccataatcctctgaatgatgcattaattactgactgtcctagtacattggaagcttttgtttataggaacttgtagggctcattttggtttcattgaaacagtatctaattataaattagctgtagatatcaggtgcttctgatgaagtgaaaatgtatatctgactagtgggaaacttcatgggtttcctcatctgtcatg

SEQ ID NO: 122371 - DNA, 838 bp, Homo sapiens
  Payload ID: 3973
  Gene Symbol: CNIH1
  Gene Name: cornichon family AMPA receptor auxiliary protein 1
  ENST ID: ENST00000557690
  CDS Start-End: 65-547
agagggccctgcgccgcctttctccgctggcaacggcgccgctccccgctcctcctccccagccatggcgttcacgttcgcggccttctgctacatgctggcgctgctgctcactgccgcgctcatcttcttcgccatttggcacattatagcatttgatgagctgaagactgattacaagaatcctatagaccagtgtaataccctgaatcccacagttgaaaaggtcaaaaagattaaaagagtcaaaattgcattaaagcttgtactcccagagtacctcatccacgctttcttctgtgtcatgtttctttgtgcagcagagtggcttacactgggtctcaatatgcccctcttggcatatcatatttggaggtatatgagtagaccagtgatgagtggcccaggactctatgaccctacaaccatcatgaatgcagatattctagcatattgtcagaaggaaggatggtgcaaattagctttttatcttctagcatttttttactacctatatggcatgatctatgttttggtgagctcttagaacaacacacagaagaattggtccagttaagtgcatgcaaaaagccaccaaatgaagggattctatccagcaagatcctgtccaagagtagcctgtggaatctgatcagttactttaaaaaatgactccttattttttaaatgtttccacatttttgcttgtggaaagactgttttcatatgttatactcagataaagattttaaatggtattacgtataaattaatataaaatgattacctctggtgttgacaggtttgaacttgcacttcttaaggaacagccataatc

SEQ ID NO: 122372 - DNA, 785 bp, Homo sapiens
  Payload ID: 3973
  Gene Symbol: CNIH1
  Gene Name: cornichon family AMPA receptor auxiliary protein 1
  ENST ID: ENST00000553660
  CDS Start-End: 31-396
ggcgccgctccccgctcctcctccccagccatggcgttcacgttcgcggccttctgctacatgctggcgctgctgctcactgccgcgctcatcttcttcgccatttggcaccttgtactcccagagtacctcatccacgctttcttctgtgtcatgtttctttgtgcagcagagtggcttacactgggtctcaatatgcccctcttggcatatcatatttggaggtatatgagtagaccagtgatgagtggcccaggactctatgaccctacaaccatcatgaatgcagatattctagcatattgtcagaaggaaggatggtgcaaattagctttttatcttctagcatttttttactacctatatggcatgatctatgttttggtgagctcttagaacaacacacagaagaattggtccagttaagtgcatgcaaaaagccaccaaatgaagggattctatccagcaagatcctgtccaagagtagcctgtggaatctgatcagttactttaaaaaatgactccttattttttaaatgtttccacatttttgcttgtggaaagactgttttcatatgttatactcagataaagattttaaatggtattacgtataaattaatataaaatgattacctctggtgttgacaggtttgaacttgcacttcttaaggaacagccataatcctctgaatgatgcattaattactgactgtcctagtacattggaagcttttgtttataggaacttgtagggctcattttggtttcattgaaacagtatc

SEQ ID NO: 122373 - DNA, 787 bp, Homo sapiens
  Payload ID: 3973
  Gene Symbol: CNIH1
  Gene Name: cornichon family AMPA receptor auxiliary protein 1
  ENST ID: ENST00000554683
  CDS Start-End: 18-119
gctcctcctccccagccatggcgttcacgttcgcggccttctgctacatgctggcgctgctgctcactgccgcgctcatcttcttcgccatttggcacgataaagaggaatttggataaacagttgaaattatttttctactcagaagattatttcgagtagagataagttgaaataacttgagcagaggcattgacgaaattgaaaattgaagattatagcatttgatgagctgaagactgattacaagaatcctatagaccagtgtaataccctgaatccccttgtactcccagagtacctcatccacgctttcttctgtgtcatgtttctttgtgcagcagagtggcttacactgggtctcaatatgcccctcttggcatatcatatttggaggtatatgagtagaccagtgatgagtggcccaggactctatgaccctacaaccatcatgaatgcagatattctagcatattgtcagaaggaaggatggtgcaaattagctttttatcttctagcatttttttactacctatatggcatgatctatgttttggtgagctcttagaacaacacacagaagaattggtccagttaagtgcatgcaaaaagccaccaaatgaagggattctatccagcaagatcctgtccaagagtagcctgtggaatctgatcagttactttaaaaaatgactccttattttttaaatgtttccacatttttgcttgtggaaagactgttttcatatgttatactcagataaagattttaaatggtattacgtat

SEQ ID NO: 122374 - DNA, 1356 bp, Homo sapiens
  Payload ID: 3974
  Gene Symbol: CNIH2
  Gene Name: cornichon family AMPA receptor auxiliary protein 2
  Uniprot ID: Q6PI25
  ENST ID: ENST00000311445
  CDS Start-End: 259-741
gagcgagggagccgcgggcgagggatcgcaggatgagcgatcggggcccgggcagccggcagcggacgcgccccccgagcccaccggcccgcgccccgcgccccccacggccccgcggtcccggtcccggccgcatcacccacgtcccccgagccccacgggccatgcccggccggccctaagcgcgggccggggggcgtccccttgcgcccgggccccgcgctggcgccccccgggccgccgcccggcgcgggggccatggcgttcaccttcgccgcgttctgctacatgctcaccctggtgctgtgcgcctccctcatcttctttgtcatctggcacatcatagcctttgatgagctgcggaccgacttcaagaaccccatcgaccaggggaaccctgcgcgggcacgcgagcgtttaaaaaacatcgaacgcatctgctgcctcctgaggaagctggtggtcccagaatactccatccacggcctcttctgtctgatgtttctgtgtgcagcagagtgggtgaccctgggcctcaacatccccctcctcttctaccacctctggaggtacttccaccgtcctgcagatggctctgaggtcatgtatgatgcggtctccatcatgaatgctgacattctcaactactgccagaaggagtcctggtgcaaacttgccttctacctgctctccttcttctattacctgtacagtatggtttatacgttggtgagtttctaagggggaagccggccagggagcgagcccagaacggaccggacgcctgtgcacccccagccctgccccttggccgcagaggcctcagccctggggagggagggggcactggtgcccccagcctctccaacccccaaactgctgctgcggggaaccccccccaccccgccttcagagccctcccccttggactagagcggctgggcagagctctaaacaggggcaggggctcctctgccagcctgtgggcatggcagtcattcctggaaggggcaggacctccggccttgtccatttcgggggaaacttgggccctgccaaggggcagagcttgaccctggaaattctgggccatccccctccacccccaccctgaggctccccctgcaggtgggggggtacccgcaccgggaatgagcaggctcagcaggggggcagccccacccctagtctgccctcccctctcccccaggctctttctccagccctgtctccatctgccccaacctcagcccaccttgtctcttggacctattttctatgtcgcctggaggagtccggcaccccctccccggccatttgtgacaaaatatgaataaactactgcaaatatgtggg

SEQ ID NO: 122375 - DNA, 1524 bp, Homo sapiens
  Payload ID: 3974
  Gene Symbol: CNIH2
  Gene Name: cornichon family AMPA receptor auxiliary protein 2
  ENST ID: ENST00000528852
  CDS Start-End: 268-726
cgggctggagagcgagggagccgcgggcgagggatcgcaggatgagcgatcggggcccgggcagccggcagcggacgcgccccccgagcccaccggcccgcgccccgcgccccccacggccccgcggtcccggtcccggccgcatcacccacgtcccccgagccccacgggccatgcccggccggccctaagcgcgggccggggggcgtccccttgcgcccgggccccgcgctggcgccccccgggccgccgcccggcgcgggggccatggcgttcaccttcgccgcgttctgctacatgctcaccctggtgctgtgcgcctccctcatcttctttgtcatctggcacatcatagcctttgatgagctgcggaccgacttcaagaaccccatcgaccaggggaaccctgcgcgggcacgcgagcgtttaaaaaacatcgaacgcatctgctgcctcctgaggaagctggtggtcccagaatactccatccacggcctcttctgtctgatgtttctgtgtgcagcagagtgggtgaccctgggcctcaacatccccctcctcttctaccacctctggaggtacttccaccgtcctgcagatggctctgaggtcatgtatgatgcggtctccatcatgaatgctgacattctcaactactgccagaaggagtcctggtgcaaacttgccttctacctgctctccttcttctattacctgtacaggtgaggccttgcccacagcagtcagaactcagggaagggatgtcccagcatcacgcttccaatcccaagttcctgccttttgcccctgaggactgagggcagcccagggtgtgaccaggtgggcatctgggtggctgtgtgtgtgcagggctaggctcactggctcatcttcctacagtatggtttatacgttggtgagtttctaagggggaagccggccagggagcgagcccagaacggaccggacgcctgtgcacccccagccctgccccttggccgcagaggcctcagccctggggagggagggggcactggtgcccccagcctctccaacccccaaactgctgctgcggggaaccccccccaccccgccttcagagccctcccccttggactagagcggctgggcagagctctaaacaggggcaggggctcctctgccagcctgtgggcatggcagtcattcctggaaggggcaggacctccggccttgtccatttcgggggaaacttgggccctgccaaggggcagagcttgaccctggaaattctgggccatccccctccacccccaccctgaggctccccctgcaggtgggggggtacccgcaccgggaatgagcaggctcagcaggggggcagccccacccctagtctgccctcccctctcccccaggctctttctccagccctgtctccatctgccccaacctcagcccaccttgtctcttggacctattttctatgtcgcctggaggagtccggcaccccctccccggccatttgtgacaaaatatgaataa

SEQ ID NO: 122376 - DNA, 568 bp, Homo sapiens
  Payload ID: 3974
  Gene Symbol: CNIH2
  Gene Name: cornichon family AMPA receptor auxiliary protein 2
  ENST ID: ENST00000534826
  CDS Start-End: 222-341
cgatcggggcccgggcagccggcagcggacgcgccccccgagcccaccggcccgcgccccgcgccccccacggccccgcggtcccggtcccggccgcatcacccacgtcccccgagccccacgggccatgcccggccggccctaagcgcgggccggggggcgtccccttgcgcccgggccccgcgctggcgccccccgggccgccgcccggcgcgggggccatggcgttcaccttcgccgcgttctgctacatgctcaccctggtgctgtgcgcctccctcatcttctttgtcatctggcacgagaagcaccacttagatctcagctgtgactgtcagtgagctcggatttcctgccccaccaatcctgagacatggaccaatcctaagacatggacctgaccaccccactctgctgctgtgtactcttcaatgcctccccccaaaatttttgtgttaaaatcatagcctttgatgagctgcggaccgacttcaagaaccccatcgaccaggggaaccctgcgcgggcacgcgagcgtttaaaaaacatcgaacgcatctgctgcctc

SEQ ID NO: 122377 - DNA, 1142 bp, Homo sapiens
  Payload ID: 3974
  Gene Symbol: CNIH2
  Gene Name: cornichon family AMPA receptor auxiliary protein 2
  ENST ID: ENST00000528063
  CDS Start-End: 116-304
gtcccccgagccccacgggccatgcccggccggccctaagcgcgggccggggggcgtccccttgcgcccgggccccgcgctggcgccccccgggccgccgcccggcgcgggggccatggcgttcaccttcgccgcgttctgctacatgctcaccctggtgctgtgcgcctccctcatcttctttgtcatctggcacatcatagcctttgatgagctgcggaccgacttcaagaaccccatcgaccaggggaaccctgcgcgggcagtaagtgatacatgtgctgtgccgagcgcgagcgtttaaaaaacatcgaacgcatctgctgcctcctgaggaagctggtggtcccagaatactccatccacggcctcttctgtctgatgtttctgtgtgcagcagagtgggtgaccctgggcctcaacatccccctcctcttctaccacctctggaggtacttccaccgtcctgcagatggctctgaggtcatgtatgatgcggtctccatcatgaatgctgacattctcaactactgccagaaggagtcctggtgcaaacttgccttctacctgctctccttcttctattacctgtacagtatggtttatacgttggtgagtttctaagggggaagccggccagggagcgagcccagaacggaccggacgcctgtgcacccccagccctgccccttggccgcagaggcctcagccctggggagggagggggcactggtgcccccagcctctccaacccccaaactgctgctgcggggaaccccccccaccccgccttcagagccctcccccttggactagagcggctgggcagagctctaaacaggggcaggggctcctctgccagcctgtgggcatggcagtcattcctggaaggggcaggacctccggccttgtccatttcgggggaaacttgggccctgccaaggggcagagcttgaccctggaaattctgggccatccccctccacccccaccctgaggctccccctgcaggtgggggggtacccgcaccgggaatgagcaggctcagcaggggggcagccccacccctagtctgccctcccctctcccccaggctctttctccagccctgtctccatctgccccaacctcagcccaccttg

SEQ ID NO: 122378 - DNA, 2558 bp, Homo sapiens
  Payload ID: 3975
  Gene Symbol: CNIH3
  Gene Name: cornichon family AMPA receptor auxiliary protein 3
  Uniprot ID: Q8TBE1
  ENST ID: ENST00000272133
  CDS Start-End: 883-1365
ccgggtcgcaccgctacagttctcgcagtggcaaaggcggcggcggcggcggcggcagcggcagcagcaggtggagcgagctacagcgtttggcctgaaacccactgctgcagccacccgggctggagttggcccgttgggtggagccagtgctcgccccggtccgacccccggtttccgggacacttgggttgcggaggccggctggccggagtcacggttggggacgggcgcgcctcggagcgcacggctgcgctggaagccgcgtctggggcgcaggaccaacgggacctacctcctcccggctacctaaagactccttctctcgggaaagagcgctgcccggctctgggatttgggaggagctcggaggccgctcgggcacctcgctggacactatccgtttgcgccccggtggcgcgggagggtccggagcggagcgctcgtctctcctcagcggtttagtggagaaaagcagagagctcttcctggggcgaatgggacctcctccctcggtcctccgtggagtcgtcgcatcgcttgtcgtgttggtctcgaggggctcacagcttggcactaatttgcaggtgttcgctgctgatttggtttcttcttcgatttgcggacggttccctccagcgactctcgacacacgttttcctgtcttcgccggagggccgggtctggggtcgccggagcctgcgggaatccagcgcttattcgctgaccctcgagtcgcttcgctagctgtgcgccctcctgggcactagcctggagaggagcgtgcagacgcggctccttggagggagtgcggtcctctagggaggcatcgggctcctaggggcttcttggcgtgtgtggtgggattggggtccgccggccatggccttcactttcgctgcgttctgctacatgctgtctctggtgctgtgcgctgcgctcatcttcttcgccatctggcacataattgcctttgatgagttaaggacagattttaagagccccatagaccagtgcaatcctgttcatgcgagggaacggttgaggaacatcgagcgcatctgcttccttctgcgaaagctggtgctgccagaatactccatccatagcctcttctgcattatgttcctgtgtgcgcaagagtggctcacgctggggctgaatgtccctctacttttctatcacttctggaggtatttccactgtccagcagatagctcagaactagcctacgacccaccggtggtcatgaatgccgacactttgagttactgtcagaaggaggcctggtgtaagctggccttctatctcctctccttcttctactacctttactgcatgatctacactttagtgagctcttaacgcaaagaccatgcacatcatcagagactgagatgggagaggcctgagacggagaggtgcatttctgctggtgactggaggagggaccagaatgaggatacgtgagaaatagacccggcaggcagtcagactgaatgggagctggaatcacgcagcagctgggagccgagttaaccctgcgtgtctgtgtcaccctgtttgtcaatctttggcattcgaattccacacacggggtcctagagcccttctgagcatcagtggtgtgggggagtaggtgacgaaacactagacctctcctgagagagaattgctgcttcctgaatccacttcattgaacagcaccttgcaagttcaaatgagttcctgggagcggaggctggaaggccacaaggtgcttgctaaggaacagaatgacccagagtcaaggccaagtctgcagggacctgttgaaagcctcgagaatgtcttggctgcccaagactcttgttgcctttcttccaagccatggccatgccctttttctcaaatgggaggggctggagggtgtgtgggatttgtcttcagctgcaaccagccttgagcctgctgggctattttcagctgaggaggggtgaatataggaaaaatgcatttttgaaacgtttgcaacatgatcaaggtgttagttctccaccacacaagttgtattcttcttttgccacctcaaaccatcacagagtctttaaatgcaaatcaattggtcaatgctagtcaaagctatgttcttacaaaaaccccagacagctcagagctcagaaaatcctgtggagtggctgctctgtaccgtgggcatccggcagccaggaagtgagacaacataattataactttgttttatgatgctgcatcatttgtactgtttaggtcgacgtgaggacatcatcttatttagaattttccgtttggcattctcttttgggtgggagttatgctgggggttgtaaataatgacaaggctgagatttttatgatgtttaaattgggcacaatgattttgaccttattccccaaacttcttttcttttctactgtttaacatacacaggctatttatacacgtccccagctcccatctgaaacctgtgactcaggtttatgaatggtgtttgtgtagcaacacattgtgtgctatgtttattaaaatgcagcgacaa

SEQ ID NO: 122379 - DNA, 808 bp, Homo sapiens
  Payload ID: 3976
  Gene Symbol: CNIH4
  Gene Name: cornichon family AMPA receptor auxiliary protein 4
  ENST ID: ENST00000366856
  CDS Start-End: 33-446
gacggaaggagcggcggcgacggaggaggaggatggaggcggtggtgttcgtcttctctctcctcgattgttgcgcgctcatcttcctctcggtctacttcataattacattgtctgatttagaatgtgattacattaatgctagatcatgttgctcaaaattaaacaagtgggtaattccagaattgattggccataccattgtcactgtattactgctcatgtcattgcactggttcatcttccttctcaacttacctgttgccacttggaatatatatcgatacattatggtgccgagtggtaacatgggagtgtttgatccaacagaaatacacaatcgagggcagctgaagtcacacatgaaagaagccatgatcaagcttggtttccacttgctctgcttcttcatgtatctttatagtggtagcaactgcccttgctaatcaccgtaacctcggctgagaaagaagaggaagcgaaatccaagatgcagctcagttcatcaaagcctagcaggtcccctcagctgccttttcatgcctgccacagactacagtaggacaaaacctgacctggtctttgaagttaagagctaagaaagcttcctatagtagtatctcccatggcacttaccacattctatctggtattacagttatttgtatgcaattaatcactcttagattgtatgttcctggagggcagaatatgcccattcatatttgtatcttcttccttctgctcttggcacctaacacagtgccttgcacacaaacaataaatgattgttgagtgaataagtaaa

SEQ ID NO: 122380 - DNA, 3963 bp, Homo sapiens
  Payload ID: 3976
  Gene Symbol: CNIH4
  Gene Name: cornichon family AMPA receptor auxiliary protein 4
  Uniprot ID: Q9P003
  ENST ID: ENST00000366857
  CDS Start-End: 55-333
gtcggggcatccgagcgggtttgacggaaggagcggcggcgacggaggaggaggatggaggcggtggtgttcgtcttctctctcctcgattgttgcgcgctcatcttcctctcggtctacttcataattacattgtctgatttagaatgtgattacattaatgctagatcatgttgctcaaaattaaacaagtgggtaattccagaattgattggccataccattgtcactgtattactgctcatgtcattgcactggttcatcttccttctcaacttacctgttgccacttggaatatatatcgtatgatcttagctttgataaatgactgaagctggagaagccgtggttgaagtcagcctacactacagtgcacagttgaggagccagagacttcttaaatcatccttagaaccgtgaccatagcagtatatattttcctcttggaacaaaaaactatttttgctgtatttttaccatataaagtatttaaaaaacatgaattgagtttctgtagatttctagttctcaactttagcctgaacgccaacacttgaaggtgtttttcatcctctgtatgttgaaggtggttatttgtatgtaggaacaggactgccatcccagctttgcatgccaaagaaataaagaacacactttaaagggcaaactgaagagatgagcgagcaaaggtgcccttcaggtctactgaaaagttagagtacaaaacaacactgttgatctggacaaaagaagaaaaattaccctttttgcttgtgttgtgacaacttcatttaatatggtttaaagatttatgagactgtcagctaaaagtcttttcacaagaatgtcaacagagaatggcatctcaaaatatatatatttctttgcacaatttgtgaaaccttataagccattttccccaggtacaatgtagttcctgctgatagaaaggaaatattttgtcaagagctttcatttaaaagctactacctccacaatcacccccaaacccagaaaatccccactggctcttgccagtctggttttcgtattgcagttattccaattgtatttgatctccctgataacgtattttcatgggtttgggtagaagatgctaatcagattagaagcaggaatagttatttgctgtctgtgaaattgagccttttggtgcgccacgtggtgccagatcaacacttctatccctctgcactgaccacgttgtgaactgggagaccaaatgcaagccatttcatggacatagcaatatacaaccaaactctgttccttggagttatattgtaaactcttgcaggtgggagagcagttcacctccttagctctgtttgccagctcttacagggtaaaataaacctggcaatttatcctcagtcctagtttgtggtttaatgttgctatcttaagcactggcatttgggcaaaacatgactgtgttctgtgggagaatccaaaggcattattcactctagttgagatagaattgggtggctaaacagggtgtgtggtacccaaaagattaaatgttacatgtccttttagtccttgaccaggtctagccttggcagaagcaagggagccactaagccaaactccctgtgcagacagaccatgtttcaaggctggaagtagtgccctggcaacacacaaaaggaacggtgaaatggtaggcaaagtgaacttggctctgctggcctctttggggtcacagaaattgctccttgtggtaatcttatatttctgtcaggcacagggccaagaagctgtgtaacagacattactttgcttgcatctctttttcataccttttccctctgaggcagcttttgcttagaaaacagtcccttcactctgcctttcctcctaacttcctgtgcctcttcatgttctgctcaagctttttaaagcaacgaagctgttggagaacttaaatccttgcaactgagagataagctacttaaaggcggtagagatctttttttttttttttttgagatggggtcttgctgtgttgcccaggctggagtgcagtggtgtgatctcagctcactgcaacctctgctttctgggttcaagcgattctcctgcctcagcctcccaagtagctgggattacggctagctactcctggctaatttttgtatttttagtagagatggggtttcaccatgttggccaggctggtctcaaactcctgacctcaaacgatctgcctgccttggtctcccaaagtgctgggattataggtgtgagccactgcgcctggccatgtagatgacttttgaccaaaatgtttcaccttctcattcagatattcttagtaaccaaaacagtgactcatgcagttgagagagcctttgggctgtcagtttacagtacatcaggcttgctgaggctaagcaaatcagaaaggtgccatgtttataacagaggtcaaagctccttacttctgaaacattagctgtggttaaaaacaaaaactcttccttcttgtattgcttgtctatcaaagccaggaaagtgggggatcactgtagttaaattttttttttttttaattagagacagagtcttgccctgtcgcccaagctggagtgcactggcgcaatcgtggtacactgcagccttgaactcctggactcaagcagtcctcctgcctcagcttcccaagtagttgggagtaggtgcacaccaccatgcccagcgaattttttgtagagacagaggtcttgctatgttgcctaggctggtatcaaaattactggcctcaagcgattctcctgcctcggcctcccagatgttgggattactggtgtgagccaccacgcccagctcaaaaacaatttttttaggggcacttctacaaatcatgaaagggggataaaagcactgactttaaaaagccatgtttaagatgctataaatgttctccccttttcattgattggagagttgtagaggaccttagagatcattttgtctaactccctcatcccaaagataaactgaggcctagagatcgttcagggtgttgtaactgggaacatctgaatgctgaggcctagagatcgttcagggtgttgtaactgggaacatctgaatgctgaggcctagagatcgttcagggtgttgtaactgggaacatctgaatgctgaggcctagagatcgttcagggtgttgtaactgggaacatctgaatgctgaggcctagagatcgttcagggtgttgtaactgggaacatctgaatgctgaggcctagagatcgttcagggtgttgtaactgggaacatctgaatgctgaggcctagagatcgttcagggtgttgtaactgggaacatctgaatgctgaggcctagagatcgttcagggtgttgtaactgggaacatctgaatgctgaggcttagtccagtgttctctctcccttaccactcctcttccccttccctctataatggcagtacccagggcccggtccatagactactatcgagtgctcctatgtgcatcttagtacgtatcattttcccttgcctttttccttctatcctttcagtggtagcaactgcccttgctaatcaccgtaacctcggctgagaaagaagaggaagcgaaatccaagatgcagctcagttcatcaaagcctagcaggtcccctcagctgccttttcatgcctgccacagactacagtaggacaaaacctgacctggtctttgaagttaagagctaagaaagcttcctatagtagtatctcccatggcacttaccacattctatctggtattacagttatttgtatgcaattaatcactcttagattgtatgttcctggagggcagaatatgcccattcatatttgtatcttcttccttctgctcttggcacctaacacagtgccttgcacacaaacaataaatgattgttgagtgaataagtaaa

SEQ ID NO: 122381 - DNA, 702 bp, Homo sapiens
  Payload ID: 3976
  Gene Symbol: CNIH4
  Gene Name: cornichon family AMPA receptor auxiliary protein 4
  ENST ID: ENST00000366858
  CDS Start-End: 68-340
ctatcaggggtgggtcggggcatccgagcgggtttgacggaaggagcggcggcgacggaggaggaggatggaggcggtggtgttcgtcttctctctcctcgattgttgcgcgctcatcttcctctcggtctacttcataattacattgtctgatttagaatgtgattacattaatgctagatcatgttgctcaaaattaaacaagtgggtaattccagaattgattggccataccattgtcactgtattactgctcatgtcattgcactggttcatcttccttctcaacttacctgttgccacttggaatatatatcgtggtagcaactgcccttgctaatcaccgtaacctcggctgagaaagaagaggaagcgaaatccaagatgcagctcagttcatcaaagcctagcaggtcccctcagctgccttttcatgcctgccacagactacagtaggacaaaacctgacctggtctttgaagttaagagctaagaaagcttcctatagtagtatctcccatggcacttaccacattctatctggtattacagttatttgtatgcaattaatcactcttagattgtatgttcctggagggcagaatatgcccattcatatttgtatcttcttccttctgctcttggcacctaacacagtgccttgcacacaaacaataaatgattgttgagtgaataagtaaa

SEQ ID NO: 122382 - DNA, 4125 bp, Homo sapiens
  Payload ID: 3976
  Gene Symbol: CNIH4
  Gene Name: cornichon family AMPA receptor auxiliary protein 4
  Uniprot ID: Q9P003
  ENST ID: ENST00000465271
  CDS Start-End: 76-495
gcaagggcctatcaggggtgggtcggggcatccgagcgggtttgacggaaggagcggcggcgacggaggaggaggatggaggcggtggtgttcgtcttctctctcctcgattgttgcgcgctcatcttcctctcggtctacttcataattacattgtctgatttagaatgtgattacattaatgctagatcatgttgctcaaaattaaacaagtgggtaattccagaattgattggccataccattgtcactgtattactgctcatgtcattgcactggttcatcttccttctcaacttacctgttgccacttggaatatatatcgatacattatggtgccgagtggtaacatgggagtgtttgatccaacagaaatacacaatcgagggcagctgaagtcacacatgaaagaagccatgatcaagcttggtttccacttgctctgcttcttcatgtatctttatagtatgatcttagctttgataaatgactgaagctggagaagccgtggttgaagtcagcctacactacagtgcacagttgaggagccagagacttcttaaatcatccttagaaccgtgaccatagcagtatatattttcctcttggaacaaaaaactatttttgctgtatttttaccatataaagtatttaaaaaacatgaattgagtttctgtagatttctagttctcaactttagcctgaacgccaacacttgaaggtgtttttcatcctctgtatgttgaaggtggttatttgtatgtaggaacaggactgccatcccagctttgcatgccaaagaaataaagaacacactttaaagggcaaactgaagagatgagcgagcaaaggtgcccttcaggtctactgaaaagttagagtacaaaacaacactgttgatctggacaaaagaagaaaaattaccctttttgcttgtgttgtgacaacttcatttaatatggtttaaagatttatgagactgtcagctaaaagtcttttcacaagaatgtcaacagagaatggcatctcaaaatatatatatttctttgcacaatttgtgaaaccttataagccattttccccaggtacaatgtagttcctgctgatagaaaggaaatattttgtcaagagctttcatttaaaagctactacctccacaatcacccccaaacccagaaaatccccactggctcttgccagtctggttttcgtattgcagttattccaattgtatttgatctccctgataacgtattttcatgggtttgggtagaagatgctaatcagattagaagcaggaatagttatttgctgtctgtgaaattgagccttttggtgcgccacgtggtgccagatcaacacttctatccctctgcactgaccacgttgtgaactgggagaccaaatgcaagccatttcatggacatagcaatatacaaccaaactctgttccttggagttatattgtaaactcttgcaggtgggagagcagttcacctccttagctctgtttgccagctcttacagggtaaaataaacctggcaatttatcctcagtcctagtttgtggtttaatgttgctatcttaagcactggcatttgggcaaaacatgactgtgttctgtgggagaatccaaaggcattattcactctagttgagatagaattgggtggctaaacagggtgtgtggtacccaaaagattaaatgttacatgtccttttagtccttgaccaggtctagccttggcagaagcaagggagccactaagccaaactccctgtgcagacagaccatgtttcaaggctggaagtagtgccctggcaacacacaaaaggaacggtgaaatggtaggcaaagtgaacttggctctgctggcctctttggggtcacagaaattgctccttgtggtaatcttatatttctgtcaggcacagggccaagaagctgtgtaacagacattactttgcttgcatctctttttcataccttttccctctgaggcagcttttgcttagaaaacagtcccttcactctgcctttcctcctaacttcctgtgcctcttcatgttctgctcaagctttttaaagcaacgaagctgttggagaacttaaatccttgcaactgagagataagctacttaaaggcggtagagatctttttttttttttttttgagatggggtcttgctgtgttgcccaggctggagtgcagtggtgtgatctcagctcactgcaacctctgctttctgggttcaagcgattctcctgcctcagcctcccaagtagctgggattacggctagctactcctggctaatttttgtatttttagtagagatggggtttcaccatgttggccaggctggtctcaaactcctgacctcaaacgatctgcctgccttggtctcccaaagtgctgggattataggtgtgagccactgcgcctggccatgtagatgacttttgaccaaaatgtttcaccttctcattcagatattcttagtaaccaaaacagtgactcatgcagttgagagagcctttgggctgtcagtttacagtacatcaggcttgctgaggctaagcaaatcagaaaggtgccatgtttataacagaggtcaaagctccttacttctgaaacattagctgtggttaaaaacaaaaactcttccttcttgtattgcttgtctatcaaagccaggaaagtgggggatcactgtagttaaattttttttttttttaattagagacagagtcttgccctgtcgcccaagctggagtgcactggcgcaatcgtggtacactgcagccttgaactcctggactcaagcagtcctcctgcctcagcttcccaagtagttgggagtaggtgcacaccaccatgcccagcgaattttttgtagagacagaggtcttgctatgttgcctaggctggtatcaaaattactggcctcaagcgattctcctgcctcggcctcccagatgttgggattactggtgtgagccaccacgcccagctcaaaaacaatttttttaggggcacttctacaaatcatgaaagggggataaaagcactgactttaaaaagccatgtttaagatgctataaatgttctccccttttcattgattggagagttgtagaggaccttagagatcattttgtctaactccctcatcccaaagataaactgaggcctagagatcgttcagggtgttgtaactgggaacatctgaatgctgaggcctagagatcgttcagggtgttgtaactgggaacatctgaatgctgaggcctagagatcgttcagggtgttgtaactgggaacatctgaatgctgaggcctagagatcgttcagggtgttgtaactgggaacatctgaatgctgaggcctagagatcgttcagggtgttgtaactgggaacatctgaatgctgaggcctagagatcgttcagggtgttgtaactgggaacatctgaatgctgaggcctagagatcgttcagggtgttgtaactgggaacatctgaatgctgaggcctagagatcgttcagggtgttgtaactgggaacatctgaatgctgaggcttagtccagtgttctctctcccttaccactcctcttccccttccctctataatggcagtacccagggcccggtccatagactactatcgagtgctcctatgtgcatcttagtacgtatcattttcccttgcctttttccttctatcctttcagtggtagcaactgcccttgctaatcaccgtaacctcggctgagaaagaagaggaagcgaaatccaagatgcagctcagttcatcaaagcctagcaggtcccctcagctgccttttcatgcctgccacagactacagtaggacaaaacctgacctggtctttgaagttaagagctaagaaagcttcctatagtagtatctcccatggcacttaccacattctatctggtattacagttatttgtatgcaattaatcactcttagattgtatgttcctggagggcagaatatgcccattcatatttgtatcttcttccttctgctcttggcacctaacacagtgccttgcacacaaacaataaatgattgttgagtgaataagtaaa

SEQ ID NO: 122383 - DNA, 523 bp, Homo sapiens
  Payload ID: 3977
  Gene Symbol: CNFN
  Gene Name: cornifelin
  Uniprot ID: Q9BYD5
  ENST ID: ENST00000222032
  CDS Start-End: 51-389
ccgtgtctccacacgtctgcctccatcactgccatcgcgatcctgcagctatgtcctaccctgtgaccagtcagccccagtgcgccaccaccagctgctaccagacccagctcagtgactggcacacaggtctcacggactgctgcaacgacatgcctgtctgtctgtgcggcacttttgctcctctgtgccttgcctgccgcatctccgacgactttggcgagtgctgctgcgcgccctacctgcccggaggcctgcactccatccgcaccggcatgcgggagcgctaccacatccagggctccgtcgggcacgactgggcggccctcaccttttgtctgccctgcgccctctgccagatggcgcgggaactgaagatccgagagtaaggaagttccctgtcttccccgtccttttccaccagtctcgcctctggccttctctggccactcctgggagggactgcctcaccacccctgtcccgctgccagaaatacacccacaataaaaacctgaaaaccaa

SEQ ID NO: 122384 - DNA, 502 bp, Homo sapiens
  Payload ID: 3977
  Gene Symbol: CNFN
  Gene Name: cornifelin
  Uniprot ID: Q9BYD5
  ENST ID: ENST00000597255
  CDS Start-End: 112-450
cctccatcactgccatcgcgatcctgcagccacttctgccgtccccaacgccacctcctcagggccagcaagatgcagtttgagatgcacgacaacgtgaaaggcaaagctatgtcctaccctgtgaccagtcagccccagtgcgccaccaccagctgctaccagacccagctcagtgactggcacacaggtctcacggactgctgcaacgacatgcctgtctgtctgtgcggcacttttgctcctctgtgccttgcctgccgcatctccgacgactttggcgagtgctgctgcgcgccctacctgcccggaggcctgcactccatccgcaccggcatgcgggagcgctaccacatccagggctccgtcgggcacgactgggcggccctcaccttttgtctgccctgcgccctctgccagatggcgcgggaactgaagatccgagagtaaggaagttccctgtcttccccgtccttttccaccagtctcgcctctggccttc

SEQ ID NO: 122385 - DNA, 1902 bp, Homo sapiens
  Payload ID: 3978
  Gene Symbol: CRNN
  Gene Name: cornulin
  Uniprot ID: Q9UBG3
  ENST ID: ENST00000271835
  CDS Start-End: 64-1551
actcctcacaccacttaacagccacttgtttcatcccacctgggcattaggttgacttcaaagatgcctcagttactgcaaaacattaatgggatcatcgaggccttcaggcgctatgcaaggacggagggcaactgcacagcgctcacccgaggggagctgaaaagactcttggagcaagagtttgccgatgtgattgtgaaaccccacgatccagcaactgtggatgaggtcctgcgtctgctggatgaagaccacacagggactgtggaattcaaggaattcctggtcttagtgtttaaagttgcccaggcctgtttcaagacactgagcgagagtgctgagggagcctgcggctctcaagagtctggaagcctccactctggggcctcgcaggagctgggcgaaggacagagaagtggcactgaagtgggaagggcggggaaagggcagcattatgaggggagcagccacagacagagccagcagggttccagagggcagaacaggcctggggttcagacccagggtcaggccactggctctgcgtgggtcagcagctatgacaggcaagctgagtcccagagccaggaaagaataagcccgcagatacaactctctgggcagacagagcagacccagaaagctggagaaggcaagaggaatcagacaacagagatgaggccagagagacagccacagaccagggaacaggacagagcccaccagacaggtgagactgtgactggatctggaactcagacccaggcaggtgccacccagactgtggagcaggacagcagccaccagacaggaagaaccagcaagcagacacaggaggccaccaatgaccagaacagagggactgagacccacggtcaaggcaggagccagaccagccaggctgtgacaggaggacatgctcagatacaggcagggacacacacccagacacccacccagaccgtggagcaggacagcagccaccagacaggaagcaccagcacccagacacaggagtccaccaatggccagaacagagggactgagatccacggtcaaggcaggagccagaccagccaggctgtgacaggaggacacactcagatacaggcagggtcacacaccgagactgtggagcaggacagaagccaaactgtaagccacggaggggctagagaacagggacagacccagacgcagccaggcagtggtcaaagatggatgcaagtgagcaaccctgaggcaggagagacagtaccgggaggacaggcccagactggggcaagcactgagtcaggaaggcaggagtggagcagcactcacccaaggcgctgtgtgacagaagggcagggagacagacagcccacagtggttggtgaggaatgggttgatgaccactcaagggagacagtgatcctcaggctggaccagggcaacttgcataccagtgtttcctcagcacagggccaggatgcagcccagtcagaagagaagcgaggcatcacagctagagagctgtattcctacttgagaagcaccaagccatgacttccccgactccaatgtccagtactggaagaagacagctggagagagtttggcttgtcctgcatggccaatccagtgggtgcatccctggacatcagctcttcattatgcagcttcccttttaggtctttctcaatgagataatttctgcaaggagctttctatcctgaactcttctttcttacctgctttgcggtgcagaccctctcaggagcaggaagactcagagcaagtcacccctttgtactgaattgtcctcatcttgtggggggtttcaggactatttttatctctgacatctctctattgccccatctaccctaatgcatcaataaaaccttaagccactgg

SEQ ID NO: 122386 - DNA, 3815 bp, Homo sapiens
  Payload ID: 3979
  Gene Symbol: CORO7-PAM16
  Gene Name: CORO7-PAM16 readthrough
  ENST ID: ENST00000575334
  CDS Start-End: 467-2074
cttaaggagtggagtggatgatggaagaggtagatagtgctggaaggcgtgctaggtacaccgcaaagactccacagcaaatcctgcacacaaaatcgcgaatgctgcagccgagaccccacgcaagcaagcaccgcaggagacgtgggctgacagctgcgccccacgtgacctcccacccgcgccagtccgtcccctcggtatcagggcgtggcctcgcggggcggccgtacctggattggccgggaggcgggaccggtggtgcgcgcgcgaaaggagaggggcttgggggcgtggcccagggggccggagacggctgcgattggcagtggggcgcgccgggggcgtgaccgcggcattgggtcccgggtggggccgaggcagcgggagtcgcggttgctcagcgtgcacctgagacccgacgcccggggtcctcgaagacgcgtccgccgccgtgcccgtcgccatgaaccgcttcagggtgtccaagttccggcacaccgaggctcggccgccccgccgcgagtcctggatcagtgacattcgagcaggaaccgccccttcatgcaggaaccacatcaaatcaagctgcagcttgatcgccttcaactccgaccgtcctggtgtactgggcattgtgcctctgcaaggccaaggagaggacaagcgacgcgtggcccacctgggctgccattcagacctagtcaccgacttggacttctcgccctttgatgacttcctcctggccacaggctcggctgacaggacggtaaaactctggcgactgccagggcctggccaggccctgccctcagcacccggggtggtgctgggccccgaggacctcccagtggaggtactgcagttccaccccacctctgacggcattctggtgagcgcagcaggcaccactgtgaaggtctgggacgcagccaagcagcagcccctgacagagctggcagcccatggggacctggtgcagagcgccgtctggagccgagatggagccctggtgggcacggcgtgcaaggacaagcagctgcggatctttgaccccagaacaaagccgcgggcctctcagagcacgcaggcccatgagaacagcagggatagccggctggcatggatgggcacctgggagcaccttgtgtctactggattcaaccagatgcgtgagcgcgaagtgaagctgtgggacacgcggttcttctccagcgccctggcctccctcaccttggacacctcgcttgggtgtctcgtgcctctgctggaccctgactctgggctcctggtcctggcaggaaagggcgagaggcagctgtactgttacgaggtggtcccgcagcagccggcgctgagcccagtgacccagtgtgtcctggagagcgtgctgcgtggggctgcccttgtgccccggcaggcgctggccgtcatgagctgcgaggtactccgcgtcctacagctgagcgacacagccatcgtgcccatcggctaccatgtgccccgcaaggctgtggagttccacgaggacctgttcccggacactgccggctgtgtgcctgccaccgacccccatagctggtgggctggggacaaccagcaggtgcagaaggtcagcctcaaccccgcctgccggccccacccgagcttcacttcctgtctggtgccccctgcggagcccctccctgacacagcccagcctgcggtgatggagacacccgtgggtgatgcagacgcaagcgagggtttctcttcccctcccagttcgctgacctcgccctccacgccctccagcctggggccctcactctccagcaccagtggcatcgggaccagccccagtttgaggtcgctgcagagcctgctgggccccagttccaagttccgccatgctcagggcactgtcctgcaccgagacagccacatcaccaacctcaaggggctcaacctcaccacacctggtgagagtgacggcttctgtgccaacaagctgcgtgtggccgtgccgctgctcagcagcgggggacaggtggctgtgcttgagatgagggagaagaggcacagagaggtttagtgacctgcccgggtcacacagctgtctacggaagcctggccgcctgcccgacacggcactgcccacgctgcagaatggggcagctgtgactgatctggcctgggacccctttgacccccatcgcctcgctgtggctggtgaggacgccaggatccgactgtggcgggtacccgcagagggcctggaagaggtgctcaccacgccagagactgtgctcacaggccacacggagaagatctgctccctgcgcttccacccactggcagccaatgtgctggcctcgtcctcctatgacctcactgttcgcatctgggaccttcaggctggagctgatcggctgaagctgcagggccaccaagaccagatcttcagcctggcctggagtcctgatgggcagcagctggccactgtctgcaaggatgggcgtgtgcgggtctacaggccccggagtggccctgagcccctgcaggaaggcccagggcccaagggaggacgcggagctcgcattgtctgggtatgtgatggtcgctgtctgctggtgtctggctttgacagccaaagtgagcgccagctgctcctatatgaagctgaggccctggccggcggacccttggcagtgttgggcctggacgtggctccctcaaccctgctgcccagctacgacccagacactggcctggtgctcctgaccggcaagggcgacacccgtgtattcctgtacgagctgctccccgagtcccctttcttcctggagtgcaacagcttcacgtcgcctgacccccacaagggcctcgtcctcctgcctaagacggagtgcgacgtgcgggaagtggagctgatgcggtgcctgcggctgcgtcagtcctccctggagcctgtggccttccggctgccccgagtccggaaagagttcttccaggatgacgtgttcccagacacggctgtgatctgggagcctgtgctcagtgccgaggcctggctgcaaggcgctaatgggcagccctggcttctcagcctgcagcctcctgacatgagcccagtgagccaagccccccgagaggcccctgctcgtcgggccccatcctcagcgcagtacctggaagaaaagtctgaccagcaaaagaaggaggagctgctgaatgccatggtggcaaaactggggaaccgggaggacccactcccccaggactcctttgaaggcgtggacgaggacgagtgggccaagtacctggcccagatcattgtgatgggcgtgcaggtggtgggcagggcctttgcacgggccttgcggcaggagtttgcaggggtgagccaccaactcggaaggcccagggtgaagtgtgggctgctgaggactgagcgatcacccacatgtccacacagccagccgggccgcagctgatgcccgaggacgcgctggacaccggtctgcagccgcttccaacctctccggcctcagcctccaggaggcacagcagattctcaacgtgtccaagctgagccctgaggaggtccagaagaactatgaacacttatttaaggtgaatgataaatccgtgggtggctccttctacctgcagtcaaaggtggtccgcgcaaaggagcgcctggatgaggaactcaaaatccaggcccaggaggacagagaaaaagggcagatgccccatacgtgactgctcggctccccccgcccaccccgccgcctctaatttatagcttggtaataaatttcttttctgca

SEQ ID NO: 122387 - DNA, 3284 bp, Homo sapiens
  Payload ID: 3979
  Gene Symbol: CORO7-PAM16
  Gene Name: CORO7-PAM16 readthrough
  ENST ID: ENST00000572467
  CDS Start-End: 70-3216
tgctcagcgtgcacctgagacccgacgcccggggtcctcgaagacgcgtccgccgccgtgcccgtcgccatgaaccgcttcagggtgtccaagttccggcacaccgaggctcggccgccccgccgcgagtcctggatcagtgacattcgagcaggaaccgccccttcatgcaggaaccacatcaaatcaagctgcagcttgatcgccttcaactccgaccgtcctggtgtactgggcattgtgcctctgcaaggccaaggagaggacaagcgacgcgtggcccacctgggctgccattcagacctagtcaccgacttggacttctcgccctttgatgacttcctcctggccacaggctcggctgacaggacggtaaaactctggcgactgccagggcctggccaggccctgccctcagcacccggggtggtgctgggccccgaggacctcccagtggaggtactgcagttccaccccacctctgacggcattctggtgagcgcagcaggcaccactgtgaaggtctgggacgcagccaagcagcagcccctgacagagctggcagcccatggggacctggtgcagagcgccgtctggagccgagatggagccctggtgggcacggcgtgcaaggacaagcagctgcggatctttgaccccagaacaaagccgcgggcctctcagagcacgcaggcccatgagaacagcagggatagccggctggcatggatgggcacctgggagcaccttgtgtctactggattcaaccagatgcgtgagcgcgaagtgaagctgtgggacacgcggttcttctccagcgccctggcctccctcaccttggacacctcgcttgggtgtctcgtgcctctgctggaccctgactctgggctcctggtcctggcaggaaagggcgagaggcagctgtactgttacgaggtggtcccgcagcagccggcgctgagcccagtgacccagtgtgtcctggagagcgtgctgcgtggggctgcccttgtgccccggcaggcgctggccgtcatgagctgcgaggtactccgcgtcctacagctgagcgacacagccatcgtgcccatcggctaccatgtgccccgcaaggctgtggagttccacgaggacctgttcccggacactgccggctgtgtgcctgccaccgacccccatagctggtgggctggggacaaccagcaggtgcagaaggtcagcctcaaccccgcctgccggccccacccgagcttcacttcctgtctggtgccccctgcggagcccctccctgacacagcccagcctgcggtgatggagacacccgtgggtgatgcagacgcaagcgagggtttctcttcccctcccagttcgctgacctcgccctccacgccctccagcctggggccctcactctccagcaccagtggcatcgggaccagccccagtttgaggtcgctgcagagcctgctgggccccagttccaagttccgccatgctcagggcactgtcctgcaccgagacagccacatcaccaacctcaaggggctcaacctcaccacacctggtgagagtgacggcttctgtgccaacaagctgcgtgtggccgtgccgctgctcagcagcgggggacaggtggctgtgcttgagctacggaagcctggccgcctgcccgacacggcactgcccacgctgcagaatggggcagctgtgactgatctggcctgggacccctttgacccccatcgcctcgctgtggctggtgaggacgccaggatccgactgtggcgggtacccgcagagggcctggaagaggtgctcaccacgccagagactgtgctcacaggccacacggagaagatctgctccctgcgcttccacccactggcagccaatgtgctggcctcgtcctcctatgacctcactgttcgcatctgggaccttcaggctggagctgatcggctgaagctgcagggccaccaagaccagatcttcagcctggcctggagtcctgatgggcagcagctggccactgtctgcaaggatgggcgtgtgcgggtctacaggccccggagtggccctgagcccctgcaggaaggcccagggcccaagggaggacgcggagctcgcattgtctgggtatgtgatggtcgctgtctgctggtgtctggctttgacagccaaagtgagcgccagctgctcctatatgaagctgaggccctggccggcggacccttggcagtgttgggcctggacgtggctccctcaaccctgctgcccagctacgacccagacactggcctggtgctcctgaccggcaagggcgacacccgtgtattcctgtacgagctgctccccgagtcccctttcttcctggagtgcaacagcttcacgtcgcctgacccccacaagggcctcgtcctcctgcctaagacggagtgcgacgtgcgggaagtggagctgatgcggtgcctgcggctgcgtcagtcctccctggagcctgtggccttccggctgccccgagtccggaaagagttcttccaggatgacgtgttcccagacacggctgtgatctgggagcctgtgctcagtgccgaggcctggctgcaaggcgctaatgggcagccctggcttctcagcctgcagcctcctgacatgagcccagtgagccaagccccccgagaggcccctgctcgtcgggccccatcctcagcgcagtacctggaagaaaagtctgaccagcaaaagaaggaggagctgctgaatgccatggtggcaaaactggggaaccgggaggacccactcccccaggactcctttgaaggcgtggacgaggacgagtgggccaagtacctggcccagatcattgtgatgggcgtgcaggtggtgggcagggcctttgcacgggccttgcggcaggagtttgcagccagccgggccgcagctgatgcccgaggacgcgctggacaccggtctgcagccgcttccaacctctccggcctcagcctccaggaggcacagcagattctcaacgtgtccaagctgagccctgaggaggtccagaagaactatgaacacttatttaaggtgaatgataaatccgtgggtggctccttctacctgcagtcaaaggtggtccgcgcaaaggagcgcctggatgaggaactcaaaatccaggcccaggaggacagagaaaaagggcagatgccccatacgtgactgctcggctccccccgcccaccccgccgcctctaatttatagcttggtaataaatttcttttctgca

SEQ ID NO: 122388 - DNA, 3284 bp, Homo sapiens; identical to SEQ ID NO: 122387
  Payload ID: 3979
  Gene Symbol: CORO7-PAM16
  Gene Name: CORO7-PAM16 readthrough
  ENST ID: ENST00000617295
  CDS Start-End: 70-3216

SEQ ID NO: 122389 - DNA, 3815 bp, Homo sapiens; identical to SEQ ID NO: 122386
  Payload ID: 3979
  Gene Symbol: CORO7-PAM16
  Gene Name: CORO7-PAM16 readthrough
  ENST ID: ENST00000632291
  CDS Start-End: 467-2074

SEQ ID NO: 122390 - DNA, 2603 bp, Homo sapiens
  Payload ID: 3980
  Gene Symbol: CORO6
  Gene Name: coronin 6
  Uniprot ID: Q6QEF8
  ENST ID: ENST00000345068
  CDS Start-End: 215-1633
gatggcagcggcagctggggctgcagcggcgccgggctctagagagccgcaggatcggccagagtgcggagctggacacccgggtcccagatactacagacacccggagaggtggctccttcgccctgaagccttcctcggccccctacgcactcgggccccttccgcagaggattcgcagcgtgagcgccccgcagcccgctcaggaccagctatgagcagacgtgtggttcggcaaagcaagttccgccatgtgtttgggcaggcagcaaaggccgaccaggcctacgaggacatccgtgtgtccaaggtcacatgggacagctccttctgtgccgtcaaccccaaattcctggccattattgtggaggctggaggcgggggtgccttcatcgtcctgcctctggccaagacagggcgagtggataagaactacccactggtcactgggcacactgcccctgtgctggatattgactggtgtccacacaatgacaacgttatcgccagtgcctcagacgacaccaccatcatggtgtggcagattccagactatacccccatgcgcaacattacggaacctatcatcacacttgagggccactccaagcgtgtgggcatcctctcctggcaccctactgccaggaatgtcctgctcagtgcaggtggtgacaatgtgatcatcatctggaatgtgggcaccggggaggtgctgctgagcctggatgatatgcacccagacgtcatccacagtgtgtgctggaacagcaacggtagcctgctagccaccacctgcaaggacaagaccttgcgcatcattgaccccagaaaaggccaagtggtggcggagaggtttgcggcccacgaggggatgaggcccatgcgggccgtcttcacgcgccagggccatatcttcaccacgggcttcacccgcatgagccagcgagagctgggcctgtgggacccgaacaacttcgaggagccagtggcactgcaggagatggacacaagcaacggggtcctattgcccttttacgatcccgactccagcatcgtctacctgtgtggcaagggcgacagcagcattcggtactttgagattaccgacgagccgcctttcgtgcactacctgaacacgttcagcagcaaagagccgcagcggggcatgggtttcatgcccaaaaggggactggatgtcagcaagtgtgagatcgcccggttctacaagctacacgaaagaaagtgtgaacctatcatcatgactgtgccccgcaagtcagacctcttccaggacgatctgtacccggatacgccaggcccggagccggccctagaagcggacgaatggctatccggccaggacgccgaacccgtgctcatttcgctgagggacggctatgtgccccccaagcaccgcgagctccgggtcacgaagcgcaacatcctggacgtgcgcccgccctccggcccccgccgcagccagtcggccagcgacgcccccttgtcgcagcagcacaccctggagacgctgctggaagagatcaaggccctccgcgagcgggtgcaggcccaggagcagcgcatcacggctctggagaacatgctgtgcgagctggtggacggcacggactagccccgcgcgccaggcaggcggagcggggcggggcgcacaagctcggccccgccccggcttttagtcccgaactccggaccccgccttcttgggctgggcccgggggcgggactggggagggaactccgcccctcgcgggagaccagaactcttggagcttaggggagacccacgtcgctccagcggaggctggactgcgagcctcgtctgggactcggctggagctggcctagggaggcctggggtaacctggggggctcagcaatggtgctgcacggcgaggtggtgtccccctttgtcctccgcccagggcagggaaagtgcttagtattagcgtgatgcttggggttattggagcctgagcttgacctcaaacgggtggcgatttgatgggtacccccaggctggggaaaatgacagcgcttctcctaatcagctcactggattccatcaccctgagcggtaaaccagatgggcgtcaccccagttctgcagacacatacacaacccgtttgctgcagagccggacccagtggctacacccacagcggtctgtggtagagaactctcttccttctttccaccgacaggggcgagggctgcttcctcgcggcagcccccgcgaagaaatctcgagagaactggcatgaggagttaggttcatcacaaatacacacacactgcccccaaccctctgccgttgcctctctcagaaaaacaagacgtactgaatgaaatattttactaagcgttcagtctgtgcctcctgcatgggtgggagtgaggggaacgagacccccagcctctgcaaatgctacccccaggctcctgggagacctggcgatgcactcctgggctcagggtccatcaggcagcctcttaccctagagctctctccactctgaggttcagaaggaccccaacccacaccgtaggcgttccccccaagtaaagttaggtagcaaaagcc

SEQ ID NO: 122391 - DNA, 2397 bp, Homo sapiens
  Payload ID: 3980
  Gene Symbol: CORO6
  Gene Name: coronin 6
  Uniprot ID: Q6QEF8
  ENST ID: ENST00000388767
  CDS Start-End: 3-1421
ctatgagcagacgtgtggttcggcaaagcaagttccgccatgtgtttgggcaggcagcaaaggccgaccaggcctacgaggacatccgtgtgtccaaggtcacatgggacagctccttctgtgccgtcaaccccaaattcctggccattattgtggaggctggaggcgggggtgccttcatcgtcctgcctctggccaagacagggcgagtggataagaactacccactggtcactgggcacactgcccctgtgctggatattgactggtgtccacacaatgacaacgttatcgccagtgcctcagacgacaccaccatcatggtgtggcagattccagactatacccccatgcgcaacattacggaacctatcatcacacttgagggccactccaagcgtgtgggcatcctctcctggcaccctactgccaggaatgtcctgctcagtgcaggtggtgacaatgtgatcatcatctggaatgtgggcaccggggaggtgctgctgagcctggatgatatgcacccagacgtcatccacagtgtgtgctggaacagcaacggtagcctgctagccaccacctgcaaggacaagaccttgcgcatcattgaccccagaaaaggccaagtggtggcggagaggtttgcggcccacgaggggatgaggcccatgcgggccgtcttcacgcgccagggccatatcttcaccacgggcttcacccgcatgagccagcgagagctgggcctgtgggacccgaacaacttcgaggagccagtggcactgcaggagatggacacaagcaacggggtcctattgcccttttacgatcccgactccagcatcgtctacctgtgtggcaagggcgacagcagcattcggtactttgagattaccgacgagccgcctttcgtgcactacctgaacacgttcagcagcaaagagccgcagcggggcatgggtttcatgcccaaaaggggactggatgtcagcaagtgtgagatcgcccggttctacaagctacacgaaagaaagtgtgaacctatcatcatgactgtgccccgcaagtcagacctcttccaggacgatctgtacccggatacgccaggcccggagccggccctagaagcggacgaatggctatccggccaggacgccgaacccgtgctcatttcgctgagggacggctatgtgccccccaagcaccgcgagctccgggtcacgaagcgcaacatcctggacgtgcgcccgccctccggcccccgccgcagccagtcggccagcgacgcccccttgtcgcagcagcacaccctggagacgctgctggaagagatcaaggccctccgcgagcgggtgcaggcccaggagcagcgcatcacggctctggagaacatgctgtgcgagctggtggacggcacggactagccccgcgcgccaggcaggcggagcggggcggggcgcacaagctcggccccgccccggcttttagtcccgaactccggaccccgccttcttgggctgggcccgggggcgggactggggagggaactccgcccctcgcgggagaccagaactcttggagcttaggggagacccacgtcgctccagcggaggctggactgcgagcctcgtctgggactcggctggagctggcctagggaggcctggggtaacctggggggctcagcaatggtgctgcacggcgaggtggtgtccccctttgtcctccgcccagggcagggaaagtgcttagtattagcgtgatgcttggggttattggagcctgagcttgacctcaaacgggtggcgatttgatgggtacccccaggctggggaaaatgacagcgcttctcctaatcagctcactggattccatcaccctgagcggtaaaccagatgggcgtcaccccagttctgcagacacatacacaacccgtttgctgcagagccggacccagtggctacacccacagcggtctgtggtagagaactctcttccttctttccaccgacaggggcgagggctgcttcctcgcggcagcccccgcgaagaaatctcgagagaactggcatgaggagttaggttcatcacaaatacacacacactgcccccaaccctctgccgttgcctctctcagaaaaacaagacgtactgaatgaaatattttactaagcgttcagtctgtgcctcctgcatgggtgggagtgaggggaacgagacccccagcctctgcaaatgctacccccaggctcctgggagacctggcgatgcactcctgggctcagggtccatcaggcagcctcttaccctagagctctctccactctgaggttcagaaggaccccaacccacaccgtaggcgttccccccaagtaaagttaggtagcaaaagcctccggt

SEQ ID NO: 122392 - DNA, 1416 bp, Homo sapiens
  Payload ID: 3980
  Gene Symbol: CORO6
  Gene Name: coronin 6
  ENST ID: ENST00000584969
  CDS Start-End: 1-1416
atgagcagacgtgtggttcggcaaagcaagttccgccatgtgtttgggcaggcagcaaaggccgaccaggcctacgaggacatccgtgtgtccaaggtcacatgggacagctccttctgtgccgtcaaccccaaattcctggccattattgtggaggctggaggcgggggtgccttcatcgtcctgcctctggccaagacagggcgagtggataagaactacccactggtcactgggcacactgcccctgtgctggatattgactggtgtccacacaatgacaacgttatcgccagtgcctcagacgacaccaccatcatggtgtggcagattccagactatacccccatgcgcaacattacggaacctatcatcacacttgagggccactccaagcgtgtgggcatcctctcctggcaccctactgccaggaatgtcctgctcagtgcaggtggtgacaatgtgatcatcatctggaatgtgggcaccggggaggtgctgctgagcctggatgatatgcacccagacgtcatccacagtgtgtgctggaacagcaacggtagcctgctagccaccacctgcaaggacaagaccttgcgcatcattgaccccagaaaaggccaagtggtggcggagcaagcccggcctcacgagggcgcccgcccgctgcgggctgtcttcaccgcagacgggaagctgctcagcaccggcttcagcaggatgagtgagcggcaactcgcgctctgggacccgaacaacttcgaggagccagtggcactgcaggagatggacacaagcaacggggtcctattgcccttttacgatcccgactccagcatcgtctacctgtgtggcaagggcgacagcagcattcggtactttgagattaccgacgagccgcctttcgtgcactacctgaacacgttcagcagcaaagagccgcagcggggcatgggtttcatgcccaaaaggggactggatgtcagcaagtgtgagatcgcccggttctacaagctacacgaaagaaagtgtgaacctatcatcatgactgtgccccgcaagtcagacctcttccaggacgatctgtacccggatacgccaggcccggagccggccctagaagcggacgaatggctatccggccaggacgccgaacccgtgctcatttcgctgagggacggctatgtgccccccaagcaccgcgagctccgggtcacgaagcgcaacatcctggacgtgcgcccgccctccggcccccgccgcagccagtcggccagcgacgcccccttgtcgcagcacaccctggagacgctgctggaagagatcaaggccctccgcgagcgggtgcaggcccaggagcagcgcatcacggctctggagaacatgctgtgcgagctggtggacggcacggactag

SEQ ID NO: 122393 - DNA, 2345 bp, Homo sapiens
  Payload ID: 3980
  Gene Symbol: CORO6
  Gene Name: coronin 6
  ENST ID: ENST00000580212
  CDS Start-End: 80-1378
ctcctccctcccgcagctcacaggactaaggaccaaaggcatttctgggcactgagatcctacctctctgcctgcagctatgagcagacgtgtggttcggcaaagcaagttccgccatgtgtttgggcaggcagcaaaggccgaccaggcctacgaggacatccgtgtgtccaaggtcacatgggacagctccttctgtgccgtcaaccccaaattcctggccattattgtggaggctggaggcgggggtgccttcatcgtcctgcctctggccaagacagggcgagtggataagaactacccactggtcactgggcacactgcccctgtgctggatattgactggtgtccacacaatgacaacgttatcgccagtgcctcagacgacaccaccatcatggtgtggcagattccagactatacccccatgcgcaacattacggaacctatcatcacacttgagggccactccaagcgtgtgggcatcctctcctggcaccctactgccaggaatgtcctgctcagtgcaggtggtgacaatgtgatcatcatctggaatgtgggcaccggggaggtgctgctgagcctggatgatatgcacccagacgtcatccacagtgtgtgctggaacagcaacggtagcctgctagccaccacctgcaaggacaagaccttgcgcatcattgaccccagaaaaggccaagtggtggcgaacaacttcgaggagccagtggcactgcaggagatggacacaagcaacggggtcctattgcccttttacgatcccgactccagcatcgtctacctgtgtggcaagggcgacagcagcattcggtactttgagattaccgacgagccgcctttcgtgcactacctgaacacgttcagcagcaaagagccgcagcggggcatgggtttcatgcccaaaaggggactggatgtcagcaagtgtgagatcgcccggttctacaagctacacgaaagaaagtgtgaacctatcatcatgactgtgccccgcaagtcagacctcttccaggacgatctgtacccggatacgccaggcccggagccggccctagaagcggacgaatggctatccggccaggacgccgaacccgtgctcatttcgctgagggacggctatgtgccccccaagcaccgcgagctccgggtcacgaagcgcaacatcctggacgtgcgcccgccctccggcccccgccgcagccagtcggccagcgacgcccccttgtcgcagcagcacaccctggagacgctgctggaagagatcaaggccctccgcgagcgggtgcaggcccaggagcagcgcatcacggctctggagaacatgctgtgcgagctggtggacggcacggactagccccgcgcgccaggcaggcggagcggggcggggcgcacaagctcggccccgccccggcttttagtcccgaactccggaccccgccttcttgggctgggcccgggggcgggactggggagggaactccgcccctcgcgggagaccagaactcttggagcttaggggagacccacgtcgctccagcggaggctggactgcgagcctcgtctgggactcggctggagctggcctagggaggcctggggtaacctggggggctcagcaatggtgctgcacggcgaggtggtgtccccctttgtcctccgcccagggcagggaaagtgcttagtattagcgtgatgcttggggttattggagcctgagcttgacctcaaacgggtggcgatttgatgggtacccccaggctggggaaaatgacagcgcttctcctaatcagctcactggattccatcaccctgagcggtaaaccagatgggcgtcaccccagttctgcagacacatacacaacccgtttgctgcagagccggacccagtggctacacccacagcggtctgtggtagagaactctcttccttctttccaccgacaggggcgagggctgcttcctcgcggcagcccccgcgaagaaatctcgagagaactggcatgaggagttaggttcatcacaaatacacacacactgcccccaaccctctgccgttgcctctctcagaaaaacaagacgtactgaatgaaatattttactaagcgttcagtctgtgcctcctgcatgggtgggagtgaggggaacgagacccccagcctctgcaaatgctacccccaggctcctgggagacctggcgatgcactcctgggctcagggtccatcaggcagcctcttaccctagagctctctccactctgaggttcagaaggaccccaacccacaccgtaggcgttccccccaagtaaagttaggtagcaaaa

SEQ ID NO: 122394 - DNA, 868 bp, Homo sapiens
  Payload ID: 3980
  Gene Symbol: CORO6
  Gene Name: coronin 6
  ENST ID: ENST00000492276
  CDS Start-End: 273-868
ggcagcggcagctggggctgcagcggcgccgggctctagagagccgcaggatcggccagagtgcggagctggacacccgggtcccagatactacagacacccggagaggtggctccttcgccctgaagccttcctcggccccctacgcactcgggccccttccgcagaggattcgcagcgtgagcgccccgcagcccgctcaggaccagctcacaggactaaggaccaaaggcatttctgggcactgagatcctacctctctgcctgcagctatgagcagacgtgtggttcggcaaagcaagttccgccatgtgtttgggcaggcagcaaaggccgaccaggcctacgaggacatccgtgtgtccaaggtcacatgggacagctccttctgtgccgtcaaccccaaattcctggccattattgtggaggctggaggcgggggtgccttcatcgtcctgcctctggccaagacagggcgagtggataagaactacccactggtcactgggcacactgcccctgtgctggatattgactggtgtccacacaatgacaacgttatcgccagtgcctcagacgacaccaccatcatggtgtggcagattccagactatacccccatgcgcaacattacggaacctatcatcacacttgagggccactccaagcgtgtgggcatcctctcctggcaccctactgccaggaatgtcctgctcagtgcaggtggtgacaatgtgatcatcatctggaatgtgggcaccggggaggtgctgctgagcctggatgatatgcacccagacgtcatccacagtgtgtgctggaacagcaacggtagcctgctagccaccacctgcaaggacaagacctt

SEQ ID NO: 122395 - DNA, 1581 bp, Homo sapiens
  Payload ID: 3980
  Gene Symbol: CORO6
  Gene Name: coronin 6
  ENST ID: ENST00000480954
  CDS Start-End: 1-88
cgcagacgggaagctgctcagcaccggcttcagcaggatgagtgagcggcaactcgcgctctgggacccgttttgctgcgtcgcgtgaaggatcctgcgctggcgcccccacctggtgatgccgagtccctgggggtggtttgctgtgactgcatgcggcgcgcagcggaacaacttcgaggagccagtggcactgcaggagatggacacaagcaacggggtcctattgcccttttacgatcccgactccagcatcgtctacctgtgtggcaagggcgacagcagcattcggtactttgagattaccgacgagccgcctttcgtgcactacctgaacacgttcagcagcaaagagccgcagcggggcatgggtttcatgcccaaaaggggactggatgtcagcaagtgtgagatcgcccggttctacaagctacacgaaagaaagtgtgaacctatcatcatgactgtgccccgcaagtcagacctcttccaggacgatctgtacccggatacgccaggcccggagccggccctagaagcggacgaatggctatccggccaggacgccgaacccgtgctcatttcgctgagggacggctatgtgccccccaagcaccgcgagctccgggtcacgaagcgcaacatcctggacgtgcgcccgccctccggcccccgccgcagccagtcggccagcgacgcccccttgtcgcagcacaccctggagacgctgctggaagagatcaaggccctccgcgagcgggtgcaggcccaggagcagcgcatcacggctctggagaacatgctgtgcgagctggtggacggcacggactagccccgcgcgccaggcaggcggagcggggcggggcgcacaagctcggccccgccccggcttttagtcccgaactccggaccccgccttcttgggctgggcccgggggcgggactggggagggaactccgcccctcgcgggagaccagaactcttggagcttaggggagacccacgtcgctccagcggaggctggactgcgagcctcgtctgggactcggctggagctggcctagggaggcctggggtaacctggggggctcagcaatggtgctgcacggcgaggtggtgtccccctttgtcctccgcccagggcagggaaagtgcttagtattagcgtgatgcttggggttattggagcctgagcttgacctcaaacgggtggcgatttgatgggtacccccaggctggggaaaatgacagcgcttctcctaatcagctcactggattccatcaccctgagcggtaaaccagatgggcgtcaccccagttctgcagacacatacacaacccgtttgctgcagagccggacccagtggctacacccacagcggtctgtggtagagaactctcttccttctttccaccgacaggggcgagggctgcttcctcgcggcagcccccgcgaagaaatctcgagagaactggcatgaggagttaggttcatcacaaatacacacacactgcccccaaccctctgccgttgcctctctcagaaaaacaagacgtactgaatgaaatattttactaag

SEQ ID NO: 122396 - DNA, 559 bp, Homo sapiens
  Payload ID: 3980
  Gene Symbol: CORO6
  Gene Name: coronin 6
  ENST ID: ENST00000584602
  CDS Start-End: 338-559
aggttgatggcagcggcagctggggctgcagcggcgccgggctctagagagccgcaggatcggccagagtgcggagctggacacccgggtcccagatactacagacacccggagaggtggctccttcgccctgaagccttcctcggccccctacgcactcgggccccttccgcagaggattcgcagcgtgagcgccccgcagcccgctcaggaccagacagggcgagtggataagaactacccactggtcactgggcacactgcccctgtgctggatattgactggtgtccacacaatgacaacgttatcgccagtgcctcagacgacaccaccatcatggtgtggcagattccagactatacccccatgcgcaacattacggaacctatcatcacacttgagggccactccaagcgtgtgggcatcctctcctggcaccctactgccaggaatgtcctgctcagtgcaggtggtgacaatgtgatcatcatctggaatgtgggcaccggggaggtgctgctgagcctggatgatatgcacccagacgtcatccacagt

SEQ ID NO: 122397 - DNA, 3540 bp, Homo sapiens
  Payload ID: 3981
  Gene Symbol: CORO7
  Gene Name: coronin 7
  Uniprot ID: P57737
  ENST ID: ENST00000251166
  CDS Start-End: 147-2924
gattggcagtggggcgcgccgggggcgtgaccgcggcattgggtcccgggtggggccgaggcagcgggagtcgcggttgctcagcgtgcacctgagacccgacgcccggggtcctcgaagacgcgtccgccgccgtgcccgtcgccatgaaccgcttcagggtgtccaagttccggcacaccgaggctcggccgccccgccgcgagtcctggatcagtgacattcgagcaggaaccgccccttcatgcaggaaccacatcaaatcaagctgcagcttgatcgccttcaactccgaccgtcctggtgtactgggcattgtgcctctgcaaggccaaggagaggacaagcgacgcgtggcccacctgggctgccattcagacctagtcaccgacttggacttctcgccctttgatgacttcctcctggccacaggctcggctgacaggacggtaaaactctggcgactgccagggcctggccaggccctgccctcagcacccggggtggtgctgggccccgaggacctcccagtggaggtactgcagttccaccccacctctgacggcattctggtgagcgcagcaggcaccactgtgaaggtctgggacgcagccaagcagcagcccctgacagagctggcagcccatggggacctggtgcagagcgccgtctggagccgagatggagccctggtgggcacggcgtgcaaggacaagcagctgcggatctttgaccccagaacaaagccgcgggcctctcagagcacgcaggcccatgagaacagcagggatagccggctggcatggatgggcacctgggagcaccttgtgtctactggattcaaccagatgcgtgagcgcgaagtgaagctgtgggacacgcggttcttctccagcgccctggcctccctcaccttggacacctcgcttgggtgtctcgtgcctctgctggaccctgactctgggctcctggtcctggcaggaaagggcgagaggcagctgtactgttacgaggtggtcccgcagcagccggcgctgagcccagtgacccagtgtgtcctggagagcgtgctgcgtggggctgcccttgtgccccggcaggcgctggccgtcatgagctgcgaggtactccgcgtcctacagctgagcgacacagccatcgtgcccatcggctaccatgtgccccgcaaggctgtggagttccacgaggacctgttcccggacactgccggctgtgtgcctgccaccgacccccatagctggtgggctggggacaaccagcaggtgcagaaggtcagcctcaaccccgcctgccggccccacccgagcttcacttcctgtctggtgccccctgcggagcccctccctgacacagcccagcctgcggtgatggagacacccgtgggtgatgcagacgcaagcgagggtttctcttcccctcccagttcgctgacctcgccctccacgccctccagcctggggccctcactctccagcaccagtggcatcgggaccagccccagtttgaggtcgctgcagagcctgctgggccccagttccaagttccgccatgctcagggcactgtcctgcaccgagacagccacatcaccaacctcaaggggctcaacctcaccacacctggtgagagtgacggcttctgtgccaacaagctgcgtgtggccgtgccgctgctcagcagcgggggacaggtggctgtgcttgagctacggaagcctggccgcctgcccgacacggcactgcccacgctgcagaatggggcagctgtgactgatctggcctgggacccctttgacccccatcgcctcgctgtggctggtgaggacgccaggatccgactgtggcgggtacccgcagagggcctggaagaggtgctcaccacgccagagactgtgctcacaggccacacggagaagatctgctccctgcgcttccacccactggcagccaatgtgctggcctcgtcctcctatgacctcactgttcgcatctgggaccttcaggctggagctgatcggctgaagctgcagggccaccaagaccagatcttcagcctggcctggagtcctgatgggcagcagctggccactgtctgcaaggatgggcgtgtgcgggtctacaggccccggagtggccctgagcccctgcaggaaggcccagggcccaagggaggacgcggagctcgcattgtctgggtatgtgatggtcgctgtctgctggtgtctggctttgacagccaaagtgagcgccagctgctcctatatgaagctgaggccctggccggcggacccttggcagtgttgggcctggacgtggctccctcaaccctgctgcccagctacgacccagacactggcctggtgctcctgaccggcaagggcgacacccgtgtattcctgtacgagctgctccccgagtcccctttcttcctggagtgcaacagcttcacgtcgcctgacccccacaagggcctcgtcctcctgcctaagacggagtgcgacgtgcgggaagtggagctgatgcggtgcctgcggctgcgtcagtcctccctggagcctgtggccttccggctgccccgagtccggaaagagttcttccaggatgacgtgttcccagacacggctgtgatctgggagcctgtgctcagtgccgaggcctggctgcaaggcgctaatgggcagccctggcttctcagcctgcagcctcctgacatgagcccagtgagccaagccccccgagaggcccctgctcgtcgggccccatcctcagcgcagtacctggaagaaaagtctgaccagcaaaagaaggaggagctgctgaatgccatggtggcaaaactggggaaccgggaggacccactcccccaggactcctttgaaggcgtggacgaggacgagtgggactagcctgcgcccccgtcacctccacctcacctgtgctgccacttcctagtgcacacctcacggctcatcctcaagctggaagatacctctctggccccggcacatgtcacccctgcactcctgccttcccgtgggcacttccacatcctctgggcctctggcagttcccagggactgttttcacctctgctgtctctggggtcagctgctgctcatcagctgcccgctagcatgtggccaggggtgcagggtggcggggggtcagcagcatgtccctgggcaggccctgggcaccctgtctcccctggtctcactgctgacctgggctggtcccagcctggattggcctcatccaggatctttggtcaccccacgctgccccatcttgcctgctgttccagttctggtcaagggccttgggggctggccccccaccaggccttctagagcagcaccagtctcagggccctgggaccagctgccctacttcccaggtttgtagccaggagaagggggcatcacagagctgatggtccaataaggggggtgtgagccccgcagggactggcccgcacctgccttggatgttttcagcaattaaacttttttaagctggcca

SEQ ID NO: 122398 - DNA, 3392 bp, Homo sapiens
  Payload ID: 3981
  Gene Symbol: CORO7
  Gene Name: coronin 7
  Uniprot ID: P57737
  ENST ID: ENST00000537233
  CDS Start-End: 112-2835
gcattgggtcccgggtggggccgaggcagcgggagtcgcggttgctcagcgtgcacctgagacccgacgcccggggtcctcgaagacgcgtccgccgccgtgcccgtcgccatgaaccgcttcagggtgtccaagttccggcacaccgaggctcggccgccccgccgcgagtcctggatcagtgacattcgagcaggaaccgccccttcatgcaggaaccacatcaaatcaagctgcagcttgatcgccttcaactccgaccgtcctggtgtactgggcattgtgcctctgcaaggccaaggagaggacaagcgacgcgtggcccacctgggctgccattcaggctcggctgacaggacggtaaaactctggcgactgccagggcctggccaggccctgccctcagcacccggggtggtgctgggccccgaggacctcccagtggaggtactgcagttccaccccacctctgacggcattctggtgagcgcagcaggcaccactgtgaaggtctgggacgcagccaagcagcagcccctgacagagctggcagcccatggggacctggtgcagagcgccgtctggagccgagatggagccctggtgggcacggcgtgcaaggacaagcagctgcggatctttgaccccagaacaaagccgcgggcctctcagagcacgcaggcccatgagaacagcagggatagccggctggcatggatgggcacctgggagcaccttgtgtctactggattcaaccagatgcgtgagcgcgaagtgaagctgtgggacacgcggttcttctccagcgccctggcctccctcaccttggacacctcgcttgggtgtctcgtgcctctgctggaccctgactctgggctcctggtcctggcaggaaagggcgagaggcagctgtactgttacgaggtggtcccgcagcagccggcgctgagcccagtgacccagtgtgtcctggagagcgtgctgcgtggggctgcccttgtgccccggcaggcgctggccgtcatgagctgcgaggtactccgcgtcctacagctgagcgacacagccatcgtgcccatcggctaccatgtgccccgcaaggctgtggagttccacgaggacctgttcccggacactgccggctgtgtgcctgccaccgacccccatagctggtgggctggggacaaccagcaggtgcagaaggtcagcctcaaccccgcctgccggccccacccgagcttcacttcctgtctggtgccccctgcggagcccctccctgacacagcccagcctgcggtgatggagacacccgtgggtgatgcagacgcaagcgagggtttctcttcccctcccagttcgctgacctcgccctccacgccctccagcctggggccctcactctccagcaccagtggcatcgggaccagccccagtttgaggtcgctgcagagcctgctgggccccagttccaagttccgccatgctcagggcactgtcctgcaccgagacagccacatcaccaacctcaaggggctcaacctcaccacacctggtgagagtgacggcttctgtgccaacaagctgcgtgtggccgtgccgctgctcagcagcgggggacaggtggctgtgcttgagctacggaagcctggccgcctgcccgacacggcactgcccacgctgcagaatggggcagctgtgactgatctggcctgggacccctttgacccccatcgcctcgctgtggctggtgaggacgccaggatccgactgtggcgggtacccgcagagggcctggaagaggtgctcaccacgccagagactgtgctcacaggccacacggagaagatctgctccctgcgcttccacccactggcagccaatgtgctggcctcgtcctcctatgacctcactgttcgcatctgggaccttcaggctggagctgatcggctgaagctgcagggccaccaagaccagatcttcagcctggcctggagtcctgatgggcagcagctggccactgtctgcaaggatgggcgtgtgcgggtctacaggccccggagtggccctgagcccctgcaggaaggcccagggcccaagggaggacgcggagctcgcattgtctgggtatgtgatggtcgctgtctgctggtgtctggctttgacagccaaagtgagcgccagctgctcctatatgaagctgaggccctggccggcggacccttggcagtgttgggcctggacgtggctccctcaaccctgctgcccagctacgacccagacactggcctggtgctcctgaccggcaagggcgacacccgtgtattcctgtacgagctgctccccgagtcccctttcttcctggagtgcaacagcttcacgtcgcctgacccccacaagggcctcgtcctcctgcctaagacggagtgcgacgtgcgggaagtggagctgatgcggtgcctgcggctgcgtcagtcctccctggagcctgtggccttccggctgccccgagtccggaaagagttcttccaggatgacgtgttcccagacacggctgtgatctgggagcctgtgctcagtgccgaggcctggctgcaaggcgctaatgggcagccctggcttctcagcctgcagcctcctgacatgagcccagtgagccaagccccccgagaggcccctgctcgtcgggccccatcctcagcgcagtacctggaagaaaagtctgaccagcaaaagaaggaggagctgctgaatgccatggtggcaaaactggggaaccgggaggacccactcccccaggactcctttgaaggcgtggacgaggacgagtgggactagcctgcgcccccgtcacctccacctcacctgtgctgccacttcctagtgcacacctcacggctcatcctcaagctggaagatacctctctggccccggcacatgtcacccctgcactcctgccttcccgtgggcacttccacatcctctgggcctctggcagttcccagggactgttttcacctctgctgtctctggggtcagctgctgctcatcagctgcccgctagcatgtggccaggggtgcagggtggcggggggtcagcagcatgtccctgggcaggccctgggcaccctgtctcccctggtctcactgctgacctgggctggtcccagcctggattggcctcatccaggatctttggtcaccccacgctgccccatcttgcctgctgttccagttctggtcaagggccttgggggctggccccccaccaggccttctagagcagcaccagtctcagggccctgggaccagctgccctacttcccaggtttgtagccaggagaagggggcatcacagagctgatggtccaataaggggggtgtgagccccgca

SEQ ID NO: 122399 - DNA, 563 bp, Homo sapiens
  Payload ID: 3981
  Gene Symbol: CORO7
  Gene Name: coronin 7
  ENST ID: ENST00000572044
  CDS Start-End: 79-563
agtcgcggttgctcagcgtgcacctgagacccgacgcccggggtcctcgaagacgcgtccgccgccgtgcccgtcgccatgaaccgcttcagggtgtccaagttccggcacaccgaggctcggccgccccgccgcgaggacaagcagctgcggatctttgaccccagaacaaagccgcgggcctctcagagcacgcaggcccatgagaacagcagggatagccggctggcatggatgggcacctgggagcaccttgtgtctactggattcaaccagatgcgtgagcgcgaagtgaagctgtgggacacgcggttcttctccagcgccctggcctccctcaccttggacacctcgcttgggtgtctcgtgcctctgctggaccctgactctgggctcctggtcctggcaggaaagggcgagaggcagctgtactgttacgaggtggtcccgcagcagccggcgctgagcccagtgacccagtgtgtcctggagagcgtgctgcgtggggctgcccttgtgccccggcaggcgctggccgtcatgagctgcgaggtactccgcgt

SEQ ID NO: 122400 - DNA, 3578 bp, Homo sapiens
  Payload ID: 3981
  Gene Symbol: CORO7
  Gene Name: coronin 7
  ENST ID: ENST00000571227
  CDS Start-End: 110-250
attgggtcccgggtggggccgaggcagcgggagtcgcggttgctcagcgtgcacctgagacccgacgcccggggtcctcgaagacgcgtccgccgccgtgcccgtcgccatgaaccgcttcagggtgtccaagttccggcacaccgaggctcggccgccccgccgcgagcctgagcaggtggagccccaaagaattgctgagccaggtgccgggagacccttcggacccccgaaacggcaggaggactgatgaggggtgcgccttggaaacgatgtcagctctgctcttccgctttccgtgttattttcctggatcagtgacattcgagcaggaaccgccccttcatgcaggaaccacatcaaatcaagctgcagcttgatcgccttcaactccgaccgtcctggtgtactgggcattgtgcctctgcaaggccaaggagaggacaagcgacgcgtggcccacctgggctgccattcagacctagtcaccgacttggacttctcgccctttgatgacttcctcctggccacaggctcggctgacaggacggtaaaactctggcgactgccagggcctggccaggccctgccctcagcacccggggtggtgctgggccccgaggacctcccagtggaggtactgcagttccaccccacctctgacggcattctgagctggcagcccatggggacctggtgcagagcgccgtctggagccgagatggagccctggtgggcacggcgtgcaaggacaagcagctgcggatctttgaccccagaacaaagccgcgggcctctcagagcacgcaggcccatgagaacagcagggatagccggctggcatggatgggcacctgggagcaccttgtgtctactggattcaaccagatgcgtgagcgcgaagtgaagctgtgggacacgcggttcttctccagcgccctggcctccctcaccttggacacctcgcttgggtgtctcgtgcctctgctggaccctgactctgggctcctggtcctggcaggaaagggcgagaggcagctgtactgttacgaggtggtcccgcagcagccggcgctgagcccagtgacccagtgtgtcctggagagcgtgctgcgtggggctgcccttgtgccccggcaggcgctggccgtcatgagctgcgaggtactccgcgtcctacagctgagcgacacagccatcgtgcccatcggctaccatgtgccccgcaaggctgtggagttccacgaggacctgttcccggacactgccggctgtgtgcctgccaccgacccccatagctggtgggctggggacaaccagcaggtgcagaaggtcagcctcaaccccgcctgccggccccacccgagcttcacttcctgtctggtgccccctgcggagcccctccctgacacagcccagcctgcggtgatggagacacccgtgggtgatgcagacgcaagcgagggtttctcttcccctcccagttcgctgacctcgccctccacgccctccagcctggggccctcactctccagcaccagtggcatcgggaccagccccagtttgaggtcgctgcagagcctgctgggccccagttccaagttccgccatgctcagggcactgtcctgcaccgagacagccacatcaccaacctcaaggggctcaacctcaccacacctggtgagagtgacggcttctgtgccaacaagctgcgtgtggccgtgccgctgctcagcagcgggggacaggtggctgtgcttgagctacggaagcctggccgcctgcccgacacggcactgcccacgctgcagaatggggcagctgtgactgatctggcctgggacccctttgacccccatcgcctcgctgtggctggtgaggacgccaggatccgactgtggcgggtacccgcagagggcctggaagaggtgctcaccacgccagagactgtgctcacaggccacacggagaagatctgctccctgcgcttccacccactggcagccaatgtgctggcctcgtcctcctatgacctcactgttcgcatctgggaccttcaggctggagctgatcggctgaagctgcagggccaccaagaccagatcttcagcctggcctggagtcctgatgggcagcagctggccactgtctgcaaggatgggcgtgtgcgggtctacaggccccggagtggccctgagcccctgcaggaaggcccagggcccaagggaggacgcggagctcgcattgtctgggtatgtgatggtcgctgtctgctggtgtctggctttgacagccaaagtgagcgccagctgctcctatatgaagctgaggccctggccggcggacccttggcagtgttgggcctggacgtggctccctcaaccctgctgcccagctacgacccagacactggcctggtgctcctgaccggcaagggcgacacccgtgtattcctgtacgagctgctccccgagtcccctttcttcctggagtgcaacagcttcacgtcgcctgacccccacaagggcctcgtcctcctgcctaagacggagtgcgacgtgcgggaagtggagctgatgcggtgcctgcggctgcgtcagtcctccctggagcctgtggccttccggctgccccgagtccggaaagagttcttccaggatgacgtgttcccagacacggctgtgatctgggagcctgtgctcagtgccgaggcctggctgcaaggcgctaatgggcagccctggcttctcagcctgcagcctcctgacatgagcccagtgagccaagccccccgagaggcccctgctcgtcgggccccatcctcagcgcagtacctggaagaaaagtctgaccagcaaaagaaggaggagctgctgaatgccatggtggcaaaactggggaaccgggaggacccactcccccaggactcctttgaaggcgtggacgaggacgagtgggactagcctgcgcccccgtcacctccacctcacctgtgctgccacttcctagtgcacacctcacggctcatcctcaagctggaagatacctctctggccccggcacatgtcacccctgcactcctgccttcccgtgggcacttccacatcctctgggcctctggcagttcccagggactgttttcacctctgctgtctctggggtcagctgctgctcatcagctgcccgctagcatgtggccaggggtgcagggtggcggggggtcagcagcatgtccctgggcaggccctgggcaccctgtctcccctggtctcactgctgacctgggctggtcccagcctggattggcctcatccaggatctttggtcaccccacgctgccccatcttgcctgctgttccagttctggtcaagggccttgggggctggccccccaccaggccttctagagcagcaccagtctcagggccctgggaccagctgccctacttcccaggtttgtagccaggagaagggggcatcacagagctgatggtccaataaggggggtgtgagccccgcagggactggcccgcacctgccttggatgttttcagcaattaaacttttttaagctggc

SEQ ID NO: 122401 - DNA, 1890 bp, Homo sapiens
  Payload ID: 3981
  Gene Symbol: CORO7
  Gene Name: coronin 7
  ENST ID: ENST00000571756
  CDS Start-End: 79-738
agtcgcggttgctcagcgtgcacctgagacccgacgcccggggtcctcgaagacgcgtccgccgccgtgcccgtcgccatgaaccgcttcagggtgtccaagttccggcacaccgaggctcggccgccccgccgcgagtcctggatcagtgacattcgagcaggaaccgccccttcatgcaggaaccacatcaaatcaagctgcagcttgatcgccttcaactccgaccgtcctggtgtactgggcattgtgcctctgcaaggccaaggagaggacaagcgacgcgtggcccacctgggctgccattcagacctagtcaccgacttggacttctcgccctttgatgacttcctcctggccacaggctcggctgacaggacggtaaaactctggcgactgccagggcctggccaggccctgccctcagcacccggggtggtgctgggccccgaggacctcccagtggaggtactgcagttccaccccacctctgacggcattctgagctggcagcccatggggacctggtgcagagcgccgtctggagccgagatggagccctggtgggcacggcgtgcaaggacaagcagctgcggatctttgaccccagaacaaagccgcgggcctctcagagcacgcaggcccatgagaacagcagggatagccggctggcatggatgggcacctgggagcaccttgtgtctactggattcaaccagatgcgtgagcgcgaagtgaagctgtgggacacgcggttcttctccagcgccctggcctccctcaccttggacacctcgcttgggtgtctcgtgcctctgctggaccctgactctgggctcctggtcctggcaggaaagggcgagaggcagctgtactgttacgaggtggtcccgcagcagccggcgctgagcccagtgacccagtgtgtcctggagagcgtgctgcgtggggctgcccttgtgccccggcaggcgctggccgtcatgagctgcgaggtactccgcgtcctacagctgagcgacacagccatcgtgcccatcggctaccatgtgccccgcaaggctgtggagttccacgaggacctgttcccggacactgccggctgtgtgcctgccaccgacccccatagctggtgggctggggacaaccagcaggtgcagaaggtcagcctcaaccccgcctgccggccccacccgagcttcacttcctgtctggtgccccctgcggagcccctccctgacacagcccagcctgcggtgatggagacacccgtgggtgatgcagacgcaagcgagggtttctcttcccctcccagttcgctgacctcgccctccacgccctccagcctggggccctcactctccagcaccagtggcatcgggaccagccccagtttgaggtcgctgcagagcctgctgggccccagttccaagttccgccatgctcagggcactgtcctgcaccgagacagccacatcaccaacctcaaggggctcaacctcaccacacctggtgagagtgacggcttctgtgccaacaagctgcgtgtggccgtgccgctgctcagcagcgggggacaggtggctgtgcttgaggtgagggccccaccccaccagggctgcccctcagttccctgcctgtggcaaagacgcggagggccttagctacccacacaacacagggagcacaaaccttgtgtcaggctcctgcccgcctgtcctgtgatcctcccagccacctgccatggggcctgccacttttatccccattttacagatgagggagaagaggcacagagaggtttagtgacctgcccgggtcacacagctgtgtaagtggtggagctgggatccgaagcccggccacctgagccctaagccggagcttttc

SEQ ID NO: 122402 - DNA, 593 bp, Homo sapiens
  Payload ID: 3981
  Gene Symbol: CORO7
  Gene Name: coronin 7
  ENST ID: ENST00000572898
  CDS Start-End: 110-593
attgggtcccgggtggggccgaggcagcgggagtcgcggttgctcagcgtgcacctgagacccgacgcccggggtcctcgaagacgcgtccgccgccgtgcccgtcgccatgaaccgcttcagggtgtccaagttccggcacaccgaggctcggccgccccgccgcgagtcctggatcagtgacattcgagcaggaaccgccccttcatgcaggaaccacatcaaatcaagctgcagcttgatcgccttcaactccgaccgtcctggtgtactgggcattgtgcctctgcaaggccaaggagaggacaagcgacgcgtggcccacctgggctgccattcagacctagtcaccgacttggacttctcgccctttgatgacttcctcctggccacaggctcggctgacaggacggtaaaactctggcgactgccagggcctggccaggccctgccctcagcacccggggtggtgctgggccccgaggacctcccagtggaggtactgcagttccaccccacctctgacggcattctgagctggcagcccatggggacctggtgcagagcgccgtctggagccgagatggagccct

SEQ ID NO: 122403 - DNA, 578 bp, Homo sapiens
  Payload ID: 3981
  Gene Symbol: CORO7
  Gene Name: coronin 7
  ENST ID: ENST00000571052
  CDS Start-End: 407-578
gagtcgcggttgctcagcgtgcacctgagacccgacgcccggggtcctcgaagacgcgtccgccgccgtgcccgtcgccatgaaccgcttcagggtgtccaagttccggcacaccgaggctcggccgccccgccgcgagacctagtcaccgacttggacttctcgccctttgatgacttcctcctggccacaggctcggctgacaggacggtaaaactctggcgactgccagggcctggccaggccctgccctcagcacccggggtggtgctgggccccgaggacctcccagtggaggtactgcagttccaccccacctctgacggcattctggtgagcgcagcaggcaccactgtgaaggtctgggacgcagccaagcagcagcccctgacagagctggcagcccatggggacctggtgcagagcgccgtctggagccgagatggagccctggtgggcacggcgtgcaaggacaagcagctgcggatctttgaccccagaacaaagccgcgggcctctcagagcacgcaggcccatgagaacagcagggatagccggctggcatggatgggcacctg

SEQ ID NO: 122404 - DNA, 1066 bp, Homo sapiens
  Payload ID: 3981
  Gene Symbol: CORO7
  Gene Name: coronin 7
  ENST ID: ENST00000576437
  CDS Start-End: 361-687
ttgggtcccgggtggggccgaggcagcgggagtcgcggttgctcagcgtgcacctgagacccgacgcccggggtcctcgaagacgcgtccgccgccgtgcccgtcgccatgaaccgcttcagggtgtccaagttccggcacaccgaggctcggctgacaggacggtaaaactctggcgactgccagggcctggccaggccctgccctcagcacccggggtggtgctgggccccgaggacctcccagtggaggtactgcagttccaccccacctctgacggcattctggtgagcgcagcaggcaccactgtgaaggtctgggacgcagccaagcagcagcccctgacagagctggcagcccatggggacctggtgcagagcgccgtctggagccgagatggagccctggtgggcacggcgtgcaaggacaagcagctgcggatctttgaccccagaacaaagccgcgggcctctcagggcactgtcctgcaccgagacagccacatcaccaacctcaaggggctcaacctcaccacacctggtgagagtgacggcttctgtgccaacaagctgcgtgtggccgtgccgctgctcagcagcgggggacaggtggctgtgcttgagctacggaagcctggccgcctgcccgacacggcactgcccacgctgcagaatggggcagctgtgactgatctggcctgggacccctttgacccccatcgcctcgctgtggctggtgaggacgccaggatccgactgtggcgggtacccgcagagggcctggaagaggtgctcaccacgccagagactgtgctcacaggccacacggagaagatctgctccctgcgcttccacccactggcagccaatgtgctggcctcgtcctcctatgacctcactgttcgcatctgggaccttcaggctggagctgatcggctgaagctgcagggccaccaagaccagatcttcagcctggcctggagtcctgatgggcagcagctggccactgtctgcaaggatgggcgtgtgcgggtctacaggccccggagtggccctgagcccctgca

SEQ ID NO: 122405 - DNA, 663 bp, Homo sapiens
  Payload ID: 3981
  Gene Symbol: CORO7
  Gene Name: coronin 7
  ENST ID: ENST00000572549
  CDS Start-End: 47-663
gtacaccgcaaagactccacagcaaatcctgcacacaaaatcgcgaatgctgcagccgagaccccacgcaagcaagcaccgcaggagacgtgggctgacagctgcgccccacgtgacctcccacccgcgccagtccgtcccctcggacaagcagctgcggatctttgaccccagaacaaagccgcgggcctctcagagcacgcaggcccatgagaacagcagggatagccggctggcatggatgggcacctgggagcaccttgtgtctactggattcaaccagatgcgtgagcgcgaagtgaagctgtgggacacgcggttcttctccagcgccctggcctccctcaccttggacacctcgcttgggtgtctcgtgcctctgctggaccctgactctgggctcctggtcctggcaggaaagggcgagaggcagctgtactgttacgaggtggtcccgcagcagccggcgctgagcccagtgacccagtgtgtcctggagagcgtgctgcgtggggctgcccttgtgccccggcaggcgctggccgtcatgagctgcgaggtactccgcgtcctacagctgagcgacacagccatcgtgcccatcggctaccatgtgccccgcaaggctgtggagttccacgaggacctgttcccggacactgc

SEQ ID NO: 122406 - DNA, 729 bp, Homo sapiens
  Payload ID: 3981
  Gene Symbol: CORO7
  Gene Name: coronin 7
  ENST ID: ENST00000573165
  CDS Start-End: 672-729
ttaggtagactcgccgtgcagaacctcgctattctgtgctagacaaccaatgggtgtacgttatcggtgtaaggacgtggttgaatgtagccgaacttaagtggtccgaggggtctggctaagggcgagactacaagtcccagcatacaacgcggtcctccgtcgcgccgctcccagcatgtagtgcgtggtttcctcctgctgaccctgagacttacgacgaattgcgaagaggtagatagtgctggaaggcgtgctaggtacaccgcaaagactccacagcaaatcctgcacacaaaatcgcgaatgctgcagccgagaccccacgcaagcaagcaccgcaggagacgtgggctgacagctgcgccccacgtgacctcccacccgcgccagtccgtcccctcggtatcagggcgtggcctcgcggggcggccgtacctggattggccgggaggcgggaccggtggtgcgcgcgcgaaaggagaggggcttgggggcgtggcccagggggccggagacggctgcgattggcagtggggcgcgccgggggcgtgaccgcggcattgggtcccgggtggggccgaggcagcgggagtcgcggttgctcagcgtgcacctgagacccgacgcccggggtcctcgaagacgcgtccgccgccgtgcccgtcgccatgaaccgcttcagggtgtccaagttccggcacaccgaggctcggccgccccgccgcg

SEQ ID NO: 122407 - DNA, 557 bp, Homo sapiens
  Payload ID: 3981
  Gene Symbol: CORO7
  Gene Name: coronin 7
  ENST ID: ENST00000576051
  CDS Start-End: 525-557
agattatgccccacctcttgctttaggcatgcatggaggtggaaccctggctctcaccacatacttctttactcttgattttcagtcctggatcagtgacattcgagcaggaaccgccccttcatgcaggaaccacatcaaatcaagctgcagcttgatcgccttcaactccgaccgtcctggtgtactgggcattgtgcctctgcaaggccaaggagaggacaagcgacgcgtggcccacctgggctgccattcagacctagtcaccgacttggacttctcgccctttgatgacttcctcctggccacaggctcggctgacaggacggtaaaactctggcgactgccagggcctggccaggccctgccctcagcacccggggtggtgctgggccccgaggacctcccagtggaggtactgcagttccaccccacctctgacggcattctggtgagcgcagcaggcaccactgtgaaggtctgggacgcagccaagcagcagcccctgacagagctggcagcccatggggacctggtgcagagcgccgtctggagcc

SEQ ID NO: 122408 - DNA, 581 bp, Homo sapiens
  Payload ID: 3981
  Gene Symbol: CORO7
  Gene Name: coronin 7
  ENST ID: ENST00000571059
  CDS Start-End: 112-581
gcattgggtcccgggtggggccgaggcagcgggagtcgcggttgctcagcgtgcacctgagacccgacgcccggggtcctcgaagacgcgtccgccgccgtgcccgtcgccatgaaccgcttcagggtgtccaagttccggcacaccgaggctcggccgccccgccgcgagtcctggatcagtgacattcgagcaggaaccgccccttcatgcaggaaccacatcaaatcaagctgcagcttgatcgccttcaactccgaccgtcctggtgtactgggcattgtgcctctgcaaggccaaggagaggacaagcgacgcgtggcccacctgggctgccattcagacctagtcaccgacttggacttctcgccctttgatgacttcctcctggccacaggctcggctgacaggacggtaaaactctggcgactgccagggcctggccaggcccatgagaacagcagggatagccggctggcatggatgggcacctgggagcaccttgtgtctactggattcaaccagatgcgtgagcgcgaagtgaagctgtgggacacgcggttcttctccagcgccctggc

SEQ ID NO: 122409 - DNA, 730 bp, Homo sapiens
  Payload ID: 3981
  Gene Symbol: CORO7
  Gene Name: coronin 7
  ENST ID: ENST00000576637
  CDS Start-End: 1-358
ttgcagccaaagtgagcgccagctgctcctatatgaagctgaggccctggccggcggacccttggcagtgttgggcctggacgtggctccctcaaccctgctgcccagctacgacccagacactggcctggtgctcctgaccggcaagggcgacacccgtgtattcctgtacgagctgctccccgagtcccctttcttcctggagtgcaacagcttcacgtcgcctgacccccacaagggcctcgtcctcctgcctaagacggagtgcgacgtgcgggaagtggagctgatgcggtgcctgcggctgcgtcagtcctccctggagcctgtggccttccggctgccccgagtccggtgagccaagccccccgagaggcccctgctcgtcgggccccatcctcagcgcagtacctggaagaaaagtctgaccagcaaaagaaggaggagctgctgaatgccatggtggcaaaactggggaaccgggaggacccactcccccaggactcctttgaaggcgtggacgaggacgagtgggactagcctgcgcccccgtcacctccacctcacctgtgctgccacttcctagtgcacacctcacggctcatcctcaagctggaagatacctctctggccccggcacatgtcacccctgcactcctgccttcccgtgggcacttccacatcctctgggcctctggcagttcccagggactgttttcacctctgctgt

SEQ ID NO: 122410 - DNA, 540 bp, Homo sapiens
  Payload ID: 3981
  Gene Symbol: CORO7
  Gene Name: coronin 7
  ENST ID: ENST00000570928
  CDS Start-End: 78-422
gtcgcggttgctcagcgtgcacctgagacccgacgcccggggtcctcgaagacgcgtccgccgccgtgcccgtcgccatgaaccgcttcagggtgtccaagttccggcacaccgaggctcggccgccccgccgcgagtcctggatcagtgacattcgagcaggaaccgccccttcatgcaggaaccacatcaaatcaagctgcagcttgatcgccttcaactccgaccgtcctggtgtactgggcattgtgcctctgcaaggccaaggagaggacaagcgacgcgtggcccacctgggctgccattcagagctggcagcccatggggacctggtgcagagcgccgtctggagccgagatggagccctggtgggcacggcgtgcaagacggagtctcagtctgtttcccaggctggagtgtagtggcacgatctcggttcactgcaagctcattgcaacctccgtctcccaggttcaagtgattctcctgactcagcctcccgagtagctgggattacaggacaagcagctgcggatcttt

SEQ ID NO: 122411 - DNA, 501 bp, Homo sapiens
  Payload ID: 3981
  Gene Symbol: CORO7
  Gene Name: coronin 7
  ENST ID: ENST00000570645
  CDS Start-End: 361-501
ttgggtcccgggtggggccgaggcagcgggagtcgcggttgctcagcgtgcacctgagacccgacgcccggggtcctcgaagacgcgtccgccgccgtgcccgtcgccatgaaccgcttcagggtgtccaagttccggcacaccgaggctcggctgacaggacggtaaaactctggcgactgccagggcctggccaggccctgccctcagcacccggggtggtgctgggccccgaggacctcccagtggaggtactgcagttccaccccacctctgacggcattctggtgagcgcagcaggcaccactgtgaaggtctgggacgcagccaagcagcagcccctgacagagctggcagcccatggggacctggtgcagagcgccgtctggagccgagatggagccctggtgggcacggcgtgcaaggacaagcagctgcggatctttgaccccagaacaaagccgcgggcctctcagagcacgcaggcccatgagaacagca

SEQ ID NO: 122412 - DNA, 666 bp, Homo sapiens
  Payload ID: 3981
  Gene Symbol: CORO7
  Gene Name: coronin 7
  ENST ID: ENST00000575850
  CDS Start-End: 47-666
gtacaccgcaaagactccacagcaaatcctgcacacaaaatcgcgaatgctgcagccgagaccccacgcaagcaagcaccgcaggagacgtgggctgacagctgcgccccacgtgacctcccacccgcgccagtccgtcccctcgtcctggatcagtgacattcgagcaggaaccgccccttcatgcaggaaccacatcaaatcaagctgcagcttgatcgccttcaactccgaccgtcctggtgtactgggcattgtgcctctgcaaggccaaggagaggacaagcgacgcgtggcccacctgggctgccattcagacctagtcaccgacttggacttctcgccctttgatgacttcctcctggccacaggctcggctgacaggacggtaaaactctggcgactgccagggcctggccaggccctgccctcagcacccggggtggtgctgggccccgaggacctcccagtggaggtactgcagttccaccccacctctgacggcattctggtgagcgcagcaggcaccactgtgaaggtctgggacgcagccaagcagcagcccctgacagagctggcagcccatggggacctggtgcagagcgccgtctggagccgagatggagccctggtgggcacggcgtgcaaggacaagcagctgcggat

SEQ ID NO: 122413 - DNA, 605 bp, Homo sapiens
  Payload ID: 3981
  Gene Symbol: CORO7
  Gene Name: coronin 7
  ENST ID: ENST00000570779
  CDS Start-End: 1-573
gtgcgggaagtggagctgatgcggtgcctgcggctgcgtcagtcctccctggagcctgtggccttccggctgccccgagtccggaaagagttcttccaggatgacgtgttcccagacacggctgtgatctgggagcctgtgctcagtgccgaggcctggctgcaaggcgctaatgggcagccctggcttctcagcctgcagcctcctgacatgagcccagtgagccaagccccccgagaggcccctgctcgtcgggccccatcctcagcgcagtacctggaagaaaagtctgaccagcaaaagaaggaggagctgctgaatgccatggtggcaaaactggggaaccgggaggacccactcccccaggactcctttgaaggcgtggacgaggacgagtgggtgagtagtgagtggcctcacttcccggcaggcagcgcggtccctcgcacatgccacggtgcatgcctcctcccttcccaggccctcctgactccctcccacctcttggtgtttcgccccaggactagcctgcgcccccgtcacctccacctcacctgtgctgccacttcctagtgcacacctcacggctcatcctcaagctggaa

SEQ ID NO: 122414 - DNA, 548 bp, Homo sapiens
  Payload ID: 3981
  Gene Symbol: CORO7
  Gene Name: coronin 7
  ENST ID: ENST00000572153
  CDS Start-End: 62-202
gtgcacctgagacccgacgcccggggtcctcgaagacgcgtccgccgccgtgcccgtcgccatgaaccgcttcagggtgtccaagttccggcacaccgaggctcggccgccccgccgcgaggtgtactgggcattgtgcctctgcaaggccaaggagaggacaagcgacgcgtggcccacctgggctgccattcagacctagtcaccgacttggacttctcgccctttgatgacttcctcctggccacaggctcggctgacaggacggtaaaactctggcgactgccagggcctggccaggccctgccctcagcacccggggtggtgctgggccccgaggacctcccagtggaggtactgcagttccaccccacctctgacggcattctggtgagcgcagcaggcaccactgtgaaggtctgggacgcagccaagcagcagcccctgacagagctggcagcccatggggacctggtgcagagcgccgtctggagccgagatggagccctggtgggcacggcgtgcaaggtgagcaggcaggtggggat

SEQ ID NO: 122415 - DNA, 1737 bp, Homo sapiens
  Payload ID: 3981
  Gene Symbol: CORO7
  Gene Name: coronin 7
  ENST ID: ENST00000574311
  CDS Start-End: 79-1182
agtcgcggttgctcagcgtgcacctgagacccgacgcccggggtcctcgaagacgcgtccgccgccgtgcccgtcgccatgaaccgcttcagggtgtccaagttccggcacaccgaggctcggccgccccgccgcgaggacaagcagctgcggatctttgaccccagaacaaagccgcgggcctctcagagcacgcaggcccatgagaacagcagggatagccggctggcatggatgggcacctgggagcaccttgtgtctactggattcaaccagatgcgtgagcgcgaagtgaagctgtgggacacgcggttcttctccagcgccctggcctccctcaccttggacacctcgcttgggtgtctcgtgcctctgctggaccctgactctgggctcctggtcctggcaggaaagggcgagaggcagctgtactgttacgaggtggtcccgcagcagccggcgctgagcccagtgacccagtgtgtcctggagagcgtgctgcgtggggctgcccttgtgccccggcaggcgctggccgtcatgagctgcgaggtactccgcgtcctacagctgagcgacacagccatcgtgcccatcggctaccatgtgccccgcaaggctgtggagttccacgaggacctgttcccggacactgccggctgtgtgcctgccaccgacccccatagctggtgggctggggacaaccagcaggtgcagaaggtcagcctcaaccccgcctgccggccccacccgagcttcacttcctgtctggtgccccctgcggagcccctccctgacacagcccagcctgcggtgatggagacacccgtgggtgatgcagacgcaagcgagggtttctcttcccctcccagttcgctgacctcgccctccacgccctccagcctggggccctcactctccagcaccagtggcatcgggaccagccccagtttgaggtcgctgcagagcctgctgggccccagttccaagttccgccatgctcagggcactgtcctgcaccgagacagccacatcaccaacctcaaggggctcaacctcaccacacctggtgagagtgacggcttctgtgccaacaagctgcgtgtggccgtgccgctgctcagcagcgggggacaggtggctgtgcttgagatgagggagaagaggcacagagaggtttagtgacctgcccgggtcacacagctgtctacggaagcctggccgcctgcccgacacggcactgcccacgctgcagaatggggcagctgtgactgatctggcctgggacccctttgacccccatcgcctcgctgtggctggtgaggacgccaggatccgactgtggcgggtacccgcagagggcctggaagaggtgctcaccacgccagagactgtgctcacaggccacacggagaagatctgctccctgcgcttccacccactggcagccaatgtgctggcctcgtcctcctatgacctcactgttcgcatctgggaccttcaggctggagctgatcggctgaagctgcagggccaccaagaccagatcttcagcctggcctggagtcctgatgggcagcagctggccactgtctgcaaggatgggcgtgtgcgggtctacaggccccggagtggccctgagcccctgcaggaaggcccagggcccaagggaggacgcggagctcgcattgtctgggtatgtgatggtcgctgtctgctggtgtctggctttgacag

SEQ ID NO: 122416 - DNA, 2826 bp, Homo sapiens
  Payload ID: 3981
  Gene Symbol: CORO7
  Gene Name: coronin 7
  Uniprot ID: P57737
  ENST ID: ENST00000574025
  CDS Start-End: 110-2632
attgggtcccgggtggggccgaggcagcgggagtcgcggttgctcagcgtgcacctgagacccgacgcccggggtcctcgaagacgcgtccgccgccgtgcccgtcgccatgaaccgcttcagggtgtccaagttccggcacaccgaggctcggccgccccgccgcgagtcctggatcagtgacattcgagcaggaaccgccccttcatgcaggaaccacatcaaatcaagctgcagcttgatcgccttcaactccgaccgtcctggtgtactgggcattgtgcctctgcaaggccaaggagaggacaagcgacgcgtggcccacctgggctgccattcagagctggcagcccatggggacctggtgcagagcgccgtctggagccgagatggagccctggtgggcacggcgtgcaaggacaagcagctgcggatctttgaccccagaacaaagccgcgggcctctcagagcacgcaggcccatgagaacagcagggatagccggctggcatggatgggcacctgggagcaccttgtgtctactggattcaaccagatgcgtgagcgcgaagtgaagctgtgggacacgcggttcttctccagcgccctggcctccctcaccttggacacctcgcttgggtgtctcgtgcctctgctggaccctgactctgggctcctggtcctggcaggaaagggcgagaggcagctgtactgttacgaggtggtcccgcagcagccggcgctgagcccagtgacccagtgtgtcctggagagcgtgctgcgtggggctgcccttgtgccccggcaggcgctggccgtcatgagctgcgaggtactccgcgtcctacagctgagcgacacagccatcgtgcccatcggctaccatgtgccccgcaaggctgtggagttccacgaggacctgttcccggacactgccggctgtgtgcctgccaccgacccccatagctggtgggctggggacaaccagcaggtgcagaaggtcagcctcaaccccgcctgccggccccacccgagcttcacttcctgtctggtgccccctgcggagcccctccctgacacagcccagcctgcggtgatggagacacccgtgggtgatgcagacgcaagcgagggtttctcttcccctcccagttcgctgacctcgccctccacgccctccagcctggggccctcactctccagcaccagtggcatcgggaccagccccagtttgaggtcgctgcagagcctgctgggccccagttccaagttccgccatgctcagggcactgtcctgcaccgagacagccacatcaccaacctcaaggggctcaacctcaccacacctggtgagagtgacggcttctgtgccaacaagctgcgtgtggccgtgccgctgctcagcagcgggggacaggtggctgtgcttgagctacggaagcctggccgcctgcccgacacggcactgcccacgctgcagaatggggcagctgtgactgatctggcctgggacccctttgacccccatcgcctcgctgtggctggtgaggacgccaggatccgactgtggcgggtacccgcagagggcctggaagaggtgctcaccacgccagagactgtgctcacaggccacacggagaagatctgctccctgcgcttccacccactggcagccaatgtgctggcctcgtcctcctatgacctcactgttcgcatctgggaccttcaggctggagctgatcggctgaagctgcagggccaccaagaccagatcttcagcctggcctggagtcctgatgggcagcagctggccactgtctgcaaggatgggcgtgtgcgggtctacaggccccggagtggccctgagcccctgcaggaaggcccagggcccaagggaggacgcggagctcgcattgtctgggtatgtgatggtcgctgtctgctggtgtctggctttgacagccaaagtgagcgccagctgctcctatatgaagctgaggccctggccggcggacccttggcagtgttgggcctggacgtggctccctcaaccctgctgcccagctacgacccagacactggcctggtgctcctgaccggcaagggcgacacccgtgtattcctgtacgagctgctccccgagtcccctttcttcctggagtgcaacagcttcacgtcgcctgacccccacaagggcctcgtcctcctgcctaagacggagtgcgacgtgcgggaagtggagctgatgcggtgcctgcggctgcgtcagtcctccctggagcctgtggccttccggctgccccgagtccggaaagagttcttccaggatgacgtgttcccagacacggctgtgatctgggagcctgtgctcagtgccgaggcctggctgcaaggcgctaatgggcagccctggcttctcagcctgcagcctcctgacatgagcccagtgagccaagccccccgagaggcccctgctcgtcgggccccatcctcagcgcagtacctggaagaaaagtctgaccagcaaaagaaggaggagctgctgaatgccatggtggcaaaactggggaaccgggaggacccactcccccaggactcctttgaaggcgtggacgaggacgagtgggactagcctgcgcccccgtcacctccacctcacctgtgctgccacttcctagtgcacacctcacggctcatcctcaagctggaagatacctctctggccccggcacatgtcacccctgcactcctgccttcccgtgggcacttccacatcctctgggcctctggcagttcccagggactgttttcacctctgctgtctct

SEQ ID NO: 122417 - DNA, 832 bp, Homo sapiens
  Payload ID: 3981
  Gene Symbol: CORO7
  Gene Name: coronin 7
  ENST ID: ENST00000575038
  CDS Start-End: 229-832
ggtacaccgcaaagactccacagcaaatcctgcacacaaaatcgcgaatgctgcagccgagaccccacgcaagcaagcaccgcaggagacgtgggctgacagctgcgccccacgtgacctcccacccgcgccagtccgtcccctcgcgggagtcgcggttgctcagcgtgcacctgagacccgacgcccggggtcctcgaagacgcgtccgccgccgtgcccgtcgccatgaaccgcttcagggtgtccaagttccggcacaccgaggctcggccgccccgccgcgagtcctggatcagtgacattcgagcaggaaccgccccttcatgcaggaaccacatcaaatcaagctgcagcttgatcgccttcaactccgaccgtcctggtgtactgggcattgtgcctctgcaaggccaaggagaggacaagcgacgcgtggcccacctgggctgccattcagacctagtcaccgacttggacttctcgccctttgatgacttcctcctggccacaggctcggctgacaggacggtaaaactctggcgactgccagggcctggccaggccctgccctcagcacccggggtggtgctgggccccgaggacctcccagtggaggtactgcagttccaccccacctctgacggcattctgagctggcagcccatggggacctggtgcagagcgccgtctggagccgagatggagccctggtgggcacggcgtgcaaggacaagcagctgcggatctttgaccccagaacaaagccgcgggcctctcagagcacgcaggcccatgagaacagcagggatagccggctggcatggatggg

SEQ ID NO: 122418 - DNA, 3540 bp, Homo sapiens; identical to SEQ ID NO: 122397
  Payload ID: 3981
  Gene Symbol: CORO7
  Gene Name: coronin 7
  Uniprot ID: P57737
  ENST ID: ENST00000614702
  CDS Start-End: 147-2924

SEQ ID NO: 122419 - DNA, 3392 bp, Homo sapiens; identical to SEQ ID NO: 122398
  Payload ID: 3981
  Gene Symbol: CORO7
  Gene Name: coronin 7
  Uniprot ID: P57737
  ENST ID: ENST00000617235
  CDS Start-End: 112-2835

SEQ ID NO: 122420 - DNA, 581 bp, Homo sapiens; identical to SEQ ID NO: 122408
  Payload ID: 3981
  Gene Symbol: CORO7
  Gene Name: coronin 7
  ENST ID: ENST00000631678
  CDS Start-End: 112-581

SEQ ID NO: 122421 - DNA, 730 bp, Homo sapiens; identical to SEQ ID NO: 122409
  Payload ID: 3981
  Gene Symbol: CORO7
  Gene Name: coronin 7
  ENST ID: ENST00000631757
  CDS Start-End: 1-358

SEQ ID NO: 122422 - DNA, 1066 bp, Homo sapiens; identical to SEQ ID NO: 122404
  Payload ID: 3981
  Gene Symbol: CORO7
  Gene Name: coronin 7
  ENST ID: ENST00000632270
  CDS Start-End: 361-687

SEQ ID NO: 122423 - DNA, 666 bp, Homo sapiens; identical to SEQ ID NO: 122412
  Payload ID: 3981
  Gene Symbol: CORO7
  Gene Name: coronin 7
  ENST ID: ENST00000633804
  CDS Start-End: 47-666

SEQ ID NO: 122424 - DNA, 563 bp, Homo sapiens; identical to SEQ ID NO: 122399
  Payload ID: 3981
  Gene Symbol: CORO7
  Gene Name: coronin 7
  ENST ID: ENST00000633070
  CDS Start-End: 79-563

SEQ ID NO: 122425 - DNA, 3578 bp, Homo sapiens; identical to SEQ ID NO: 122400
  Payload ID: 3981
  Gene Symbol: CORO7
  Gene Name: coronin 7
  ENST ID: ENST00000632167
  CDS Start-End: 110-250

SEQ ID NO: 122426 - DNA, 540 bp, Homo sapiens; identical to SEQ ID NO: 122410
  Payload ID: 3981
  Gene Symbol: CORO7
  Gene Name: coronin 7
  ENST ID: ENST00000631960
  CDS Start-End: 78-422

SEQ ID NO: 122427 - DNA, 548 bp, Homo sapiens; identical to SEQ ID NO: 122414
  Payload ID: 3981
  Gene Symbol: CORO7
  Gene Name: coronin 7
  ENST ID: ENST00000633889
  CDS Start-End: 62-202

SEQ ID NO: 122428 - DNA, 1890 bp, Homo sapiens; identical to SEQ ID NO: 122401
  Payload ID: 3981
  Gene Symbol: CORO7
  Gene Name: coronin 7
  ENST ID: ENST00000633681
  CDS Start-End: 79-738

SEQ ID NO: 122429 - DNA, 501 bp, Homo sapiens; identical to SEQ ID NO: 122411
  Payload ID: 3981
  Gene Symbol: CORO7
  Gene Name: coronin 7
  ENST ID: ENST00000631578
  CDS Start-End: 361-501

SEQ ID NO: 122430 - DNA, 593 bp, Homo sapiens; identical to SEQ ID NO: 122402
  Payload ID: 3981
  Gene Symbol: CORO7
  Gene Name: coronin 7
  ENST ID: ENST00000632158
  CDS Start-End: 110-593

SEQ ID NO: 122431 - DNA, 832 bp, Homo sapiens; identical to SEQ ID NO: 122417
  Payload ID: 3981
  Gene Symbol: CORO7
  Gene Name: coronin 7
  ENST ID: ENST00000634048
  CDS Start-End: 229-832

SEQ ID NO: 122432 - DNA, 1737 bp, Homo sapiens; identical to SEQ ID NO: 122415
  Payload ID: 3981
  Gene Symbol: CORO7
  Gene Name: coronin 7
  ENST ID: ENST00000633467
  CDS Start-End: 79-1182

SEQ ID NO: 122433 - DNA, 557 bp, Homo sapiens; identical to SEQ ID NO: 122407
  Payload ID: 3981
  Gene Symbol: CORO7
  Gene Name: coronin 7
  ENST ID: ENST00000632177
  CDS Start-End: 525-557

SEQ ID NO: 122434 - DNA, 663 bp, Homo sapiens; identical to SEQ ID NO: 122405
  Payload ID: 3981
  Gene Symbol: CORO7
  Gene Name: coronin 7
  ENST ID: ENST00000632164
  CDS Start-End: 47-663

SEQ ID NO: 122435 - DNA, 578 bp, Homo sapiens; identical to SEQ ID NO: 122403
  Payload ID: 3981
  Gene Symbol: CORO7
  Gene Name: coronin 7
  ENST ID: ENST00000631809
  CDS Start-End: 407-578

SEQ ID NO: 122436 - DNA, 729 bp, Homo sapiens; identical to SEQ ID NO: 122406
  Payload ID: 3981
  Gene Symbol: CORO7
  Gene Name: coronin 7
  ENST ID: ENST00000632603
  CDS Start-End: 672-729

SEQ ID NO: 122437 - DNA, 605 bp, Homo sapiens; identical to SEQ ID NO: 122413
  Payload ID: 3981
  Gene Symbol: CORO7
  Gene Name: coronin 7
  ENST ID: ENST00000632515
  CDS Start-End: 1-573

SEQ ID NO: 122438 - DNA, 2826 bp, Homo sapiens; identical to SEQ ID NO: 122416
  Payload ID: 3981
  Gene Symbol: CORO7
  Gene Name: coronin 7
  Uniprot ID: P57737
  ENST ID: ENST00000631534
  CDS Start-End: 110-2632

SEQ ID NO: 122439 - DNA, 1803 bp, Homo sapiens
  Payload ID: 3982
  Gene Symbol: CORO1A
  Gene Name: coronin, actin binding protein, 1A
  Uniprot ID: P31146
  ENST ID: ENST00000219150
  CDS Start-End: 306-1691
agattcgcttcccggagccgggatggcagcctgcgctatggttggggaccaacgtggtgcacgggcaggggccggggagagaggcggccgcagcgggagcccgggagcgcagggcgggcctggaagagctccgccccaaggggcgcggccaccccggaggcgggcgcacggctgcttctcattcattgtcttgacaagagcatcttcagcgggcgagtccccggctcctccagctccttcctcctcttcctcctcctcctccacctccggcttttgggggatcactgtcctctctcggcagcagaatgagccggcaggtggtccgctccagcaagttccgccacgtgtttggacagccggccaaggccgaccagtgctatgaagatgtgcgcgtctcacagaccacctgggacagtggcttctgtgctgtcaaccctaagtttgtggccctgatctgtgaggccagcgggggaggggccttcctggtgctgcccctgggcaagactggacgtgtggacaagaatgcgcccacggtctgtggccacacagcccctgtgctagacatcgcctggtgcccgcacaatgacaacgtcattgccagtggctccgaggactgcacagtcatggtgtgggagatcccagatgggggcctgatgctgcccctgcgggagcccgtcgtcaccctggagggccacaccaagcgtgtgggcattgtggcctggcacaccacagcccagaacgtgctgctcagtgcaggttgtgacaacgtgatcatggtgtgggacgtgggcactggggcggccatgctgacactgggcccagaggtgcacccagacacgatctacagtgtggactggagccgagatggaggcctcatttgtacctcctgccgtgacaagcgcgtgcgcatcatcgagccccgcaaaggcactgtcgtagctgagaaggaccgtccccacgaggggacccggcccgtgcgtgcagtgttcgtgtcggaggggaagatcctgaccacgggcttcagccgcatgagtgagcggcaggtggcgctgtgggacacaaagcacctggaggagccgctgtccctgcaggagctggacaccagcagcggtgtcctgctgcccttctttgaccctgacaccaacatcgtctacctctgtggcaagggtgacagctcaatccggtactttgagatcacttccgaggcccctttcctgcactatctctccatgttcagttccaaggagtcccagcggggcatgggctacatgcccaaacgtggcctggaggtgaacaagtgtgagatcgccaggttctacaagctgcacgagcggaggtgtgagcccattgccatgacagtgcctcgaaagtcggacctgttccaggaggacctgtacccacccaccgcagggcccgaccctgccctcacggctgaggagtggctggggggtcgggatgctgggcccctcctcatctccctcaaggatggctacgtacccccaaagagccgggagctgagggtcaaccggggcctggacaccgggcgcaggagggcagcaccagaggccagtggcactcccagctcggatgccgtgtctcggctggaggaggagatgcggaagctccaggccacggtgcaggagctccagaagcgcttggacaggctggaggagacagtccaggccaagtagagccccgcagggcctccagcagggtcagccattcacacccatccactcacctcccattcccagccacatggcagagaaaaaaatcataataaaatggctttattttctggta

SEQ ID NO: 122440 - DNA, 582 bp, Homo sapiens
  Payload ID: 3982
  Gene Symbol: CORO1A
  Gene Name: coronin, actin binding protein, 1A
  ENST ID: ENST00000569203
  CDS Start-End: 139-582
accgcgacccagccagcgccggggccaggtagcgggcgcagcagcccgtggggggacgctgcttggagtgggggccgccggggccccagagcgctctgcggaggcgagggctagggaccaccgcggccaagatggagaatgagccggcaggtggtccgctccagcaagttccgccacgtgtttggacagccggccaaggccgaccagtgctatgaagatgtgcgcgtctcacagaccacctgggacagtggcttctgtgctgtcaaccctaagtttgtggccctgatctgtgaggccagcgggggaggggccttcctggtgctgcccctgggcaagactggacgtgtggacaagaatgcgcccacggtctgtggccacacagcccctgtgctagacatcgcctggtgcccgcacaatgacaacgtcattgccagtggctccgaggactgcacagtcatggtgtgggagatcccagatgggggcctgatgctgcccctgcgggagcccgtcgtcaccctggagggccacaccaagcgtgtgggcattgtggcctggcacaccacagcccagaacgtgctgctc

SEQ ID NO: 122441 - DNA, 1622 bp, Homo sapiens
  Payload ID: 3982
  Gene Symbol: CORO1A
  Gene Name: coronin, actin binding protein, 1A
  Uniprot ID: P31146
  ENST ID: ENST00000570045
  CDS Start-End: 237-1622
gtcttgacaagagcatcttcagcgggcgagtccccggctcctccagctccttcctcctcttcctcctcctcctccacctccggcttttgggggatcactgtcctctctcggcagcagatacaggctgctcctcaagactggggctcttcacatacgctcctcaccgctctttgggcaggccgacctagcagcctcttcgggagtcctggggtggccgggggtgctggagcccccaaatgagccggcaggtggtccgctccagcaagttccgccacgtgtttggacagccggccaaggccgaccagtgctatgaagatgtgcgcgtctcacagaccacctgggacagtggcttctgtgctgtcaaccctaagtttgtggccctgatctgtgaggccagcgggggaggggccttcctggtgctgcccctgggcaagactggacgtgtggacaagaatgcgcccacggtctgtggccacacagcccctgtgctagacatcgcctggtgcccgcacaatgacaacgtcattgccagtggctccgaggactgcacagtcatggtgtgggagatcccagatgggggcctgatgctgcccctgcgggagcccgtcgtcaccctggagggccacaccaagcgtgtgggcattgtggcctggcacaccacagcccagaacgtgctgctcagtgcaggttgtgacaacgtgatcatggtgtgggacgtgggcactggggcggccatgctgacactgggcccagaggtgcacccagacacgatctacagtgtggactggagccgagatggaggcctcatttgtacctcctgccgtgacaagcgcgtgcgcatcatcgagccccgcaaaggcactgtcgtagctgagaaggaccgtccccacgaggggacccggcccgtgcgtgcagtgttcgtgtcggaggggaagatcctgaccacgggcttcagccgcatgagtgagcggcaggtggcgctgtgggacacaaagcacctggaggagccgctgtccctgcaggagctggacaccagcagcggtgtcctgctgcccttctttgaccctgacaccaacatcgtctacctctgtggcaagggtgacagctcaatccggtactttgagatcacttccgaggcccctttcctgcactatctctccatgttcagttccaaggagtcccagcggggcatgggctacatgcccaaacgtggcctggaggtgaacaagtgtgagatcgccaggttctacaagctgcacgagcggaggtgtgagcccattgccatgacagtgcctcgaaagtcggacctgttccaggaggacctgtacccacccaccgcagggcccgaccctgccctcacggctgaggagtggctggggggtcgggatgctgggcccctcctcatctccctcaaggatggctacgtacccccaaagagccgggagctgagggtcaaccggggcctggacaccgggcgcaggagggcagcaccagaggccagtggcactcccagctcggatgccgtgtctcggctggaggaggagatgcggaagctccaggccacggtgcaggagctccagaagcgcttggacaggctggaggagacagtccaggccaagtag

SEQ ID NO: 122442 - DNA, 937 bp, Homo sapiens
  Payload ID: 3982
  Gene Symbol: CORO1A
  Gene Name: coronin, actin binding protein, 1A
  ENST ID: ENST00000563778
  CDS Start-End: 189-937
gttgctgcctccagaagcctctctgaatccaagggtgggaactattcctccttgccctcgagccttcgccaaagccagggcttggagcggccgtgggctcctcctccttcccccaggctgggctcttcaggggcggaaacctgcctggcttgcctgccttgctcgaccctgtagcccctggcacgaaaatgagccggcaggtggtccgctccagcaagttccgccacgtgtttggacagccggccaaggccgaccagtgctatgaagatgtgcgcgtctcacagaccacctgggacagtggcttctgtgctgtcaaccctaagtttgtggccctgatctgtgaggccagcgggggaggggccttcctggtgctgcccctgggcaagactggacgtgtggacaagaatgcgcccacggtctgtggccacacagcccctgtgctagacatcgcctggtgcccgcacaatgacaacgtcattgccagtggctccgaggactgcacagtcatggtgtgggagatcccagatgggggcctgatgctgcccctgcgggagcccgtcgtcaccctggagggccacaccaagcgtgtgggcattgtggcctggcacaccacagcccagaacgtgctgctcagtgcaggttgtgacaacgtgatcatggtgtgggacgtgggcactggggcggccatgctgacactgggcccagaggtgcacccagacacgatctacagtgtggactggagccgagatggaggcctcatttgtacctcctgccgtgacaagcgcgtgcgcatcatcgagccccgcaaaggcactgtcgtagctgagaaggaccgtccccacgaggggacccggcccgtgcgtgcagtgttcgtgtcggaggggaagatcctgaccacgggcttcagccgcatgagtgagcggcaggtggcgctgtg

SEQ ID NO: 122443 - DNA, 1348 bp, Homo sapiens
  Payload ID: 3982
  Gene Symbol: CORO1A
  Gene Name: coronin, actin binding protein, 1A
  ENST ID: ENST00000565497
  CDS Start-End: 109-1278
gagcatcttcagcgggcgagtccccggctcctccagctccttcctcctcttcctcctcctcctccacctccggcttttgggggatcactgtcctctctcggcagcagaatgagccggcaggtggtccgctccagcaagttccgccacgtgtttggacagccggccaaggccgaccagtgctatgaagatgtgcgcgtctcacagaccacctgggacagtggcttctgtgctgtcaaccctaagtttgtggccctgatctgtgaggccagcgggggaggggccttcctggtgctgcccctgggcaagactggacgtgtggacaagaatgcgcccacggtctgtggccacacagcccctgtgctagacatcgcctggtgcccgcacaatgacaacgtcattgccagtggctccgaggactgcacagtcatggtgtgggagatcccagatgggggcctgatgctgcccctgcgggagcccgtcgtcaccctggagggccacaccaagcgtgtgggcattgtggcctggcacaccacagcccagaacgtgctgctcagtgcaggttgtgacaacgtgatcatggtgtgggacgtgggcactggggcggccatgctgacactgggcccagaggtgcacccagacacgatctacagtgtggactggagccgagatggaggcctcatttgtacctcctgccgtgacaagcgcgtgcgcatcatcgagccccgcaaaggcactgtcgtagctgagaaggaccgtccccacgaggggacccggcccgtgcgtgcagtgttcgtgtcggaggggaagatcctgaccacgggcttcagccgcatgagtgagcggcaggtggcgctgtgggacacaaagcacctggaggagccgctgtccctgcaggagctggacaccagcagcggtgtcctgctgcccttctttgaccctgacaccaacatcgtctacctctgtggcaagggtgacagctcaatccggtactttgagatcacttccgaggcccctttcctgcactatctctccatgttcagttccaaggagtcccagcggggcatgggctacatgcccaaacgtggcctggaggtgaacaagtgtgagatcgccaggttctacaagctgcacgagcggaggtgtgagcccattgccatgacagtgcctcgaaaggatgccgtgtctcggctggaggaggagatgcggaagctccaggccacggtgcaggagctccagaagcgcttggacaggctggaggagacagtccaggccaagtagagccccgcagggcctccagcagggtcagccattcacacccatccactcacctcccattcccagccacatg

SEQ ID NO: 122444 - DNA, 694 bp, Homo sapiens
  Payload ID: 3982
  Gene Symbol: CORO1A
  Gene Name: coronin, actin binding protein, 1A
  ENST ID: ENST00000561815
  CDS Start-End: 41-694
gctcgaccctgtagcccctggcacgaagtaggtgcccgtgatgccggattatttcagcaggagggcaggggtgttcccgatgaagccaggagatccagggaggagaagcgactcccggggccacccatgcttagatctcagagccagaatgagccggcaggtggtccgctccagcaagttccgccacgtgtttggacagccggccaaggccgaccagtgctatgaagatgtgcgcgtctcacagaccacctgggacagtggcttctgtgctgtcaaccctaagtttgtggccctgatctgtgaggccagcgggggaggggccttcctggtgctgcccctgggcaagactggacgtgtggacaagaatgcgcccacggtctgtggccacacagcccctgtgctagacatcgcctggtgcccgcacaatgacaacgtcattgccagtggctccgaggactgcacagtcatggtgtgggagatcccagatgggggcctgatgctgcccctgcgggagcccgtcgtcaccctggagggccacaccaagcgtgtgggcattgtggcctggcacaccacagcccagaacgtgctgctcagtgcaggttgtgacaacgtgatcatggtgtgggacgtgggcactggggcggccatgctgacactgggcccagaggtgcacccagacacgatctacagtgtg

SEQ ID NO: 122445 - DNA, 844 bp, Homo sapiens
  Payload ID: 3982
  Gene Symbol: CORO1A
  Gene Name: coronin, actin binding protein, 1A
  ENST ID: ENST00000570244
  CDS Start-End: 107-844
gcatcttcagcgggcgagtccccggctcctccagctccttcctcctcttcctcctcctcctccacctccggcttttgggggatcactgtcctctctcggcagcagaatgagccggcaggtggtccgctccagcaagttccgccacgtgtttggacagccggccaaggccgaccagtgctatgaagatgtgcgcgtctcacagaccacctgggacagtggcttctgtgctgtcaaccctaagtttgtggccctgatctgtgaggccagcgggggaggggccttcctggtgctgcccctgggcaaggtgtgggagatcccagatgggggcctgatgctgcccctgcgggagcccgtcgtcaccctggagggccacaccaagcgtgtgggcattgtggcctggcacaccacagcccagaacgtgctgctcagtgcaggttgtgacaacgtgatcatggtgtgggacgtgggcactggggcggccatgctgacactgggcccagaggtgcacccagacacgatctacagtgtggactggagccgagatggaggcctcatttgtacctcctgccgtgacaagcgcgtgcgcatcatcgagccccgcaaaggcactgtcgtagctgagaaggaccgtccccacgaggggacccggcccgtgcgtgcagtgttcgtgtcggaggggaagatcctgaccacgggcttcagccgcatgagtgagcggcaggtggcgctgtgggacacaaagcacctggaggagccgctgtccctgcaggagctggacaccagcagcggtgtcctgctgcccttctttgaccctgacaccaacatcgtctacctctgtggcaag

SEQ ID NO: 122446 - DNA, 714 bp, Homo sapiens
  Payload ID: 3982
  Gene Symbol: CORO1A
  Gene Name: coronin, actin binding protein, 1A
  ENST ID: ENST00000569970
  CDS Start-End: 219-714
ccagctcctgtccctgcctttaggaagcgctgtgtgggtgtgagggaggtgggctctggacacggtaactaagagagaacccaccctcggagccatctgggctgatgacgcctgagtctgaaccattaggaaggacgggctctgcatccatcagccagtcagtcaacaaacatgcagtggggcaacaccacgccaggctctgttgcagaggctgaggaatgagccggcaggtggtccgctccagcaagttccgccacgtgtttggacagccggccaaggccgaccagtgctatgaagatgtgcgcgtctcacagaccacctgggacagtggcttctgtgctgtcaaccctaagtttgtggccctgatctgtgaggccagcgggggaggggccttcctggtgctgcccctgggcaagactggacgtgtggacaagaatgcgcccacggtctgtggccacacagcccctgtgctagacatcgcctggtgcccgcacaatgacaacgtcattgccagtggctccgaggactgcacagtcatggtgtgggagatcccagatgggggcctgatgctgcccctgcgggagcccgtcgtcaccctggagggccacaccaagcgtgtgggcattgtggcctggcacaccacagcccagaacgtgctgctcagtgcaggttgtgacaacgtgatcatggtgtgggacgtgggcactggggcgg

SEQ ID NO: 122447 - DNA, 1881 bp, Homo sapiens
  Payload ID: 3983
  Gene Symbol: CORO1B
  Gene Name: coronin, actin binding protein, 1B
  Uniprot ID: Q9BR76
  ENST ID: ENST00000341356
  CDS Start-End: 112-1581
ctccgggtccctctgtcacttcctgaatcctgcttcctgcttcccagaggccgggatccggagccgcccgaagccggtgccgcagccccctgcgcccccggtgcccccgacatgtccttccgcaaagtggtccggcagagcaaattccggcatgtgttcgggcagccggtcaagaacgaccagtgctatgaggacattcgcgtgtcccgtgttacctgggacagcaccttctgcgccgtcaaccccaagttcctggcggtgattgtggaggccagtggagggggtgcctttctggtgctccccctaagcaagacgggccgcattgacaaggcctacccgacggtgtgtgggcacacgggacctgtcctggacatcgactggtgtcctcacaacgacgaagtcatagccagcggctcggaggactgcacggtcatggtgtggcagatcccagagaacgggctgacctccccgctgacagagccggtggtggtactggaggggcacaccaagcgagtgggcatcatcgcctggcaccccacggcccgaaacgtgctgctcagtgcaggctgcgacaacgtggtactcatctggaatgtgggcacagcggaggagctgtaccgcctggacagcctgcaccctgacctcatctacaatgtcagctggaaccacaatggcagcctgttttgctcagcatgcaaggacaagagcgtgcgcatcatcgacccccgtcggggcaccctggtggcagagcgggagaaggctcatgagggggcccggcccatgcgggccatcttcctggcagatggcaaggtgttcaccacaggcttcagccgaatgagcgagcggcagctggcgctctgggacccagaaaacctcgaggaacccatggccctgcaggaactggactcgagcaacggggccctgctgcccttctacgaccccgacaccagtgtggtctacgtctgcggcaagggtgactccagcatccggtactttgagatcacagaggagcctccctacatccacttcctgaacacgttcaccagcaaggagccgcagcggggtatgggcagcatgcccaagcggggcctggaggtcagcaagtgcgagatcgcccggttctacaaactgcatgagcgcaagtgtgagcccatcgtcatgactgtgccaagaaagtcggacctcttccaggatgatctgtaccccgacacagccgggcccgaggcagccctggaggctgaggagtgggtgagcgggcgggatgccgacccgatcctcatctcactgcgggaggcctacgtgcccagcaagcagcgggacctgaagatcagccggcgcaacgtgttgtctgacagccggcccgccatggccccgggctcctcccacctaggggcccccgcctccaccaccactgctgctgatgccacccccagcggcagcctggccagagccggggaggctgggaagctggaggaggtgatgcaggagctgcgggccctgagggcgctggtcaaggagcagggcgaccgcatctgccgcctggaggagcagctgggccgcatggagaacggggatgcgtagggccacagccacacgccaccttcatctcctccgccgcccccttcccactcagcttctgccagcgggtcgcaccgggctagctggctgcccagagcctctgaggcagcgcaggggtcagttcccacccccacccgtcccaggcccaggccgaagccagcgcccagctttcctcactgttcctgtggaggatgtctacgcccaggcgagctcctcgacctctgagggaccatctccccgaccactgcccagccctctgctccctccccagaggaggcgggagggtgggctctatattttcat

SEQ ID NO: 122448 - DNA, 1931 bp, Homo sapiens
  Payload ID: 3983
  Gene Symbol: CORO1B
  Gene Name: coronin, actin binding protein, 1B
  Uniprot ID: Q9BR76
  ENST ID: ENST00000393893
  CDS Start-End: 134-1603
acccaatcctggagactcctgcggatgccattatgaggagcaagaacgcgaaggggcctcgggtccgctaggccgggatccggagccgcccgaagccggtgccgcagccccctgcgcccccggtgcccccgacatgtccttccgcaaagtggtccggcagagcaaattccggcatgtgttcgggcagccggtcaagaacgaccagtgctatgaggacattcgcgtgtcccgtgttacctgggacagcaccttctgcgccgtcaaccccaagttcctggcggtgattgtggaggccagtggagggggtgcctttctggtgctccccctaagcaagacgggccgcattgacaaggcctacccgacggtgtgtgggcacacgggacctgtcctggacatcgactggtgtcctcacaacgacgaagtcatagccagcggctcggaggactgcacggtcatggtgtggcagatcccagagaacgggctgacctccccgctgacagagccggtggtggtactggaggggcacaccaagcgagtgggcatcatcgcctggcaccccacggcccgaaacgtgctgctcagtgcaggctgcgacaacgtggtactcatctggaatgtgggcacagcggaggagctgtaccgcctggacagcctgcaccctgacctcatctacaatgtcagctggaaccacaatggcagcctgttttgctcagcatgcaaggacaagagcgtgcgcatcatcgacccccgtcggggcaccctggtggcagagcgggagaaggctcatgagggggcccggcccatgcgggccatcttcctggcagatggcaaggtgttcaccacaggcttcagccgaatgagcgagcggcagctggcgctctgggacccagaaaacctcgaggaacccatggccctgcaggaactggactcgagcaacggggccctgctgcccttctacgaccccgacaccagtgtggtctacgtctgcggcaagggtgactccagcatccggtactttgagatcacagaggagcctccctacatccacttcctgaacacgttcaccagcaaggagccgcagcggggtatgggcagcatgcccaagcggggcctggaggtcagcaagtgcgagatcgcccggttctacaaactgcatgagcgcaagtgtgagcccatcgtcatgactgtgccaagaaagtcggacctcttccaggatgatctgtaccccgacacagccgggcccgaggcagccctggaggctgaggagtgggtgagcgggcgggatgccgacccgatcctcatctcactgcgggaggcctacgtgcccagcaagcagcgggacctgaagatcagccggcgcaacgtgttgtctgacagccggcccgccatggccccgggctcctcccacctaggggcccccgcctccaccaccactgctgctgatgccacccccagcggcagcctggccagagccggggaggctgggaagctggaggaggtgatgcaggagctgcgggccctgagggcgctggtcaaggagcagggcgaccgcatctgccgcctggaggagcagctgggccgcatggagaacggggatgcgtagggccacagccacacgccaccttcatctcctccgccgcccccttcccactcagcttctgccagcgggtcgcaccgggctagctggctgcccagagcctctgaggcagcgcaggggtcagttcccacccccacccgtcccaggcccaggccgaagccagcgcccagctttcctcactgttcctgtggaggatgtctacgcccaggcgagctcctcgacctctgagggaccatctccccgaccactgcccagccctctgctccctccccagaggaggcgggagggtgggctctatattttcattccaaataaaattctctttctaaaagcc

SEQ ID NO: 122449 - DNA, 551 bp, Homo sapiens
  Payload ID: 3983
  Gene Symbol: CORO1B
  Gene Name: coronin, actin binding protein, 1B
  ENST ID: ENST00000545016
  CDS Start-End: 134-551
acccaatcctggagactcctgcggatgccattatgaggagcaagaacgcgaaggggcctcgggtccgctaggccgggatccggagccgcccgaagccggtgccgcagccccctgcgcccccggtgcccccgacatgtccttccgcaaagtggtccggcagagcaaattccggcatgtgttcgggcagccggtcaagaacgaccagtgctatgaggacattcgcgtgtcccgtgttacctgggacagcaccttctgcgccgtcaaccccaagttcctggcggtgattgtggaggccagtggagggggtgcctttctggtgctccccctaagcaagacgggccgcattgacaaggcctacccgacggtgtgtgggcacacgggacctgtcctggacatcgactggtgtcctcacaacgacgaagtcatagccagcggctcggaggactgcacggtcatggtgtggcagatcccagagaacgggctgacctccccgctgacagagccggtggtggtactggaggggcacaccaagcgagtgggcatcatcgcct

SEQ ID NO: 122450 - DNA, 1954 bp, Homo sapiens
  Payload ID: 3983
  Gene Symbol: CORO1B
  Gene Name: coronin, actin binding protein, 1B
  ENST ID: ENST00000537042
  CDS Start-End: 56-904
tccggagccgcccgaagccggtgccgcagccccctgcgcccccggtgcccccgacatgtccttccgcaaagtggtccggcagagcaaattccggcatgtgttcgggcagccggtcaagaacgaccagtgctatgaggacattcgcgtgtcccgtgttacctgggacagcaccttctgcgccgtcaaccccaagttcctggcggtgattgtggaggccagtggagggggtgcctttctggtgctccccctaagcaagacgggccgcattgacaaggcctacccgacggtgtgtgggcacacgggacctgtcctggacatcgactggtgtcctcacaacgacgaagtcatagccagcggctcggaggactgcacggtcatggtgtggcagatcccagagaacgggctgacctccccgctgacagagccggtggtggtactggaggggcacaccaagcgagtgggcatcatcgcctggcaccccacggcccgaaacgtgctgctcagtgcaggctgcgacaacgtggtactcatctggaatgtgggcacagcggaggagctgtaccgcctggacagcctgcaccctgacctcatctacaatgtcagctggaaccacaatggcagcctgttttgctcagcatgcaaggacaagagcgtgcgcatcatcgacccccgtcggggcaccctggtggcagagcgggagaaggctcatgagggggcccggcccatgcgggccatcttcctggcagatggcaaggtgttcaccacaggcttcagccgaatgagcgagcggcagctggcgctctgggacccaggctccccgctcctccagaaagcctcctcctccagcaagcctcctggccccagccctctctgcttctgcatagtgacctccagggcaccttgagcaggggctggtgccgctggcaccccagctccccacagtgaggaaaacctcgaggaacccatggccctgcaggaactggactcgagcaacggggccctgctgcccttctacgaccccgacaccagtgtggtctacgtctgcggcaagggtgactccagcatccggtactttgagatcacagaggagcctccctacatccacttcctgaacacgttcaccagcaaggagccgcagcggggtatgggcagcatgcccaagcggggcctggaggtcagcaagtgcgagatcgcccggttctacaaactgcatgagcgcaagtgtgagcccatcgtcatgactgtgccaagaaagtcggacctcttccaggatgatctgtaccccgacacagccgggcccgaggcagccctggaggctgaggagtgggtgagcgggcgggatgccgacccgatcctcatctcactgcgggaggcctacgtgcccagcaagcagcgggacctgaagatcagccggcgcaacgtgttgtctgacagccggcccgccatggccccgggctcctcccacctaggggcccccgcctccaccaccactgctgctgatgccacccccagcggcagcctggccagagccggggaggctgggaagctggaggaggtgatgcaggagctgcgggccctgagggcgctggtcaaggagcagggcgaccgcatctgccgcctggaggagcagctgggccgcatggagaacggggatgcgtagggccacagccacacgccaccttcatctcctccgccgcccccttcccactcagcttctgccagcgggtcgcaccgggctagctggctgcccagagcctctgaggcagcgcaggggtcagttcccacccccacccgtcccaggcccaggccgaagccagcgcccagctttcctcactgttcctgtggaggatgtctacgcccaggcgagctcctcgacctctgagggaccatctccccgaccactgcccagccctctgctccctccccagaggaggcgggagggtgggctctatat

SEQ ID NO: 122451 - DNA, 4464 bp, Homo sapiens
  Payload ID: 3983
  Gene Symbol: CORO1B
  Gene Name: coronin, actin binding protein, 1B
  ENST ID: ENST00000616321
  CDS Start-End: 84-866
cctgcttcctgcttcccagaggccgggatccggagccgcccgaagccggtgccgcagccccctgcgcccccggtgcccccgacatgtccttccgcaaagtggtccggcagagcaaattccggcatgtgttcgggcagccggtcaagaacgaccagtgctatgaggacattcgcgtgtcccgtgttacctgggacagcaccttctgcgccgtcaaccccaagttcctggcggtgattgtggaggccagtggagggggtgcctttctggtgctccccctaagcaagacgggccgcattgacaaggcctacccgacggtgtgtgggcacacgggacctgtcctggacatcgactggtgtcctcacaacgacgaagtcatagccagcggctcggaggactgcacggtcatggtgtggcagatcccagagaacgggctgacctccccgctgacagagccggtggtggtactggaggggcacaccaagcgagtgggcatcatcgcctggcaccccacggcccgaaacgtgctgctcagtgcaggctgcgacaacgtggtactcatctggaatgtgggcacagcggaggagctgtaccgcctggacagcctgcaccctgacctcatctacaatgtcagctggaaccacaatggcagcctgttttgctcagcatgcaaggacaagagcgtgcgcatcatcgacccccgtcggggcaccctggtggcagagcgggagaaggctcatgagggggcccggcccatgcgggccatcttcctggcagatggcaaggtgttcaccacaggcttcagccgaatgagcgagcggcagctggcgctctgggacccaggggtgaggaggttctgcttggcctgactgcctgcaatgtgccaggaaaacctcgaggaacccatggccctgcaggaactggactcgagcaacggggccctgctgcccttctacgaccccgacaccagtgtggtctacgtctgcggcaagggtgactccagcatccggtactttgagatcacagaggagcctccctacatccacttcctgaacacgttcaccagcaaggagccgcagcggggtatgggcagcatgcccaagcggggcctggaggtcagcaagtgcgagatcgcccggttctacaaactgcatgagcgcaagtgtgagcccatcgtcatgactgtgccaagaaagtcggacctcttccaggatgatctgtaccccgacacagccgggcccgaggcagccctggaggctgaggagtgggtgagcgggcgggatgccgacccgatcctcatctcactgcgggaggcctacgtgcccagcaagcagcgggacctgaagatcagccggcgcaacgtgttgtctgacagccggcccgccatggccccgggctcctcccacctaggggcccccgcctccaccaccactgctgctgatgccacccccagcggcagcctggccagagccggggaggctgggaagctggaggaggtgatgcaggagctgcgggccctgagggcgctggtcaaggagcagggcgaccgcatctgccgcctggaggagcagctgggccgcatggagaacggggatgcgtagggccacagccacacgccaccttcatctcctccgccgcccccttcccactcagcttctgccagcgggtcgcaccgggctagctggctgcccagagcctctgaggcagcgcaggggtcagttcccacccccacccgtcccaggcccaggccgaagccagcgcccagctttcctcactgttcctgtggaggatgtctacgcccaggcgagctcctcgacctctgagggaccatctccccgaccactgcccagccctctgctccctccccagaggaggcgggagggtgggctctatattttcattccaaataaaattctctttctaaaagccaggctgacctgctgctgcaagggtggggctgagaagtctggaaacctggagacagaggatgtcacaggagtcacacatgtgcagaaggtctgggggcagtgagcagccccacaggcattgctcccctggattgtcaggcagggaaactgaggcagaagacctgagaacacatgcaaggctgcatccagcttcaagttggtgctgcttcttccttggaggacaggcccggcagcccagcctcctccagagagactggggagggtctggtgtggaccaggggtcctgcagcagggaggggcaggtggggtatgtgggcaggaagcggaagcctgggccacccttcactgcagacgagcactgagctcacttctcgctcgacacagccagagctggaggtgggtgcccggcacggaggggcctgcggaccaatggtaagcctcggagccccccgggttcttgggatgggggccacaggcggtcggggctagaatgtctgggcctgtggagctaaggagggccccacattggccccagggaagaggtgagacctaagaggagtatggcagaggctgaacctttctctcacctgagctgggctccctgggactccaggcctggcccccagcaccccataccggaccaggcccctgtcaggagccctgggaaggcccttacctggtcttcctgtgagcgggaacttgcattcctggagcctgggcggacagcctggggtggtgggggaggctggctgcacctcagcacccctcccccgacaccccccacctagcctgttccgaccgcagacttcctctggcagctgcgcccgcctcccccagccccccccagcccccggccctgcacgcctgtggccctcagggactgggagtggaacggaaaccctgccgctggggcagccccgtggtggggagggaggaagaggggcctcacggacccccgtttggggacctggccaagcagaagatgagcagttgcctctgggtgcatccaggcccctccatcccccatcccaggcctcagggagagccagccctgacaccagctagcaacctccttccctccctcccatctcctctcccacccacccaggcagcctagacacatttaatccatacttattgagcacctactaacatgcttgacccaaaaagcccccgtttcctagcagcttattgtggggggtagataagacaatagacataaaaaatgagtacagttatctcctgcgttaggtgacatggaaggaaaaaggcactgagtgctggggggtgctggggtgggctgcagtgatagacatcagggtagaggttaaggtcaggttcagcctcactggggtgaagtttgagcacggtgagcaggccatgcagcccgggggaggggaggatgggaggaggtggagctttccgggcagagggaacagccagtgcgaaggccccaggcaggtggcttaatgcagctgttgggggaggtgagtggtagggaggaggctggagggatgggggctgatctcacagggccagagcctggttgaccaaataaggccttggccttttctgcttggctgtcccaagaggatcccaaagagaaaaaaacgaaagtggtcttggtcacccagcctgccccacaccaggccccaccccaggtgctgagccctctgagcccctgcctgtctcccacaggctctgccctgcaccttagggctcgggatgctgctggccctgccaggggccttgggctcgggtggcagcgcggaggacagcgtgggctccagctctgtcaccgttgtcctgctgctgctgctgctcctactgctggccactggcctagcactggcctggcgccgcctcagccgtgactcagggggctactaccacccggcccgcctaggtgccgcgctgtggggccgcacgcggcgcctgctctgggccagccccccaggtcgctggctgcaggcccgagctgagctggggtccacagacaatgaccttgagcgacaggaggatgagcaggacacagactatgaccacgtcgcggatggtggcctgcaggctgaccctggggaaggcgagcagcaatgtggagaggcgtccagcccagagcaggtccccgtgcgggctgaggaagccagagacagtgacacggagggcgacctggtcctcggctccccaggaccagcgagcgcagggggcagtgctgaggccctgctgagtgacctgcacgcctttgctggcagcgcagcctgggatgacagcgccagggcagctgggggccagggcctccatgtcaccgcactgtagaggccggtcttggtgtcccatccctgtcacagccgctcactccccgtgcctctgcttcccaagatgccatggctggactggacccccagcccacatgaccatgcctcagactgtcaccccctaccagttcccaagtccatgtgtaccccgctcaccacgggaacggccccccccaaccacaggcatcaggcaaccatttgaaataaaactccttcagcctgtg

SEQ ID NO: 122452 - DNA, 960 bp, Homo sapiens
  Payload ID: 3983
  Gene Symbol: CORO1B
  Gene Name: coronin, actin binding protein, 1B
  ENST ID: ENST00000627576
  CDS Start-End: 112-960
ctccgggtccctctgtcacttcctgaatcctgcttcctgcttcccagaggccgggatccggagccgcccgaagccggtgccgcagccccctgcgcccccggtgcccccgacatgtccttccgcaaagtggtccggcagagcaaattccggcatgtgttcgggcagccggtcaagaacgaccagtgctatgaggacattcgcgtgtcccgtgttacctgggacagcaccttctgcgccgtcaaccccaagttcctggcggtgattgtggaggccagtggagggggtgcctttctggtgctccccctaagcaagacgggccgcattgacaaggcctacccgacggtgtgtgggcacacgggacctgtcctggacatcgactggtgtcctcacaacgacgaagtcatagccagcggctcggaggactgcacggtcatggtgtggcagatcccagagaacgggctgacctccccgctgacagagccggtggtggtactggaggggcacaccaagcgagtgggcatcatcgcctggcaccccacggcccgaaacgtgctgctcagtgcaggctgcgacaacgtggtactcatctggaatgtgggcacagcggaggagctgtaccgcctggacagcctgcaccctgacctcatctacaatgtcagctggaaccacaatggcagcctgttttgctcagcatgcaaggacaagagcgtgcgcatcatcgacccccgtcggggcaccctggtggcagagcgggagaaggctcatgagggggcccggcccatgcgggccatcttcctggcagatggcaaggtgttcaccacaggcttcagccgaatgagcgagcggcagctggcgctctgggacccaggctccccgctcctccagaaagcctcctcctccagcaagcctcctggccccagccctctctgcttctgcatagtgacctccagggcaccttga

SEQ ID NO: 122453 - DNA, 3892 bp, Homo sapiens
  Payload ID: 3984
  Gene Symbol: CORO1C
  Gene Name: coronin, actin binding protein, 1C
  Uniprot ID: Q9ULV4
  ENST ID: ENST00000261401
  CDS Start-End: 174-1598
gcgcggcgcgggggcggggcctacgcgcggtggcgggggcggtggcggctgcccgcgcccctcccccgcacggcgctcagtgccaggctggaggcggcagcggttggaggcttcgcccggctttgcagcggggacttcggcggcggcgcctcaggcacctcggcccggacacgatgaggcgagtggtacgacagagcaagtttcggcatgtatttgggcaagcggtgaaaaatgaccagtgctatgatgacatccgggtttctcgtgtgacctgggatagttccttttgtgctgtcaatcccagatttgttgccataatcatagaggcaagtgggggaggagcgttccttgtcctccctctgcacaagactggtcgaattgacaaatcttaccctacagtatgtggccacacaggaccagtgctggacatagactggtgcccacataacgatcaggtcattgccagcggttcagaggactgcacggtcatggtatggcagatcccagaaaatggactcaccctttccctgactgaacctgtggtgattttggaaggccactcaaagagagtcggcatcgtggcttggcatccaacggcccgcaatgtgcttcttagtgcaggctgtgataatgccattatcatctggaatgtgggaacaggggaagcccttataaacttggacgatatgcattcagacatgatttacaatgtgagctggaaccggaatggcagtctgatctgcacagcttccaaagacaagaaagtgagagtcattgatcccaggaaacaagagattgttgctgagaaggagaaagcacatgaaggagcaagacccatgagagccatcttcctggccgatggcaatgtcttcaccactgggttcagccgcatgagcgagcggcagctggctctctggaatccgaaaaatatgcaggaaccaattgctcttcatgagatggacactagcaatggggtgttgctgcctttctatgaccctgacaccagcatcatttacttatgtggaaagggtgacagcagtattcgctattttgagatcacggatgaatccccgtacgtccactacctcaacacattcagcagcaaggagcctcagagagggatgggttacatgcccaagaggggacttgatgttaacaaatgtgagattgccagattcttcaaacttcatgagagaaagtgtgaacctattattatgactgttcccaggaagtctgaccttttccaagatgacctgtatcctgacacagcggggccagaggccgcgctggaggcagaagagtggttcgaaggcaagaatgcagacccaatcctcatctccttgaagcacgggtacattccaggcaaaaacagggatctcaaggtggtcaagaagaacattctggatagcaagcccactgcaaacaagaagtgcgacctgatcagcatccccaagaaaaccacagacacggccagtgtgcaaaatgaagccaagttggatgagattttaaaagagatcaaatctataaaagacacaatctgcaatcaagatgagcgtatttccaagttagaacagcagatggcaaagatagcagcctgaaggtcccacccccacccctacagaaaaaatgggagcaagaacttgtgcttgggagctggttattggtgtggtcctagggagggcggaaagggaggcactgccatttggagacattccatttcagatttgtcaaccagcgataggccacattccagtaagaactcaatttgtctcccaaatttgcagaaacaaaacgtgatttaaaagctgagctttttatcagaaagcttttttgatgttttaagtgttatgtgacttgttgaactttttaaaaagtgctacttttaaaatcccagatactctgaattttagaaaacaaactaattctgattgtgtcgtgcccaagtacccttttttttttaatgaatagggaccaatgccacattgctttttatatttctttcttttttaatgttgccaaaaccaaaagtagctttgttttcctttgtattttgctactttgcagtatttgtgtgtgtggttttttttccttaatttgaaagggacagcactgtgtatgtttataaactaaatgaagataagatattattttgtataaacattcatctgagaacaatcaaagcagtagccacatggtgctggctcctttgcagcacaaacctggtcattttgatgactgtacaacaggaagacttgaaaaatcacgtggattcatattaccaccgctctcatttcatggagtcttctgatcaaaaaagctcacgtcgtatttcttcttttcctttctcttttctagaaattgggtgtttgtaccagaatggaattttgcttctcggttatcctgtgcttcagatgattataatctaacccaaactagcatgtgtttctgcagtttgttacacacctaggatcatattgcattcatcactttaaacatcatgtttcaggttttggtcaatacttgacaagggtgcccaggacaggaagacgtgtactgctgagtgttccttcttgcccttttcagcagcttgcccagctcttgagtacagtggtggggactaaaaatgtgggcatgtggagaggggtatttgccctgggtgatcctgtttccctgtgctgtccccatgctgtgttggaggaggaagtggctctccttccaccaacaaagctcctgctctaccctcttcctcacatgtgctgcgacctctctcagggctcccccagccattccttctttccttcctgccttttagctctaaccacattaagctaagacaaggccagagggtgcgattgaatgagtattgagactgaggagaatgatagagagtgaagcagaaacaggagcacagacctctgctgtagctttaatgcatacaaacatgtccctccgcacaactaacctgccctgcctctccatctctcaccaaggctgcgtcaaagcacagaggctccccggactcggagggggccagagactgagctctggtcacctgttcattcctcggttagctggaactttgccccgtttccagtttcttatagtgcatgcttgggaaacaagatttaaggagcctctgttttggaagggctgtctgtgattgaacgtgaaatgtgtagtgccattgggaccacgaagggaattcttgcacatgctcgtgctggtgtgggcatgggactggctggaaacgtctgtatgcagggagccagggtgagggcagagtgtggtgacagccgaacttggagtaatgtccgtgtagaaaaaggaccatgttcttatccagccaatactgggagtgctgtctccacaatttcagggcatctgaatgtttgatgtggttttgtgtgtgtgtatgtatgtgtttaatattgaagtggatcatgagatgtaaagaaaacaataatggcaatgacttatattcaaatctgtatttgtttctttatcaatgtaatctgctgaggaccttttgtctaagattcagtagtgttttaaggttctgatatcgaattaatgaagtaaagttgttgatggtggtgaaacaccgtagggcatgtggttcaaagagaagcaggagggcaagggaaagttaccctgatcttagtttgtagcttatgacttatttaatgaatggatgcccagccaagctcagagtaggcgcccaaagcattgtggattattttcctgttttgtctttttttttttttttttttaagccatgacatcccagaagaggacagtgaattactcctaggtcggctcttatagagtggccatagtgttctgtcaaaacacttgcttccattttcagagataaaaatcattgattacaaaa

SEQ ID NO: 122454 - DNA, 3921 bp, Homo sapiens
  Payload ID: 3984
  Gene Symbol: CORO1C
  Gene Name: coronin, actin binding protein, 1C
  Uniprot ID: Q9ULV4
  ENST ID: ENST00000420959
  CDS Start-End: 50-1633
aggaccctggccacgaatcatttgccatctcctctaccaaagactcaaaatgtatggccctggtagtcagctgggaaagtctggcaataacagctgggctaaggaacgtggatgctcaattgcctgccaagggtctcttacttcagcccggctacatgcccccagcattggagagaggccactttcacacatgcgttggaaggacacgatgaggcgagtggtacgacagagcaagtttcggcatgtatttgggcaagcggtgaaaaatgaccagtgctatgatgacatccgggtttctcgtgtgacctgggatagttccttttgtgctgtcaatcccagatttgttgccataatcatagaggcaagtgggggaggagcgttccttgtcctccctctgcacaagactggtcgaattgacaaatcttaccctacagtatgtggccacacaggaccagtgctggacatagactggtgcccacataacgatcaggtcattgccagcggttcagaggactgcacggtcatggtatggcagatcccagaaaatggactcaccctttccctgactgaacctgtggtgattttggaaggccactcaaagagagtcggcatcgtggcttggcatccaacggcccgcaatgtgcttcttagtgcaggctgtgataatgccattatcatctggaatgtgggaacaggggaagcccttataaacttggacgatatgcattcagacatgatttacaatgtgagctggaaccggaatggcagtctgatctgcacagcttccaaagacaagaaagtgagagtcattgatcccaggaaacaagagattgttgctgagaaggagaaagcacatgaaggagcaagacccatgagagccatcttcctggccgatggcaatgtcttcaccactgggttcagccgcatgagcgagcggcagctggctctctggaatccgaaaaatatgcaggaaccaattgctcttcatgagatggacactagcaatggggtgttgctgcctttctatgaccctgacaccagcatcatttacttatgtggaaagggtgacagcagtattcgctattttgagatcacggatgaatccccgtacgtccactacctcaacacattcagcagcaaggagcctcagagagggatgggttacatgcccaagaggggacttgatgttaacaaatgtgagattgccagattcttcaaacttcatgagagaaagtgtgaacctattattatgactgttcccaggaagtctgaccttttccaagatgacctgtatcctgacacagcggggccagaggccgcgctggaggcagaagagtggttcgaaggcaagaatgcagacccaatcctcatctccttgaagcacgggtacattccaggcaaaaacagggatctcaaggtggtcaagaagaacattctggatagcaagcccactgcaaacaagaagtgcgacctgatcagcatccccaagaaaaccacagacacggccagtgtgcaaaatgaagccaagttggatgagattttaaaagagatcaaatctataaaagacacaatctgcaatcaagatgagcgtatttccaagttagaacagcagatggcaaagatagcagcctgaaggtcccacccccacccctacagaaaaaatgggagcaagaacttgtgcttgggagctggttattggtgtggtcctagggagggcggaaagggaggcactgccatttggagacattccatttcagatttgtcaaccagcgataggccacattccagtaagaactcaatttgtctcccaaatttgcagaaacaaaacgtgatttaaaagctgagctttttatcagaaagcttttttgatgttttaagtgttatgtgacttgttgaactttttaaaaagtgctacttttaaaatcccagatactctgaattttagaaaacaaactaattctgattgtgtcgtgcccaagtacccttttttttttaatgaatagggaccaatgccacattgctttttatatttctttcttttttaatgttgccaaaaccaaaagtagctttgttttcctttgtattttgctactttgcagtatttgtgtgtgtggttttttttccttaatttgaaagggacagcactgtgtatgtttataaactaaatgaagataagatattattttgtataaacattcatctgagaacaatcaaagcagtagccacatggtgctggctcctttgcagcacaaacctggtcattttgatgactgtacaacaggaagacttgaaaaatcacgtggattcatattaccaccgctctcatttcatggagtcttctgatcaaaaaagctcacgtcgtatttcttcttttcctttctcttttctagaaattgggtgtttgtaccagaatggaattttgcttctcggttatcctgtgcttcagatgattataatctaacccaaactagcatgtgtttctgcagtttgttacacacctaggatcatattgcattcatcactttaaacatcatgtttcaggttttggtcaatacttgacaagggtgcccaggacaggaagacgtgtactgctgagtgttccttcttgcccttttcagcagcttgcccagctcttgagtacagtggtggggactaaaaatgtgggcatgtggagaggggtatttgccctgggtgatcctgtttccctgtgctgtccccatgctgtgttggaggaggaagtggctctccttccaccaacaaagctcctgctctaccctcttcctcacatgtgctgcgacctctctcagggctcccccagccattccttctttccttcctgccttttagctctaaccacattaagctaagacaaggccagagggtgcgattgaatgagtattgagactgaggagaatgatagagagtgaagcagaaacaggagcacagacctctgctgtagctttaatgcatacaaacatgtccctccgcacaactaacctgccctgcctctccatctctcaccaaggctgcgtcaaagcacagaggctccccggactcggagggggccagagactgagctctggtcacctgttcattcctcggttagctggaactttgccccgtttccagtttcttatagtgcatgcttgggaaacaagatttaaggagcctctgttttggaagggctgtctgtgattgaacgtgaaatgtgtagtgccattgggaccacgaagggaattcttgcacatgctcgtgctggtgtgggcatgggactggctggaaacgtctgtatgcagggagccagggtgagggcagagtgtggtgacagccgaacttggagtaatgtccgtgtagaaaaaggaccatgttcttatccagccaatactgggagtgctgtctccacaatttcagggcatctgaatgtttgatgtggttttgtgtgtgtgtatgtatgtgtttaatattgaagtggatcatgagatgtaaagaaaacaataatggcaatgacttatattcaaatctgtatttgtttctttatcaatgtaatctgctgaggaccttttgtctaagattcagtagtgttttaaggttctgatatcgaattaatgaagtaaagttgttgatggtggtgaaacaccgtagggcatgtggttcaaagagaagcaggagggcaagggaaagttaccctgatcttagtttgtagcttatgacttatttaatgaatggatgcccagccaagctcagagtaggcgcccaaagcattgtggattattttcctgttttgtctttttttttttttttttttaagccatgacatcccagaagaggacagtgaattactcctaggtcggctcttatagagtggccatagtgttctgtcaaaacacttgcttccattttcagagataaaaatcattgatt

SEQ ID NO: 122455 - DNA, 1296 bp, Homo sapiens
  Payload ID: 3984
  Gene Symbol: CORO1C
  Gene Name: coronin, actin binding protein, 1C
  ENST ID: ENST00000421578
  CDS Start-End: 164-1273
acacttcatatcacaacaagcctgtaaatcctgccttaaacaaactggtcgaattgacaaatcttaccctacagtatgtggccacacaggaccagtgctggacatagactggtgcccacataacgatcaggtcattgccagcggttcagaggactgcacggtcatggtatggcagatcccagaaaatggactcaccctttccctgactgaacctgtggtgattttggaaggccactcaaagagagtcggcatcgtggcttggcatccaacggcccgcaatgtgcttcttagtgcaggctgtgataatgccattatcatctggaatgtgggaacaggggaagcccttataaacttggacgatatgcattcagacatgatttacaatgtgagctggaaccggaatggcagtctgatctgcacagcttccaaagacaagaaagtgagagtcattgatcccaggaaacaagagattgttgctgagaaggagaaagcacatgaaggagcaagacccatgagagccatcttcctggccgatggcaatgtcttcaccactgggttcagccgcatgagcgagcggcagctggctctctggaatccgaaaaatatgcaggaaccaattgctcttcatgagatggacactagcaatggggtgttgctgcctttctatgaccctgacaccagcatcatttacttatgtggaaagggtgacagcagtattcgctattttgagatcacggatgaatccccgtacgtccactacctcaacacattcagcagcaaggagcctcagagagggatgggttacatgcccaagaggggacttgatgttaacaaatgtgagattgccagattcttcaaacttcatgagagaaagtgtgaacctattattatgactgttcccaggaagtctgaccttttccaagatgacctgtatcctgacacagcggggccagaggccgcgctggaggcagaagagtggttcgaaggcaagaatgcagacccaatcctcatctccttgaagcacgggtacattccaggcaaaaacagggatctcaaggtggtcaagaagaacattctggatagcaagcccactgcaaacaagaagtgcgacctgatcagcatccccaagaaaaccacagacacggccagtgtgcaaaatgaagccaagttggatgagattttaaaagagatcaaatctataaaagacacaatctgcaatcaagatgagcgtatttccaagttagaacagcagatggcaaagatagcagcctgaaggtcccacccccacccctacag

SEQ ID NO: 122456 - DNA, 2487 bp, Homo sapiens
  Payload ID: 3984
  Gene Symbol: CORO1C
  Gene Name: coronin, actin binding protein, 1C
  Uniprot ID: Q9ULV4
  ENST ID: ENST00000541050
  CDS Start-End: 227-1651
gcgagaccagctctgggccctgcagatctcggttgggggtcaggcggggcggggcagagctggagctggagtaatgtgggtgggggcggcttgggaagaggctgagcccggccaagggagcagagggctgggactggctgggggttgggaggggaggaacgaagcaggaaggctgtcggatcgggggcccagggtgtccgagtgaactgggtgattcagagacacgatgaggcgagtggtacgacagagcaagtttcggcatgtatttgggcaagcggtgaaaaatgaccagtgctatgatgacatccgggtttctcgtgtgacctgggatagttccttttgtgctgtcaatcccagatttgttgccataatcatagaggcaagtgggggaggagcgttccttgtcctccctctgcacaagactggtcgaattgacaaatcttaccctacagtatgtggccacacaggaccagtgctggacatagactggtgcccacataacgatcaggtcattgccagcggttcagaggactgcacggtcatggtatggcagatcccagaaaatggactcaccctttccctgactgaacctgtggtgattttggaaggccactcaaagagagtcggcatcgtggcttggcatccaacggcccgcaatgtgcttcttagtgcaggctgtgataatgccattatcatctggaatgtgggaacaggggaagcccttataaacttggacgatatgcattcagacatgatttacaatgtgagctggaaccggaatggcagtctgatctgcacagcttccaaagacaagaaagtgagagtcattgatcccaggaaacaagagattgttgctgagaaggagaaagcacatgaaggagcaagacccatgagagccatcttcctggccgatggcaatgtcttcaccactgggttcagccgcatgagcgagcggcagctggctctctggaatccgaaaaatatgcaggaaccaattgctcttcatgagatggacactagcaatggggtgttgctgcctttctatgaccctgacaccagcatcatttacttatgtggaaagggtgacagcagtattcgctattttgagatcacggatgaatccccgtacgtccactacctcaacacattcagcagcaaggagcctcagagagggatgggttacatgcccaagaggggacttgatgttaacaaatgtgagattgccagattcttcaaacttcatgagagaaagtgtgaacctattattatgactgttcccaggaagtctgaccttttccaagatgacctgtatcctgacacagcggggccagaggccgcgctggaggcagaagagtggttcgaaggcaagaatgcagacccaatcctcatctccttgaagcacgggtacattccaggcaaaaacagggatctcaaggtggtcaagaagaacattctggatagcaagcccactgcaaacaagaagtgcgacctgatcagcatccccaagaaaaccacagacacggccagtgtgcaaaatgaagccaagttggatgagattttaaaagagatcaaatctataaaagacacaatctgcaatcaagatgagcgtatttccaagttagaacagcagatggcaaagatagcagcctgaaggtcccacccccacccctacagaaaaaatgggagcaagaacttgtgcttgggagctggttattggtgtggtcctagggagggcggaaagggaggcactgccatttggagacattccatttcagatttgtcaaccagcgataggccacattccagtaagaactcaatttgtctcccaaatttgcagaaacaaaacgtgatttaaaagctgagctttttatcagaaagcttttttgatgttttaagtgttatgtgacttgttgaactttttaaaaagtgctacttttaaaatcccagatactctgaattttagaaaacaaactaattctgattgtgtcgtgcccaagtacccttttttttttaatgaatagggaccaatgccacattgctttttatatttctttcttttttaatgttgccaaaaccaaaagtagctttgttttcctttgtattttgctactttgcagtatttgtgtgtgtggttttttttccttaatttgaaagggacagcactgtgtatgtttataaactaaatgaagataagatattattttgtataaacattcatctgagaacaatcaaagcagtagccacatggtgctggctcctttgcagcacaaacctggtcattttgatgactgtacaacaggaagacttgaaaaatcacgtggattcatattaccaccgctctcatttcatggagtcttctgatcaaaaaagctcacgtcgtatttcttcttttcctttctcttttctagaaattgggtgtttgtaccagaatggaattttgcttctcggttatcctgtgcttcagatgattataatctaacccaaact

SEQ ID NO: 122457 - DNA, 567 bp, Homo sapiens
  Payload ID: 3984
  Gene Symbol: CORO1C
  Gene Name: coronin, actin binding protein, 1C
  ENST ID: ENST00000551044
  CDS Start-End: 114-567
gtcggatcgggggcccagggtgtccgagtgaactgggtgattcagaggtgtgtttccctaatagcggggcagctggcgagggacgcagtaaaaaggagcgaggtgcagacacgatgaggcgagtggtacgacagagcaagtttcggcatgtatttgggcaagcggtgaaaaatgaccagtgctatgatgacatccgggtttctcgtgtgacctgggatagttccttttgtgctgtcaatcccagatttgttgccataatcatagaggcaagtgggggaggagcgttccttgtcctccctctgcacaagactggtcgaattgacaaatcttaccctacagtatgtggccacacaggaccagtgctggacatagactggtgcccacataacgatcaggtcattgccagcggttcagaggactgcacggtcatggtatggcagatcccagaaaatggactcaccctttccctgactgaacctgtggtgattttggaaggccactcaaagagagtcggcatcgtggcttggcatccaacggcccgcaatgtgcttcttagtgcaggtggga

SEQ ID NO: 122458 - DNA, 577 bp, Homo sapiens
  Payload ID: 3984
  Gene Symbol: CORO1C
  Gene Name: coronin, actin binding protein, 1C
  ENST ID: ENST00000546705
  CDS Start-End: 1-498
agcaaggagcctcagagagggatgggttacatgcccaagaggggacttgatgttaacaaatgtgagattgccagattcttcaaacttcatgagagaaagtgtgaacctattattatgactgttcccaggaagtctgaccttttccaagatgacctgtatcctgacacagcggggccagaggccgcgctggaggcagaagagtggttcgaaggcaagaatgcagacccaatcctcatctccttgaagcacgggtacattccaggcaaaaacagggatctcaaggtggtcaagaagaacattctggatagcaagcccactgcaaacaagaagtgcgacctgatcagcatccccaagaaaaccacagacacggccagtgtgcaaaatgaagccaagttggatgagattttaaaagagatcaaatctataaaagacacaatctgcaatcaagatgagcgtatttccaagttagaacagcagatggcaaagatagcagcctgaagaaattgggtgtttgtaccagaatggaattttgcttctcggttatcctgtgcttcagatgattataatctaacccaaa

SEQ ID NO: 122459 - DNA, 1710 bp, Homo sapiens
  Payload ID: 3984
  Gene Symbol: CORO1C
  Gene Name: coronin, actin binding protein, 1C
  Uniprot ID: Q9ULV4
  ENST ID: ENST00000549772
  CDS Start-End: 268-1710
ttttgcttttcaccacctcatggaagctgtcttatctaactcacgcttgagaagtattcatattgattccaaaatgaaggaccctggccacgaatcatttgccatctcctctaccaaagactcaaaatgtatggccctggtagtcagctgggaaagtctggcaataacagctgggctaaggaacgtggatgctcaattgcctgccaagggtctcttacttcagcccggctacatgcccccagcattggagagaggccactttcacacatgcgttggaaggacacgatgaggcgagtggtacgacagagcaagtttcggcatgtatttgggcaagcggtgaaaaatgaccagtgctatgatgacatccgggtttctcgtgtgacctgggatagttccttttgtgctgtcaatcccagatttgttgccataatcatagaggcaagtgggggaggagcgttccttgtcctccctctgcacaagactggtcgaattgacaaatcttaccctacagtatgtggccacacaggaccagtgctggacatagactggtgcccacataacgatcaggtcattgccagcggttcagaggactgcacggtcatggtatggcagatcccagaaaatggactcaccctttccctgactgaacctgtggtgattttggaaggccactcaaagagagtcggcatcgtggcttggcatccaacggcccgcaatgtgcttcttagtgcaggctgtgataatgccattatcatctggaatgtgggaacaggggaagcccttataaacttggacgatatgcattcagacatgatttacaatgtgagctggaaccggaatggcagtctgatctgcacagcttccaaagacaagaaagtgagagtcattgatcccaggaaacaagagattgttgctgagaaggagaaagcacatgaaggagcaagacccatgagagccatcttcctggccgatggcaatgtcttcaccactgggttcagccgcatgagcgagcggcagctggctctctggaatccgaaaaatatgcaggaaccaattgctcttcatgagatggacactagcaatggggtgttgctgcctttctatgaccctgacaccagcatcatttacttatgtggaaagggtgacagcagtattcgctattttgagatcacggatgaatccccgtacgtccactacctcaacacattcagcagcaaggagcctcagagagggatgggttacatgcccaagaggggacttgatgttaacaaatgtgagattgccagattcttcaaacttcatgagagaaagtgtgaacctattattatgactgttcccaggaagtctgaccttttccaagatgacctgtatcctgacacagcggggccagaggccgcgctggaggcagaagagtggttcgaaggcaagaatgcagacccaatcctcatctccttgaagcacgggtacattccaggcaaaaacagggatctcaaggtggtcaagaagaacattctggatagcaagcccactgcaaacaagaagtgcgacctgatcagcatccccaagaaaaccacagacacggccagtgtgcaaaatgaagccaagttggatgagattttaaaagagatcaaatctataaaagacacaatctgcaatcaagatgagcgtatttccaagttagaacagcagatggcaaagatagcagcctga

SEQ ID NO: 122460 - DNA, 547 bp, Homo sapiens
  Payload ID: 3984
  Gene Symbol: CORO1C
  Gene Name: coronin, actin binding protein, 1C
  ENST ID: ENST00000550032
  CDS Start-End: 39-547
aattctaacataattctcactcttcctttgcagacacgatgaggcgagtggtacgacagagcaagtttcggcatgtatttgggcaagcggtgaaaaatgaccagtgctatgatgacatccgggtttctcgtgtgacctgggatagttccttttgtgctgtcaatcccagatttgttgccataatcatagaggcaagtgggggaggagcgttccttgtcctccctctgcacaagactggtcgaattgacaaatcttaccctacagtatgtggccacacaggaccagtgctggacatagactggtgcccacataacgatcaggtcattgccagcggttcagaggactgcacggtcatggtatggcagatcccagaaaatggactcaccctttccctgactgaacctgtggtgattttggaaggccactcaaagagagtcggcatcgtggcttggcatccaacggcccgcaatgtgcttcttagtgcaggctgtgataatgccattatcatctggaatgtgggaacaggggaagcccttataaacttgga

SEQ ID NO: 122461 - DNA, 1245 bp, Homo sapiens
  Payload ID: 3984
  Gene Symbol: CORO1C
  Gene Name: coronin, actin binding protein, 1C
  ENST ID: ENST00000550542
  CDS Start-End: 104-583
cggcgctcagtgccaggctggaggcggcagcggttggaggcttcgcccggctttgcagcggggacttcggcggcggcgcctcaggcacctcggcccggacacgatgaggcgagtggtacgacagagcaagtttcggcatgtatttgggcaagcggtgaaaaatgaccagtgctatgatgacatccgggtttctcgtgtgacctgggatagttccttttgtgctgtcaatcccagatttgttgccataatcatagaggcaagtgggggaggagcgttccttgtcctccctctgcacaagactggtcgaattgacaaatcttaccctacagtatgtggccacacaggaccagtgctggacatagactggtgcccacataacgatcaggtcattgccagcggttcagaggactgcacggtcatggtatggcagatcccagaaaatggactcaccctttccctgactgaacctgtggtgattttggaaggccactcaaagagagtcggcatcgtggcttggcatccaacggcccgcaatgtgcttcttagtgcagaaaaatatgcaggaaccaattgctcttcatgagatggacactagcaatggggtgttgctgcctttctatgaccctgacaccagcatcatttacttatgtggaaagggtgacagcagtattcgctattttgagatcacggatgaatccccgtacgtccactacctcaacacattcagcagcaaggagcctcagagagggatgggttacatgcccaagaggggacttgatgttaacaaatgtgagattgccagattcttcaaacttcatgagagaaagtgtgaacctattattatgactgttcccaggaagtctgaccttttccaagatgacctgtatcctgacacagcggggccagaggccgcgctggaggcagaagagtggttcgaaggcaagaatgcagacccaatcctcatctccttgaagcacgggtacattccaggcaaaaacagggatctcaaggtggtcaagaagaacattctggatagcaagcccactgcaaacaagaagtgcgacctgatcagcatccccaagaaaaccacagacacggccagtgtgcaaaatgaagccaagttggatgagattttaaaagagatcaaatctataaaagacacaatctgcaatcaagatgagcgtatttccaagttagaacagcagatggcaaagatagcagcctgaaggtcccacccccacccct

SEQ ID NO: 122462 - DNA, 899 bp, Homo sapiens
  Payload ID: 3984
  Gene Symbol: CORO1C
  Gene Name: coronin, actin binding protein, 1C
  ENST ID: ENST00000546571
  CDS Start-End: 413-899
gctgcgccgaaatgactgaggatgaggtcagacgtggagggtgggaatgcagaaaccgagctctcccgcctgtccccaccggcgcacgctccccagctctccgtctctcaaatgatttgaatgtgttgggggaagtggcaggctgcggtgagagctgagaagaaaggggcttcctcttggagggaggcgctggccctggcatccttttttgggagtgttcaaaggattttgaacgctggaaaaggaatcgtaggctttactgcatcacgatttagaaacacatcctatatttggccgtaatgtaggctgcccttgttttgtggtgtctaaagtgcttgctctacatgttgcaaacgtgggattcagagtgcgaagcaaattgcaagttgttcatttcccccggcatgacacgatgaggcgagtggtacgacagagcaagtttcggcatgtatttgggcaagcggtgaaaaatgaccagtgctatgatgacatccgggtttctcgtgtgacctgggatagttccttttgtgctgtcaatcccagatttgttgccataatcatagaggcaagtgggggaggagcgttccttgtcctccctctgcacaagactggtcgaattgacaaatcttaccctacagtatgtggccacacaggaccagtgctggacatagactggtgcccacataacgatcaggtcattgccagcggttcagaggactgcacggtcatggtatggcagatcccagaaaatggactcaccctttccctgactgaacctgtggtgattttggaaggccactcaaagagagtcggcatcgtggcttggcatccaacggcccgcaatgtgcttcttagtgcaggctgtgataatgccattatcatctggaatgtgggaacag

SEQ ID NO: 122463 - DNA, 547 bp, Homo sapiens
  Payload ID: 3984
  Gene Symbol: CORO1C
  Gene Name: coronin, actin binding protein, 1C
  ENST ID: ENST00000551550
  CDS Start-End: 58-547
aggctttcgaggtccggaacgctcctggccgggtgcggagccgcgggccgagacacgatgaggcgagtggtacgacagagcaagtttcggcatgtatttgggcaagcggtgaaaaatgaccagtgctatgatgacatccgggtttctcgtgtgacctgggatagttccttttgtgctgtcaatcccagatttgttgccataatcatagaggcaagtgggggaggagcgttccttgtcctccctctgcacaagactggtcgaattgacaaatcttaccctacagtatgtggccacacaggaccagtgctggacatagactggtgcccacataacgatcaggtcattgccagcggttcagaggactgcacggtcatggtatggcagatcccagaaaatggactcaccctttccctgactgaacctgtggtgattttggaaggccactcaaagagagtcggcatcgtggcttggcatccaacggcccgcaatgtgcttcttagtgcaggctgtgataatgccattatcatctggaatgtgggaacagggg

SEQ ID NO: 122464 - DNA, 566 bp, Homo sapiens
  Payload ID: 3984
  Gene Symbol: CORO1C
  Gene Name: coronin, actin binding protein, 1C
  ENST ID: ENST00000547294
  CDS Start-End: 22-566
actaggcggtttggtaacacgatgaggcgagtggtacgacagagcaagtttcggcatgtatttgggcaagcggtgaaaaatgaccagtgctatgatgacatccgggtttctcgtgtgacctgggatagttccttttgtgctgtcaatcccagatttgttgccataatcatagaggcaagtgggggaggagcgttccttgtcctccctctgcacaagactggtcgaattgacaaatcttaccctacagtatgtggccacacaggaccagtgctggacatagactggtgcccacataacgatcaggtcattgccagcggttcagaggactgcacggtcatggtatggcagatcccagaaaatggactcaccctttccctgactgaacctgtggtgattttggaaggccactcaaagagagtcggcatcgtggcttggcatccaacggcccgcaatgtgcttcttagtgcaggctgtgataatgccattatcatctggaatgtgggaacaggggaagcccttataaacttggacgatatgcattcagacatgatttacaatgtgagctg

SEQ ID NO: 122465 - DNA, 587 bp, Homo sapiens
  Payload ID: 3984
  Gene Symbol: CORO1C
  Gene Name: coronin, actin binding protein, 1C
  ENST ID: ENST00000552871
  CDS Start-End: 211-587
agtgccaggctggaggcggcagcggttggaggcttcgcccggctttgcagcggggacttcggcggcggcgcctcaggcacctcggcccggactggtcgaattgacaaatcttaccctacagtatgtggccacacaggaccagtgctggacatagactggtgcccacataacgatcaggtcattgccagcggttcagaggactgcacggtcatggtatggcagatcccagaaaatggactcaccctttccctgactgaacctgtggtgattttggaaggccactcaaagagagtcggcatcgtggcttggcatccaacggcccgcaatgtgcttcttagtgcaggctgtgataatgccattatcatctggaatgtgggaacaggggaagcccttataaacttggacgatatgcattcagacatgatttacaatgtgagctggaaccggaatggcagtctgatctgcacagcttccaaagacaagaaagtgagagtcattgatcccaggaaacaagagattgttgctgagaaggagaaagcacatgaaggagcaagacccatgagagccatcttcctggccgatggcaa

SEQ ID NO: 122466 - DNA, 5635 bp, Homo sapiens
  Payload ID: 3985
  Gene Symbol: CORO2A
  Gene Name: coronin, actin binding protein, 2A
  Uniprot ID: Q92828
  ENST ID: ENST00000343933
  CDS Start-End: 259-1836
cactgacatctttgctggactcttttaatcctcataaacccaggctgctggcacttgaaatttgagaagggcaatcagtctggcctcctgcctttctggcctgcaggcccagcctggacaaacaatttaggtggagctcctggaggctggaagcagagaggaggtacctcaccatcctctcctgccagctgttgcagactctgcctggggaactgattaagggtgagcagaggcatttatctccatgttaacaagcagatgtcatggcacccccagtaccggagctccaagttccgtcatgtctttggcaaaccagccagcaaggagaactgctacgactccgtgcctatcacccgcagcgttcacgacaaccacttctgtgccgtgaacccccacttcattgcagttgtgactgagtgtgctggtggaggggccttcctcgtcatccccctgcaccagacagggaagttggacccccactacccaaaagtctgcgggcacagaggcaacgttttggatgtcaagtggaacccttttgatgattttgagatcgcctcctgttctgaagatgccacaattaagatctggagcatccccaagcagctgctgaccaggaacctcacggcctacaggaaggaactcgtgggccacgcgcgcagagtaggcctggtggagtggcaccccacggccgccaacatcctcttcagtgctggctatgactacaaggtgatgatctggaacctggatacaaaggagtctgtcatcacaagccccatgagtacgattagctgtcaccaagatgtgatcctctccatgtccttcaacaccaacggcagcctgttggccaccacctgcaaagaccgcaagattcgggttattgacccccgagcagggaccgtcctccaggaggccagctacaaagggcaccgggccagcaaagtgctgtttctggggaacctgaagaagctgatgtccacaggcacatcccgatggaacaaccggcaggtggccttgtgggaccaggataacctctctgtgcctctgatggaggaggacctggacggctcctcgggcgtgctgtttcccttctatgacgcggacaccagcatgctctacgtggtggggaagggagatggcaacatccgctactacgaggtgagcgccgacaagcctcacctgagctacctgactgagtaccgctcctataacccacagaaggggatcggtgtcatgccaaagagaggactcgacgtgtcctcctgcgagatcttccgcttctacaagctgatcacaaccaaaagcctcatcgagcccatctccatgattgtgccccggcggtcagaatcctaccaagaggacatataccctccaacagcaggggcccagccctccctgacggcccaggagtggctcagcgggatgaatcgagacccaatcctggtgtcccttaggcctggctctgagctgctgagaccccacccactgcctgcagagagacctatcttcaattccatggccccagcctcaccccggctcttgaatcagacagaaaagctggctgcagaagatggctggaggtcttcctccctgttggaggagaagatgccaaggtgggcagcagaacacaggctggaggagaagaaaacctggctgacaaatggctttgacgttttcgaatgccccccaccaaagacagagaatgagttgctgcagatgttctaccggcaacaggaggagatccgaaggctccgggagctgttgacccagcgagaggtccaggccaaacagttggaactggagatcaaaaacttgcggatgggctcagagcagctctgagcagagacctctgccctcctcaccctcagggacaccactcggctccatggggaggtttagaaccaaaccacaagtcccctcaaggacaaccactatttctatattttttaccagaaaacaaaactctccatcgctgaaagagattccagtgggacatggtgccgtttttctgtttgccttcttgcaacaacagtttctgaattgactttgttttcagatgatgccttctgttgaattctgttattaagggcccatgatgagctgtaacttctcaagaggaaagaacacagtagaaaactagagctggaaggatctaggttgacctgtctgtgattttcaaactgtggtccagagaataggggaagactgggccagacgcagtggctcatgcctgtaatcccagcactctgggaggctgaggtgggcggattgcttgaggtcgggagtttgaaaccagtctcaccaggcgcagtggctcacgcctgtaattccagcatgttgggaggccgaggctggtggatcacgaggtcagcagttcgagaccagcctgaccaacatggtgaaaccccatctctactaaaaatacaaaaaaattagctgggcgtggtggcaggcgcctgtaattccagcgacttgggaggctgaggcaggagaattgcttgaaaccggaaggcgggggttgcagtgagctgagattgtgccactgcactctaacctgggcaataagagcaaaagtctgtctcaaaaaaaaaaaaaaaagaaagaaaccagcctggccaacatggtgaaaccccgtctctactaaaaatacaaaaattaggcagggcgtggtggttcacgcctataatcccagaactttgggaggccaagctgggcggatcttctgaggtcaggagttcaagaccagcctggccaacatggtgaaaccccgtctccactaaaaataaaaaattaaccaggcatggtggtgcatgcctgtaatcccagctatttgggaggctgaggcaggagaatcgcttgagcctgggaggcggaggttgcagtgaaccaagatcatgccacttcactccagcctgggtgacagagtgagactccgtctcaaaaaaaaaaagttggccagccgtggtggtgagcgtctgtagtccctgctattcgggaggctgagataggagaattgcttgaacctgggaggtggaggttgctatgagccacgattgcggactgcactgcagcctgggtgacagagcgagactccatctccaaaaaaaaaaaaaaaaagagagagagaataggggaagactaagcaggaaggctgtgtctcccttccccacactgtattccaaccagacagctcccttctattttatatgttgggctagtatgaaaaacaattctgctaggaaaaaaaaatttttttagaagtttgaaagctagtgatttgacccaagttcctcattttacagctggggaaactaaggcctagagagaggcaagtgatatttgtttcatggcagggctgggctgagatcctgcttttctgggtctgtctttttgctcttttgggtctgatgcagttctcagcccaaagagtagaaatctgttgcttctggcctcagctgtgccccagcttactcagtgacctcttgcaagtcctgccctctctggtctcagtttcttcatctgaaccaggggtaccctggaacaagctgctctctgcaggatctgccacctgaaaccttgacctaagagaaaactacctgtggggtgatctgggtttgctacagaaactaacggacactggcaaggggtcagaggcattcaacccaattctacaacacaggcaggtggtcaaaaccaacctttccaaccagaatcagcctgatatggatagatgctgtcccttatggagggacgcagacttcagaactgtgcccatgactgctgactgccaccaccaaggccctcaggtacacagcctgcctcctgcaggatgatgtgggcagatttcagccctagttaacagaagagtcccccaggaggtagggggcccccatcactggagacatgccagcagagcctctggccacctaaccaggaggtcttctgaaatgactatacgaggtaaagaagtagtaccagatggtcccaaagttcccttttagcctgaaagcttttctttgtccctccttagtgaatctgtgttccgagccctactctaaagttcagtggtcaatacaatagtccaccaagagactgggaatgattagaagtgaaattggtccctccttaccaaggaggggcagatgatctccattgcacagggcgattagattctggagctgaggtggggactgcaggaggccacctagtctggtaggtttcaacccaagctgtgtacattagaattcccttgggagcgtgcaggaaatacagatgcccatgccacattccagaccaactgaagctgaatctccagagtagggcctgtatggtcatataagctccacaggtgatctgcagtacagtgaagatggaagactgcatgtgtacctatttgcaataaagatgaagaggacagcaagctccagacaggagctgggactcaacccagatctcttaagtcctgcctggtggctccttaaaagtccagaagtgttgccccaagccctccctcaacatctctgggaaccgcagctgcagcacgatgggggttcagtgcccctgtttgccccttacccagctgtggtttattctgcttgtatgtctgcacaggccggatgctcgtgttccttgtcttattctccatttactcagtcactggggctcactcccgtctgatgcactagccaagattgccttagtgtgctccagaaaagaaggccaaatcccaggcattgtcagggcagcagagctctacaggataggcttacctttcccacctgtgtggctagcacttcacagtttacaaattcctcccacctccactcagtgacacatgctgttctaacacaggtcaggcaggcattacagtccccatgttcagaatcaaagacctagcctcagagaagtgaagaaacatcatgccaaggtcattgactgccaagcggtagaggtggggttgcatccagagagcttcccggtatgcctctgcacaatgccattccttggccagctccctccaccccaagggacccagactgcacacttaacaaacaggacacaggtgtctttgaacaaacttttttgtattattatttttacatctagaataaattatttaaattatttcacagcaagggagagggataggtaatttttatcagatatttttttaaaccatctgttttttaaattacatttttgtttatgttcttgagctgatgtagtggaacttgcctagcacattcaggtcccagccagttggcagagcatgctctcatctccttattccataccctgggcgtcccctttctgttgactcaggaactttctgagaatgaggacagcactaggagatgagctttggcaggtatccaccttaacgctacaataattgtgcttcctgaaacaaaacttgagattgtatcatagaaggaaacaggaagtcagaaatcaaatctatgcttttaattgaaaccgtgcctgaaacagtttgaatgattgttttaatgttgtttctgaaattccttgtacctttgtgaaaaataatgataataaataaaagtgaaaataaatagatgtggaatatgcaatggaaataatgtaacaaaataataaacatctggccattttactacaa

SEQ ID NO: 122467 - DNA, 5459 bp, Homo sapiens
  Payload ID: 3985
  Gene Symbol: CORO2A
  Gene Name: coronin, actin binding protein, 2A
  Uniprot ID: Q92828
  ENST ID: ENST00000375077
  CDS Start-End: 83-1660
cgggagtcggcgggcggcgaggagcgcggagccggagctggacgccgccgccgccaccgccacctgcgcggcagtcatcaagatgtcatggcacccccagtaccggagctccaagttccgtcatgtctttggcaaaccagccagcaaggagaactgctacgactccgtgcctatcacccgcagcgttcacgacaaccacttctgtgccgtgaacccccacttcattgcagttgtgactgagtgtgctggtggaggggccttcctcgtcatccccctgcaccagacagggaagttggacccccactacccaaaagtctgcgggcacagaggcaacgttttggatgtcaagtggaacccttttgatgattttgagatcgcctcctgttctgaagatgccacaattaagatctggagcatccccaagcagctgctgaccaggaacctcacggcctacaggaaggaactcgtgggccacgcgcgcagagtaggcctggtggagtggcaccccacggccgccaacatcctcttcagtgctggctatgactacaaggtgatgatctggaacctggatacaaaggagtctgtcatcacaagccccatgagtacgattagctgtcaccaagatgtgatcctctccatgtccttcaacaccaacggcagcctgttggccaccacctgcaaagaccgcaagattcgggttattgacccccgagcagggaccgtcctccaggaggccagctacaaagggcaccgggccagcaaagtgctgtttctggggaacctgaagaagctgatgtccacaggcacatcccgatggaacaaccggcaggtggccttgtgggaccaggataacctctctgtgcctctgatggaggaggacctggacggctcctcgggcgtgctgtttcccttctatgacgcggacaccagcatgctctacgtggtggggaagggagatggcaacatccgctactacgaggtgagcgccgacaagcctcacctgagctacctgactgagtaccgctcctataacccacagaaggggatcggtgtcatgccaaagagaggactcgacgtgtcctcctgcgagatcttccgcttctacaagctgatcacaaccaaaagcctcatcgagcccatctccatgattgtgccccggcggtcagaatcctaccaagaggacatataccctccaacagcaggggcccagccctccctgacggcccaggagtggctcagcgggatgaatcgagacccaatcctggtgtcccttaggcctggctctgagctgctgagaccccacccactgcctgcagagagacctatcttcaattccatggccccagcctcaccccggctcttgaatcagacagaaaagctggctgcagaagatggctggaggtcttcctccctgttggaggagaagatgccaaggtgggcagcagaacacaggctggaggagaagaaaacctggctgacaaatggctttgacgttttcgaatgccccccaccaaagacagagaatgagttgctgcagatgttctaccggcaacaggaggagatccgaaggctccgggagctgttgacccagcgagaggtccaggccaaacagttggaactggagatcaaaaacttgcggatgggctcagagcagctctgagcagagacctctgccctcctcaccctcagggacaccactcggctccatggggaggtttagaaccaaaccacaagtcccctcaaggacaaccactatttctatattttttaccagaaaacaaaactctccatcgctgaaagagattccagtgggacatggtgccgtttttctgtttgccttcttgcaacaacagtttctgaattgactttgttttcagatgatgccttctgttgaattctgttattaagggcccatgatgagctgtaacttctcaagaggaaagaacacagtagaaaactagagctggaaggatctaggttgacctgtctgtgattttcaaactgtggtccagagaataggggaagactgggccagacgcagtggctcatgcctgtaatcccagcactctgggaggctgaggtgggcggattgcttgaggtcgggagtttgaaaccagtctcaccaggcgcagtggctcacgcctgtaattccagcatgttgggaggccgaggctggtggatcacgaggtcagcagttcgagaccagcctgaccaacatggtgaaaccccatctctactaaaaatacaaaaaaattagctgggcgtggtggcaggcgcctgtaattccagcgacttgggaggctgaggcaggagaattgcttgaaaccggaaggcgggggttgcagtgagctgagattgtgccactgcactctaacctgggcaataagagcaaaagtctgtctcaaaaaaaaaaaaaaaagaaagaaaccagcctggccaacatggtgaaaccccgtctctactaaaaatacaaaaattaggcagggcgtggtggttcacgcctataatcccagaactttgggaggccaagctgggcggatcttctgaggtcaggagttcaagaccagcctggccaacatggtgaaaccccgtctccactaaaaataaaaaattaaccaggcatggtggtgcatgcctgtaatcccagctatttgggaggctgaggcaggagaatcgcttgagcctgggaggcggaggttgcagtgaaccaagatcatgccacttcactccagcctgggtgacagagtgagactccgtctcaaaaaaaaaaagttggccagccgtggtggtgagcgtctgtagtccctgctattcgggaggctgagataggagaattgcttgaacctgggaggtggaggttgctatgagccacgattgcggactgcactgcagcctgggtgacagagcgagactccatctccaaaaaaaaaaaaaaaaagagagagagaataggggaagactaagcaggaaggctgtgtctcccttccccacactgtattccaaccagacagctcccttctattttatatgttgggctagtatgaaaaacaattctgctaggaaaaaaaaatttttttagaagtttgaaagctagtgatttgacccaagttcctcattttacagctggggaaactaaggcctagagagaggcaagtgatatttgtttcatggcagggctgggctgagatcctgcttttctgggtctgtctttttgctcttttgggtctgatgcagttctcagcccaaagagtagaaatctgttgcttctggcctcagctgtgccccagcttactcagtgacctcttgcaagtcctgccctctctggtctcagtttcttcatctgaaccaggggtaccctggaacaagctgctctctgcaggatctgccacctgaaaccttgacctaagagaaaactacctgtggggtgatctgggtttgctacagaaactaacggacactggcaaggggtcagaggcattcaacccaattctacaacacaggcaggtggtcaaaaccaacctttccaaccagaatcagcctgatatggatagatgctgtcccttatggagggacgcagacttcagaactgtgcccatgactgctgactgccaccaccaaggccctcaggtacacagcctgcctcctgcaggatgatgtgggcagatttcagccctagttaacagaagagtcccccaggaggtagggggcccccatcactggagacatgccagcagagcctctggccacctaaccaggaggtcttctgaaatgactatacgaggtaaagaagtagtaccagatggtcccaaagttcccttttagcctgaaagcttttctttgtccctccttagtgaatctgtgttccgagccctactctaaagttcagtggtcaatacaatagtccaccaagagactgggaatgattagaagtgaaattggtccctccttaccaaggaggggcagatgatctccattgcacagggcgattagattctggagctgaggtggggactgcaggaggccacctagtctggtaggtttcaacccaagctgtgtacattagaattcccttgggagcgtgcaggaaatacagatgcccatgccacattccagaccaactgaagctgaatctccagagtagggcctgtatggtcatataagctccacaggtgatctgcagtacagtgaagatggaagactgcatgtgtacctatttgcaataaagatgaagaggacagcaagctccagacaggagctgggactcaacccagatctcttaagtcctgcctggtggctccttaaaagtccagaagtgttgccccaagccctccctcaacatctctgggaaccgcagctgcagcacgatgggggttcagtgcccctgtttgccccttacccagctgtggtttattctgcttgtatgtctgcacaggccggatgctcgtgttccttgtcttattctccatttactcagtcactggggctcactcccgtctgatgcactagccaagattgccttagtgtgctccagaaaagaaggccaaatcccaggcattgtcagggcagcagagctctacaggataggcttacctttcccacctgtgtggctagcacttcacagtttacaaattcctcccacctccactcagtgacacatgctgttctaacacaggtcaggcaggcattacagtccccatgttcagaatcaaagacctagcctcagagaagtgaagaaacatcatgccaaggtcattgactgccaagcggtagaggtggggttgcatccagagagcttcccggtatgcctctgcacaatgccattccttggccagctccctccaccccaagggacccagactgcacacttaacaaacaggacacaggtgtctttgaacaaacttttttgtattattatttttacatctagaataaattatttaaattatttcacagcaagggagagggataggtaatttttatcagatatttttttaaaccatctgttttttaaattacatttttgtttatgttcttgagctgatgtagtggaacttgcctagcacattcaggtcccagccagttggcagagcatgctctcatctccttattccataccctgggcgtcccctttctgttgactcaggaactttctgagaatgaggacagcactaggagatgagctttggcaggtatccaccttaacgctacaataattgtgcttcctgaaacaaaacttgagattgtatcatagaaggaaacaggaagtcagaaatcaaatctatgcttttaattgaaaccgtgcctgaaacagtttgaatgattgttttaatgttgtttctgaaattccttgtacctttgtgaaaaataatgataataaataaaagtgaaaataaatagatgtggaatatgcaatggaaataatgtaacaaaataataaacatctggccattttactacaa

SEQ ID NO: 122468 - DNA, 3569 bp, Homo sapiens
  Payload ID: 3986
  Gene Symbol: CORO2B
  Gene Name: coronin, actin binding protein, 2B
  Uniprot ID: Q9UQ03
  ENST ID: ENST00000261861
  CDS Start-End: 310-1737
cgggccctctccctctctccctttcttcctgcctcgccttcctgcggcgaaggaggctcatctattataaatgcacattcggggctgacatcagcgacgagcggcgggcgagcgccgacgagcggtccctgcgcgctgcccgcccggagcgcagcccccaggctcggccgagccgccggcggggcgcggggagcgagccgggagctgccggacccccttccgccgccgccccgggccgccgccgccgcccccgcacgccgcgcccgcgcccccgctccgccgcggagtttctgcatgactgtcacaaagatgtcctggcgtccgcaataccgtagctccaagttccggaatgtctacgggaaggtggccaaccgggagcactgcttcgatgggatccccatcaccaagaatgtgcacgacaaccacttctgtgccgtcaacacccgcttcctggccatcgtcaccgagagcgcagggggcggctccttcctcgtcatccccctggagcagacaggcaggattgaacccaactaccccaaggtctgcggccaccagggcaatgtgctggatatcaaatggaaccccttcatcgacaacatcattgcctcgtgctcggaggacacgtcggtgcggatctgggagatccccgagggcgggctgaagcggaacatgacggaggcgctcctggagctgcacgggcacagccggcgtgtggggctggtcgagtggcaccccaccaccaacaacatcctgttcagcgctggctacgactacaaggtcctcatctggaacctggatgtgggtgagccggtgaagatgattgactgccacacggatgtgatcctctgcatgtccttcaacacggacggcagcctgctcaccaccacgtgcaaggacaagaagctgcgtgtgattgagccccgctctggccgtgttctgcaggaggccaactgcaaaaaccacagagtgaaccgggtggtgttcctggggaacatgaagcggctcctcacgacaggggtctccaggtggaacacaagacagattgccctctgggaccaggaggacctctccatgcccctgatcgaagaggaaattgatgggctctctggcctcctgttccccttctatgatgctgacacccacatgctctacctggctggaaagggtgatggaaacatccggtactacgagatcagcactgagaagccctacctgagttacctcatggagttccgctccccagccccgcagaaaggcctaggggtcatgcccaagcacgggctggatgtgtcagcctgcgaggtgttccgcttctacaagctggtgactctcaagggcctgatcgagcccatctccatgatcgtgccccggaggtcagattcctaccaggaagacatttacccaatgacaccaggcacggagccagcactgaccccggatgaatggctgggaggcatcaaccgagatcccgtgctgatgtctttgaaagaaggctataagaagtcctcaaaaatggtatttaaggctcccatcaaagaaaagaagagtgttgtggtcaacggaatagatttattagaaaatgtcccacccaggacagagaatgagctccttcgaatgttcttccggcagcaggatgagattcgacggttgaaagaggagctggcccagaaggacatccgcattcggcagctccagctggaactgaaaaacttgcgcaacagccccaagaactgttagctccccagctgggctgttttctaagccgatctctccgtcgtttctactcatcccttaacttctcccttaccagtgaccccagagacagagccaggacaggagtgggggccagcctgaggacccccgcctaccacctcgagaactggaagccaacctctaacctcctgacctcatgctaataaaagtccccagcttctggagaccccctgccggcagcccctttccctgccaccccaggagccaggcttcccctcagctgggtgaagactacagactccctggggttggcaggggctccatctcagtggaccaggaagcaagaggggaagcgggatcccagctagacttagaacttggacttttcccctgtgaagggggctgccaggacatctcagcactcccgcctggagctctcagcatcactgaaggtaccacagtgtaagtgctggactgcaggctgcagtgatccctctttcgtcccaccccctcttccctcagcagccccggaagcctgcctcacccgacgaggacagcgagcggcccggctcctttctgtctcttcccttcccaccctcttgtcttcagggaattcagaggattgctctccaaggccataatgaccccttgccttccccatgattctctacaaagctcttgcacacccttttcccattcaatttgtgagccaggcagggtagggattagtgtccccctttgacaaatgacagaactgagggttgcaatggggaaatgacttataaagtcacccagcaggtcaacaatgggcccacgaccaagaccctgggtgttcagaccccaaggccagggcctttcccgctgcatcaagatgccaatccctttgtgggcttcaccagtgcccaagtctctatggagaatgagaactggaagccactgctaccgtctacccagcaccagtagtgccgatgtgccacactgcccagttgaggcccctcacgctctgtgcccctagatccttcaggtccccaccctcagctgtcaccaccaccctccccaggggactccatctgagatgaggcctcgtcctcctggaagctgaggctgagaagggtggagcttggccctggggaaggcagaccagggtctgatggcttctagggatgctctgcgtgtgtctcagcaccgctatctcagccactttcagccttatgcacgtagaatgaccacagccactcgcatccgtatagcactttaaagtttctgcagtcctttgacacataggatctcatggagcctcacgtctactcccttctgcagatgaggaaaccgagagaagtggcccaaggtcacgcaactctgagatgccacatttcatttgatcttgtacacattttcttttattccttcttttttcctcctttcatttcccactacgcacaaagagtttataaacactgttctcagaagagtcacagtttggggtgagatctggaaatcaagaaatgggtgtccactcttttctttcattagctaggatctactagatgcattatactccatacctgcttttcccatggccgccctacggaaaatcccatccacagaggccagggctacccaagcccctccaggtgagctgggcctttcctttatgaacctccatcctcccagccagctacagtagggcctcctcaccccgtaccccacagctagacagtgtcagcactcatctcctcctcccacatttctggagcttttttttttccttccccattgacctttgtggtcttctgtgattatttatgctgcctcccaaggatagaattgaaataaaatgttttcaacttatcaaa

SEQ ID NO: 122469 - DNA, 3611 bp, Homo sapiens
  Payload ID: 3986
  Gene Symbol: CORO2B
  Gene Name: coronin, actin binding protein, 2B
  Uniprot ID: Q9UQ03
  ENST ID: ENST00000543950
  CDS Start-End: 355-1782
acagattctgttgacctttagtaatgagggaggcagggctagagggtgactagcagccaggcctcccaggctcccaggcctctcagatgcctggaatttcggagctagaaggtagtcagattcccgttatcttgactgctgcagcggggtctctgggatggtgatgtgagtgcctcctgcacccgtggcccccatgtggcataactccttgggcgctattcatccacacggcccatctgtgcagggtacagccttcatggtcttagctggcagccctgacaacttggatgtgcaaagaagatacaagtttgtttcctctgaagcttgtctggtgtcatccaggagccccacctgatgtcctggcgtccgcaataccgtagctccaagttccggaatgtctacgggaaggtggccaaccgggagcactgcttcgatgggatccccatcaccaagaatgtgcacgacaaccacttctgtgccgtcaacacccgcttcctggccatcgtcaccgagagcgcagggggcggctccttcctcgtcatccccctggagcagacaggcaggattgaacccaactaccccaaggtctgcggccaccagggcaatgtgctggatatcaaatggaaccccttcatcgacaacatcattgcctcgtgctcggaggacacgtcggtgcggatctgggagatccccgagggcgggctgaagcggaacatgacggaggcgctcctggagctgcacgggcacagccggcgtgtggggctggtcgagtggcaccccaccaccaacaacatcctgttcagcgctggctacgactacaaggtcctcatctggaacctggatgtgggtgagccggtgaagatgattgactgccacacggatgtgatcctctgcatgtccttcaacacggacggcagcctgctcaccaccacgtgcaaggacaagaagctgcgtgtgattgagccccgctctggccgtgttctgcaggaggccaactgcaaaaaccacagagtgaaccgggtggtgttcctggggaacatgaagcggctcctcacgacaggggtctccaggtggaacacaagacagattgccctctgggaccaggaggacctctccatgcccctgatcgaagaggaaattgatgggctctctggcctcctgttccccttctatgatgctgacacccacatgctctacctggctggaaagggtgatggaaacatccggtactacgagatcagcactgagaagccctacctgagttacctcatggagttccgctccccagccccgcagaaaggcctaggggtcatgcccaagcacgggctggatgtgtcagcctgcgaggtgttccgcttctacaagctggtgactctcaagggcctgatcgagcccatctccatgatcgtgccccggaggtcagattcctaccaggaagacatttacccaatgacaccaggcacggagccagcactgaccccggatgaatggctgggaggcatcaaccgagatcccgtgctgatgtctttgaaagaaggctataagaagtcctcaaaaatggtatttaaggctcccatcaaagaaaagaagagtgttgtggtcaacggaatagatttattagaaaatgtcccacccaggacagagaatgagctccttcgaatgttcttccggcagcaggatgagattcgacggttgaaagaggagctggcccagaaggacatccgcattcggcagctccagctggaactgaaaaacttgcgcaacagccccaagaactgttagctccccagctgggctgttttctaagccgatctctccgtcgtttctactcatcccttaacttctcccttaccagtgaccccagagacagagccaggacaggagtgggggccagcctgaggacccccgcctaccacctcgagaactggaagccaacctctaacctcctgacctcatgctaataaaagtccccagcttctggagaccccctgccggcagcccctttccctgccaccccaggagccaggcttcccctcagctgggtgaagactacagactccctggggttggcaggggctccatctcagtggaccaggaagcaagaggggaagcgggatcccagctagacttagaacttggacttttcccctgtgaagggggctgccaggacatctcagcactcccgcctggagctctcagcatcactgaaggtaccacagtgtaagtgctggactgcaggctgcagtgatccctctttcgtcccaccccctcttccctcagcagccccggaagcctgcctcacccgacgaggacagcgagcggcccggctcctttctgtctcttcccttcccaccctcttgtcttcagggaattcagaggattgctctccaaggccataatgaccccttgccttccccatgattctctacaaagctcttgcacacccttttcccattcaatttgtgagccaggcagggtagggattagtgtccccctttgacaaatgacagaactgagggttgcaatggggaaatgacttataaagtcacccagcaggtcaacaatgggcccacgaccaagaccctgggtgttcagaccccaaggccagggcctttcccgctgcatcaagatgccaatccctttgtgggcttcaccagtgcccaagtctctatggagaatgagaactggaagccactgctaccgtctacccagcaccagtagtgccgatgtgccacactgcccagttgaggcccctcacgctctgtgcccctagatccttcaggtccccaccctcagctgtcaccaccaccctccccaggggactccatctgagatgaggcctcgtcctcctggaagctgaggctgagaagggtggagcttggccctggggaaggcagaccagggtctgatggcttctagggatgctctgcgtgtgtctcagcaccgctatctcagccactttcagccttatgcacgtagaatgaccacagccactcgcatccgtatagcactttaaagtttctgcagtcctttgacacataggatctcatggagcctcacgtctactcccttctgcagatgaggaaaccgagagaagtggcccaaggtcacgcaactctgagatgccacatttcatttgatcttgtacacattttcttttattccttcttttttcctcctttcatttcccactacgcacaaagagtttataaacactgttctcagaagagtcacagtttggggtgagatctggaaatcaagaaatgggtgtccactcttttctttcattagctaggatctactagatgcattatactccatacctgcttttcccatggccgccctacggaaaatcccatccacagaggccagggctacccaagcccctccaggtgagctgggcctttcctttatgaacctccatcctcccagccagctacagtagggcctcctcaccccgtaccccacagctagacagtgtcagcactcatctcctcctcccacatttctggagcttttttttttccttccccattgacctttgtggtcttctgtgattatttatgctgcctcccaaggatagaattgaaataaaatgttttcaacttatc

SEQ ID NO: 122470 - DNA, 3332 bp, Homo sapiens
  Payload ID: 3986
  Gene Symbol: CORO2B
  Gene Name: coronin, actin binding protein, 2B
  Uniprot ID: Q9UQ03
  ENST ID: ENST00000540068
  CDS Start-End: 76-1503
attcaaaccgcctgctgggtgccgtgggccattgtgcaagtcttccaggccgcggtcgaatgattctgacaagcgatgtcctggcgtccgcaataccgtagctccaagttccggaatgtctacgggaaggtggccaaccgggagcactgcttcgatgggatccccatcaccaagaatgtgcacgacaaccacttctgtgccgtcaacacccgcttcctggccatcgtcaccgagagcgcagggggcggctccttcctcgtcatccccctggagcagacaggcaggattgaacccaactaccccaaggtctgcggccaccagggcaatgtgctggatatcaaatggaaccccttcatcgacaacatcattgcctcgtgctcggaggacacgtcggtgcggatctgggagatccccgagggcgggctgaagcggaacatgacggaggcgctcctggagctgcacgggcacagccggcgtgtggggctggtcgagtggcaccccaccaccaacaacatcctgttcagcgctggctacgactacaaggtcctcatctggaacctggatgtgggtgagccggtgaagatgattgactgccacacggatgtgatcctctgcatgtccttcaacacggacggcagcctgctcaccaccacgtgcaaggacaagaagctgcgtgtgattgagccccgctctggccgtgttctgcaggaggccaactgcaaaaaccacagagtgaaccgggtggtgttcctggggaacatgaagcggctcctcacgacaggggtctccaggtggaacacaagacagattgccctctgggaccaggaggacctctccatgcccctgatcgaagaggaaattgatgggctctctggcctcctgttccccttctatgatgctgacacccacatgctctacctggctggaaagggtgatggaaacatccggtactacgagatcagcactgagaagccctacctgagttacctcatggagttccgctccccagccccgcagaaaggcctaggggtcatgcccaagcacgggctggatgtgtcagcctgcgaggtgttccgcttctacaagctggtgactctcaagggcctgatcgagcccatctccatgatcgtgccccggaggtcagattcctaccaggaagacatttacccaatgacaccaggcacggagccagcactgaccccggatgaatggctgggaggcatcaaccgagatcccgtgctgatgtctttgaaagaaggctataagaagtcctcaaaaatggtatttaaggctcccatcaaagaaaagaagagtgttgtggtcaacggaatagatttattagaaaatgtcccacccaggacagagaatgagctccttcgaatgttcttccggcagcaggatgagattcgacggttgaaagaggagctggcccagaaggacatccgcattcggcagctccagctggaactgaaaaacttgcgcaacagccccaagaactgttagctccccagctgggctgttttctaagccgatctctccgtcgtttctactcatcccttaacttctcccttaccagtgaccccagagacagagccaggacaggagtgggggccagcctgaggacccccgcctaccacctcgagaactggaagccaacctctaacctcctgacctcatgctaataaaagtccccagcttctggagaccccctgccggcagcccctttccctgccaccccaggagccaggcttcccctcagctgggtgaagactacagactccctggggttggcaggggctccatctcagtggaccaggaagcaagaggggaagcgggatcccagctagacttagaacttggacttttcccctgtgaagggggctgccaggacatctcagcactcccgcctggagctctcagcatcactgaaggtaccacagtgtaagtgctggactgcaggctgcagtgatccctctttcgtcccaccccctcttccctcagcagccccggaagcctgcctcacccgacgaggacagcgagcggcccggctcctttctgtctcttcccttcccaccctcttgtcttcagggaattcagaggattgctctccaaggccataatgaccccttgccttccccatgattctctacaaagctcttgcacacccttttcccattcaatttgtgagccaggcagggtagggattagtgtccccctttgacaaatgacagaactgagggttgcaatggggaaatgacttataaagtcacccagcaggtcaacaatgggcccacgaccaagaccctgggtgttcagaccccaaggccagggcctttcccgctgcatcaagatgccaatccctttgtgggcttcaccagtgcccaagtctctatggagaatgagaactggaagccactgctaccgtctacccagcaccagtagtgccgatgtgccacactgcccagttgaggcccctcacgctctgtgcccctagatccttcaggtccccaccctcagctgtcaccaccaccctccccaggggactccatctgagatgaggcctcgtcctcctggaagctgaggctgagaagggtggagcttggccctggggaaggcagaccagggtctgatggcttctagggatgctctgcgtgtgtctcagcaccgctatctcagccactttcagccttatgcacgtagaatgaccacagccactcgcatccgtatagcactttaaagtttctgcagtcctttgacacataggatctcatggagcctcacgtctactcccttctgcagatgaggaaaccgagagaagtggcccaaggtcacgcaactctgagatgccacatttcatttgatcttgtacacattttcttttattccttcttttttcctcctttcatttcccactacgcacaaagagtttataaacactgttctcagaagagtcacagtttggggtgagatctggaaatcaagaaatgggtgtccactcttttctttcattagctaggatctactagatgcattatactccatacctgcttttcccatggccgccctacggaaaatcccatccacagaggccagggctacccaagcccctccaggtgagctgggcctttcctttatgaacctccatcctcccagccagctacagtagggcctcctcaccccgtaccccacagctagacagtgtcagcactcatctcctcctcccacatttctggagcttttttttttccttccccattgacctttgtggtcttctgtgattatttatgctgcctcccaaggatagaattgaaataaaatgttttcaacttatc

SEQ ID NO: 122471 - DNA, 3566 bp, Homo sapiens
  Payload ID: 3986
  Gene Symbol: CORO2B
  Gene Name: coronin, actin binding protein, 2B
  Uniprot ID: Q9UQ03
  ENST ID: ENST00000566799
  CDS Start-End: 295-1737
cgggccctctccctctctccctttcttcctgcctcgccttcctgcggcgaaggaggctcatctattataaatgcacattcggggctgacatcagcgacgagcggcgggcgagcgccgacgagcggtccctgcgcgctgcccgcccggagcgcagcccccaggctcggccgagccgccggcggggcgcggggagcgagccgggagctgccggacccccttccgccgccgccccgggccgccgccgccgcccccgcacgccgcgcccgcgcccccgctccgccgcggagtttctgcatgactgtcacaaagatgtcctggcgtccgcaataccgtagctccaagttccggaatgtctacgggaaggtggccaaccgggagcactgcttcgatgggatccccatcaccaagaatgtgcacgacaaccacttctgtgccgtcaacacccgcttcctggccatcgtcaccgagagcgcagggggcggctccttcctcgtcatccccctggagcagacaggcaggattgaacccaactaccccaaggtctgcggccaccagggcaatgtgctggatatcaaatggaaccccttcatcgacaacatcattgcctcgtgctcggaggacacgtcggtgcggatctgggagatccccgagggcgggctgaagcggaacatgacggaggcgctcctggagctgcacgggcacagccggcgtgtggggctggtcgagtggcaccccaccaccaacaacatcctgttcagcgctggctacgactacaaggtcctcatctggaacctggatgtgggtgagccggtgaagatgattgactgccacacggatgtgatcctctgcatgtccttcaacacggacggcagcctgctcaccaccacgtgcaaggacaagaagctgcgtgtgattgagccccgctctggccgtgttctgcaggaggccaactgcaaaaaccacagagtgaaccgggtggtgttcctggggaacatgaagcggctcctcacgacaggggtctccaggtggaacacaagacagattgccctctgggaccaggaggacctctccatgcccctgatcgaagaggaaattgatgggctctctggcctcctgttccccttctatgatgctgacacccacatgctctacctggctggaaagggtgatggaaacatccggtactacgagatcagcactgagaagccctacctgagttacctcatggagttccgctccccagccccgcagaaaggcctaggggtcatgcccaagcacgggctggatgtgtcagcctgcgaggtgttccgcttctacaagctggtgactctcaagggcctgatcgagcccatctccatgatcgtgccccggaggtcagattcctaccaggaagacatttacccaatgacaccaggcacggagccagcactgaccccggatgaatggctgggaggcatcaaccgagatcccgtgctgatgtctttgaaagaaggctataagaagtcctcaaaaatggtatttaaggctcccatcaaagaaaagaagagtgttgtggtcaacggaatagatttattagaaaatgtcccacccaggacagagaatgagctccttcgaatgttcttccggcagcaggatgagattcgacggttgaaagaggagctggcccagaaggacatccgcattcggcagctccagctggaactgaaaaacttgcgcaacagccccaagaactgttagctccccagctgggctgttttctaagccgatctctccgtcgtttctactcatcccttaacttctcccttaccagtgaccccagagacagagccaggacaggagtgggggccagcctgaggacccccgcctaccacctcgagaactggaagccaacctctaacctcctgacctcatgctaataaaagtccccagcttctggagaccccctgccggcagcccctttccctgccaccccaggagccaggcttcccctcagctgggtgaagactacagactccctggggttggcaggggctccatctcagtggaccaggaagcaagaggggaagcgggatcccagctagacttagaacttggacttttcccctgtgaagggggctgccaggacatctcagcactcccgcctggagctctcagcatcactgaaggtaccacagtgtaagtgctggactgcaggctgcagtgatccctctttcgtcccaccccctcttccctcagcagccccggaagcctgcctcacccgacgaggacagcgagcggcccggctcctttctgtctcttcccttcccaccctcttgtcttcagggaattcagaggattgctctccaaggccataatgaccccttgccttccccatgattctctacaaagctcttgcacacccttttcccattcaatttgtgagccaggcagggtagggattagtgtccccctttgacaaatgacagaactgagggttgcaatggggaaatgacttataaagtcacccagcaggtcaacaatgggcccacgaccaagaccctgggtgttcagaccccaaggccagggcctttcccgctgcatcaagatgccaatccctttgtgggcttcaccagtgcccaagtctctatggagaatgagaactggaagccactgctaccgtctacccagcaccagtagtgccgatgtgccacactgcccagttgaggcccctcacgctctgtgcccctagatccttcaggtccccaccctcagctgtcaccaccaccctccccaggggactccatctgagatgaggcctcgtcctcctggaagctgaggctgagaagggtggagcttggccctggggaaggcagaccagggtctgatggcttctagggatgctctgcgtgtgtctcagcaccgctatctcagccactttcagccttatgcacgtagaatgaccacagccactcgcatccgtatagcactttaaagtttctgcagtcctttgacacataggatctcatggagcctcacgtctactcccttctgcagatgaggaaaccgagagaagtggcccaaggtcacgcaactctgagatgccacatttcatttgatcttgtacacattttcttttattccttcttttttcctcctttcatttcccactacgcacaaagagtttataaacactgttctcagaagagtcacagtttggggtgagatctggaaatcaagaaatgggtgtccactcttttctttcattagctaggatctactagatgcattatactccatacctgcttttcccatggccgccctacggaaaatcccatccacagaggccagggctacccaagcccctccaggtgagctgggcctttcctttatgaacctccatcctcccagccagctacagtagggcctcctcaccccgtaccccacagctagacagtgtcagcactcatctcctcctcccacatttctggagcttttttttttccttccccattgacctttgtggtcttctgtgattatttatgctgcctcccaaggatagaattgaaataaaatgttttcaacttatc

SEQ ID NO: 122472 - DNA, 3272 bp, Homo sapiens
  Payload ID: 3987
  Gene Symbol: CTTN
  Gene Name: cortactin
  Uniprot ID: Q14247
  ENST ID: ENST00000301843
  CDS Start-End: 207-1859
gatgcggccccgcccccgccctcggaaccggaagtagagcctggtgcctgggagcggctggcgcggcggaatccagggccgacccgggccggaccgaccccaggcggcgacggaatcagtccccaatgcctggaaattcctcattggattactgtgttttaaacagaatttcgtgaacagccttttatctccaagcggaaagaaagatgtggaaagcttcagcaggccacgctgtgtccatcgcccaggatgacgcgggggccgatgactgggagaccgaccctgattttgtgaatgatgtgagtgagaaggagcaaagatggggtgccaagacggtgcagggctccgggcaccaggagcatatcaacatacacaagctgagggagaatgtctttcaagagcatcagacccttaaggagaaggaacttgaaacaggaccaaaagcttcccatggctatggagggaaatttggtgtggaacaagaccgaatggataagtcagctgtcggccacgaatatcagtcgaaactttccaagcactgctcgcaggtggactcggtccgtggcttcggaggcaagtttggtgtccagatggacagagttgatcagtctgctgtaggctttgaataccaggggaagactgagaagcatgcctcccagaaagactactccagtggttttggcggcaagtatggcgtgcaggccgaccgagtagacaagagcgcggtgggcttcgactaccagggcaagacggagaagcacgagtcacagagagattactccaaaggtttcggcggcaaatacggtatcgacaaggacaaagtggataagagcgccgttggctttgagtatcaaggcaaaacggagaagcacgagtcccagaaagactatgtgaaagggtttggaggaaaatttggtgtgcagacagacagacaagacaaatgtgcccttggctgggatcaccaggagaaattgcagctgcatgaatcccaaaaagattataagactggttttggaggcaaattcggtgttcagtcggagaggcaggactccgctgctgtggggtttgattacaaggagaagctggccaagcacgagtcccagcaagactactccaaaggattcggcgggaagtatggggtgcagaaggatcggatggataagaatgcgtcaacctttgaggatgtcacccaggtgtcctctgcctaccagaagacagtacctgtcgaagctgtgaccagcaaaacaagtaacatcagagctaactttgaaaacctcgctaaggagaaagagcaggaggacaggcggaaggcggaggcggagagagcccagcggatggccaaggagcggcaggagcaggaagaggccaggaggaagctggaggagcaagccagagccaaaacgcaaacgccccctgtgtcgcccgcacctcagccaaccgaggagaggctgccctcgagccccgtctatgaggatgcggcttccttcaaggcagagctgagctacagaggccctgtgagtgggacggagccggagcccgtgtacagcatggaggccgctgactaccgagaggccagcagccagcagggcctggcctatgccacagaggctgtctatgaaagcgcagaggccccgggccactatcccgcagaggacagcacctacgatgagtacgagaacgatctggggatcacagccgtcgccctgtacgactaccaggctgcgggcgatgatgagatctcatttgaccctgatgacatcatcaccaacatcgagatgattgacgacggctggtggcgcggggtgtgcaagggccggtacgggctcttcccagccaactatgtggagctgcggcagtagggcccccagcccccccccggagctgcgccctggatcctcacactacagatcaggccttctttggttcttgggtggttttgggttttttctgtttttttttttttttttttttttttgaaggtggggaggggaatatacacattgcttttatatttaatacttttgctgatgcttttgaaaatgtttatgccacagaatttgctaatatattgtaatcacattccttaggaggactttggtaattggttttatgcattgatggttttttttttcttttttgccaaattgactgtcacgcggcagcttcagggagctcgcattctcttgtgttcgtgttgccctcgtgcccatcaagtgcagtcgggacctcccaggacaagcacgaggcctcaggtcggccctgtggcgggtaggcaggaaggactgtcccagacgaggggcttcctctagagtctcactgctggggaggagaggactgggcctgatggaagttaacccggagctaagtcacccagagcacaggagctgccatgtcagatgggaaatctgcctatgtcataccgtgacagcccgcaggatcaggtgacttctagcagagaccctggtttttttcctgtgcccactccggcttgtcctcatctctacccatcccctgatgcccaggtcaccgggagggctgctgggagcctctcctgtccccgccgggcagtgtcactgagtccttgaaatcctcccctgccccgcgggtctctggattgggacgcacagtgcagttgaggtctgcgtcgggcttggcttttcacaaaggctgatgtcttaactgtcacccatatggtccctgggccaccgggcagcctggggcggtgtgtgtgccatgtcacagcatggcctctcggccttgggaaggaaggcagtgcctgctctgctgtgagccgccaggaaccctcctcctgtcaatgggggtgtagtatttttgccaaaatatcatgttcaatttcagtagtttgatcagttgaaggctagaagtgtgaagtgcagatgagtgtgtgttcttccccaaggtccccccacagctccaggacaccgctgtcctggcatttgtggccactcactttgtaggaaactcatctccttcctgaggagccgggaggctggaccagtcccgtcgtgcagtcaggtgggcggtgtgtctttccagaaggtcacgtggaaatgtctcgggacttgggtcccggagtgcccgtgaagcgtgtttttgctcctgaggtgcattttctcatcatccttgctttaccacaatgagcaatgaggtcgggttttatatgcaacttattgtatctgaattcctgtagcacacctcataggtatgatttttttaaattaaagaattcagaataaacattttttgatcca

SEQ ID NO: 122473 - DNA, 3272 bp, Homo sapiens
  Payload ID: 3987
  Gene Symbol: CTTN
  Gene Name: cortactin
  Uniprot ID: Q14247
  ENST ID: ENST00000346329
  CDS Start-End: 309-1850
ggccgggctagcgcttagccagctgcgggcggacccccgggactcttgcgggccaagacgcgggaggaggcggggcagggggcggggtcgcgcggggacccggatgcggccccgcccccgccctcggaaccggaagtagagcctggtgcctgggagcggctggcgcggcggaatccagggccgacccgggccggaccgaccccaggcggcgacggaatcagtccccaatgcctggaaattcctcattggattactgtgttttaaacagaatttcgtgaacagccttttatctccaagcggaaagaaagatgtggaaagcttcagcaggccacgctgtgtccatcgcccaggatgacgcgggggccgatgactgggagaccgaccctgattttgtgaatgatgtgagtgagaaggagcaaagatggggtgccaagacggtgcagggctccgggcaccaggagcatatcaacatacacaagctgagggagaatgtctttcaagagcatcagacccttaaggagaaggaacttgaaacaggaccaaaagcttcccatggctatggagggaaatttggtgtggaacaagaccgaatggataagtcagctgtcggccacgaatatcagtcgaaactttccaagcactgctcgcaggtggactcggtccgtggcttcggaggcaagtttggtgtccagatggacagagttgatcagtctgctgtaggctttgaataccaggggaagactgagaagcatgcctcccagaaagactactccagtggttttggcggcaagtatggcgtgcaggccgaccgagtagacaagagcgcggtgggcttcgactaccagggcaagacggagaagcacgagtcacagagagattactccaaaggtttcggcggcaaatacggtatcgacaaggacaaagtggataagagcgccgttggctttgagtatcaaggcaaaacggagaagcacgagtcccagaaagactatgtgaaagggtttggaggaaaatttggtgtgcagacagacagacaagacaaatgtgcccttggctgggatcaccaggagaaattgcagctgcatgaatcccaaaaagactactccaaaggattcggcgggaagtatggggtgcagaaggatcggatggataagaatgcgtcaacctttgaggatgtcacccaggtgtcctctgcctaccagaagacagtacctgtcgaagctgtgaccagcaaaacaagtaacatcagagctaactttgaaaacctcgctaaggagaaagagcaggaggacaggcggaaggcggaggcggagagagcccagcggatggccaaggagcggcaggagcaggaagaggccaggaggaagctggaggagcaagccagagccaaaacgcaaacgccccctgtgtcgcccgcacctcagccaaccgaggagaggctgccctcgagccccgtctatgaggatgcggcttccttcaaggcagagctgagctacagaggccctgtgagtgggacggagccggagcccgtgtacagcatggaggccgctgactaccgagaggccagcagccagcagggcctggcctatgccacagaggctgtctatgaaagcgcagaggccccgggccactatcccgcagaggacagcacctacgatgagtacgagaacgatctggggatcacagccgtcgccctgtacgactaccaggctgcgggcgatgatgagatctcatttgaccctgatgacatcatcaccaacatcgagatgattgacgacggctggtggcgcggggtgtgcaagggccggtacgggctcttcccagccaactatgtggagctgcggcagtagggcccccagcccccccccggagctgcgccctggatcctcacactacagatcaggccttctttggttcttgggtggttttgggttttttctgtttttttttttttttttttttttttgaaggtggggaggggaatatacacattgcttttatatttaatacttttgctgatgcttttgaaaatgtttatgccacagaatttgctaatatattgtaatcacattccttaggaggactttggtaattggttttatgcattgatggttttttttttcttttttgccaaattgactgtcacgcggcagcttcagggagctcgcattctcttgtgttcgtgttgccctcgtgcccatcaagtgcagtcgggacctcccaggacaagcacgaggcctcaggtcggccctgtggcgggtaggcaggaaggactgtcccagacgaggggcttcctctagagtctcactgctggggaggagaggactgggcctgatggaagttaacccggagctaagtcacccagagcacaggagctgccatgtcagatgggaaatctgcctatgtcataccgtgacagcccgcaggatcaggtgacttctagcagagaccctggtttttttcctgtgcccactccggcttgtcctcatctctacccatcccctgatgcccaggtcaccgggagggctgctgggagcctctcctgtccccgccgggcagtgtcactgagtccttgaaatcctcccctgccccgcgggtctctggattgggacgcacagtgcagttgaggtctgcgtcgggcttggcttttcacaaaggctgatgtcttaactgtcacccatatggtccctgggccaccgggcagcctggggcggtgtgtgtgccatgtcacagcatggcctctcggccttgggaaggaaggcagtgcctgctctgctgtgagccgccaggaaccctcctcctgtcaatgggggtgtagtatttttgccaaaatatcatgttcaatttcagtagtttgatcagttgaaggctagaagtgtgaagtgcagatgagtgtgtgttcttccccaaggtccccccacagctccaggacaccgctgtcctggcatttgtggccactcactttgtaggaaactcatctccttcctgaggagccgggaggctggaccagtcccgtcgtgcagtcaggtgggcggtgtgtctttccagaaggtcacgtggaaatgtctcgggacttgggtcccggagtgcccgtgaagcgtgtttttgctcctgaggtgcattttctcatcatccttgctttaccacaatgagcaatgaggtcgggttttatatgcaacttattgtatctgaattcctgtagcacacctcataggtatgatttttttaaattaaagaattcagaataaacattttttgatccacttgcgtga

SEQ ID NO: 122474 - DNA, 2247 bp, Homo sapiens
  Payload ID: 3987
  Gene Symbol: CTTN
  Gene Name: cortactin
  Uniprot ID: Q14247
  ENST ID: ENST00000376561
  CDS Start-End: 172-2076
agagcctggtgcctgggagcggctggcgcggcggaatccagggccgacccgggccggaccgaccccaggcggcgacggaatcagtccccaatgcctggaaattcctcattggattactgtgttttaaacagaatttcgtgaacagccttttatctccaagcggaaagaaagatgtggaaagcttcagcaggccacgctgtgtccatcgcccaggatgacgcgggggccgatgactgggagaccgaccctgattttgtgaatgatgtgagtgagaaggagcaaagatggggtgccaagacggtgcagggctccgggcaccaggagcatatcaacatacacaagctgagggagaatgtctttcaagagcatcagacccttaaggagaaggaacttgaaacaggaccaaaagcttcccatggctatggagggaaatttggtgtggaacaagaccgaatggataagtcagctgtcggccacgaatatcagtcgaaactttccaagcactgctcgcaggtggactcggtccgtggcttcggaggcaagtttggtgtccagatggacagagttgatcagtctgctgtaggctttgaataccaggggaagactgagaagcatgcctcccagaaagactactccagtggttttggcggcaagtatggcgtgcaggccgaccgagtagacaagagcgcggtgggcttcgactaccagggcaagacggagaagcacgagtcacagagagattactccaaaggtttcggcggcaaatacggtatcgacaaggacaaagtggataagagcgccgttggctttgagtatcaaggcaaaacggagaagcacgagtcccagaaagactatgtgaaagggtttggaggaaaatttggtgtgcagacagacagacaagacaaatgtgcccttggctgggatcaccaggagaaattgcagctgcatgaatcccaaaaagactactccaaaggattcggcgggaagtatggggtgcagaaggatcggatggataagaatgcgtcaacctttgaggatgtcacccaggtgtcctctgcctaccagaagacagtacctgtcgaagctgtgaccagcaaaacaagtaacatcagagctaactttgaaaacctcgctaaggagaaagagcaggaggacaggcggaaggcggaggcggagagagcccagcggatggccaaggagcggcaggagcaggaagaggccaggaggaagctggaggagcaagccagagccaaaacgcaaacgccccctgtgtcgcccgcacctcagccaaccgaggagaggctgccctcgagccccgtctatgaggatgcggcttccttcaaggcagagctgagctacagaggccctgtgagtgggacggagccggagcccgtgtacagcatggaggccgctgactaccgagaggccagcagccagcagggcctggcctatgccacagaggctgtctatgaaagcgcagaggccccgggccactatcccgcagaggacagcacctacgatgagtacgagaacgatctggggatcacagccgtcgccctgtacgactaccaggctgcgggcgatgatgagatctcatttgaccctgatgacatcatcaccaacatcgagatgattgacgacggctggtggcgcggggtgtgcaagggccgcttcagggagctcgcattctcttgtgttcgtgttgccctcgtgcccatcaagtgcagtcgggacctcccaggacaagcacgaggcctcaggtcggccctgtggcgggtaggcaggaaggactgtcccagacgaggggcttcctctagagtctcactgctggggaggagaggactgggcctgatggaagttaacccggagctaagtcacccagagcacaggagctgccatgtcagatgggaaatctgcctatgtcataccgtgacagcccgcaggatcaggaaactcatctccttcctgaggagccgggaggctggaccagtcccgtcgtgcagtcaggtgggcggtgtgtctttccagaaggtcacgtggaaatgtctcgggacttgggtcccggagtgcccgtgaagcgtgtttttgctcctgaggtgcattttctcatcatccttgctttaccacaatgagcaatgaggtcgggttttatatgcaacttattgtatctgaattcctgtagcacacctcataggtatgatttttttaaattaaagaattcagaataaacattttttgatccacttg

SEQ ID NO: 122475 - DNA, 952 bp, Homo sapiens
  Payload ID: 3987
  Gene Symbol: CTTN
  Gene Name: cortactin
  ENST ID: ENST00000529736
  CDS Start-End: 1-798
accagcaaaacaagtaacatcagagctaactttgaaaacctcgctaaggagaaagagcaggaggacaggcggaaggcggaggcggagagagcccagcggatggccaaggagcggcaggagcaggaagaggccaggaggaagctggaggagcaagccagagccaaaacgcaaacgccccctgtgtcgcccgcacctcagccaaccgaggagaggctgccctcgagccccgtctatgaggatgcggcttccttcaaggcagagctgagctacagaggccctgtgagtgggacggagccggagcccgtgtacagcatggaggccgctgactaccgagaggccagcagccagcagggcctggcctatgccacagaggctgtctatgaaagcgcagaggccccgggccactatcccgcagaggacagcacctacgatgagtacgagaacgatctggggatcacagccgtcgccctgtacgactaccaggctgcgggcgatgatgagatctcatttgaccctgatgacatcatcaccaacatcgagatgattgacgacggctggtggcgcggggtgtgcaagggccgcttcagggagctcgcattctcttgtgttcgtgttgccctcgtgcccatcaagtgcagtcgggacctcccaggacaagcacgaggcctcaggaaactcatctccttcctgaggagccgggaggctggaccagtcccgtcgtgcagtcaggtgggcggtgtgtctttccagaaggtcacgtggaaatgtctcgggacttgggtcccggagtgcccgtgaagcgtgtttttgctcctgaggtgcattttctcatcatccttgctttaccacaatgagcaatgaggtcgggttttatatgcaacttattgtatctgaattcctgtagcacacctcataggtatgatttttttaaattaaagaattcagaataaac

SEQ ID NO: 122476 - DNA, 567 bp, Homo sapiens
  Payload ID: 3987
  Gene Symbol: CTTN
  Gene Name: cortactin
  ENST ID: ENST00000533931
  CDS Start-End: 1-387
cggaaggcggaggcggagagagcccagcggatggccaaggagcggcaggagcaggaagaggccaggaggaagctggaggagcaagccagagccaaaacgcaaacgccccctgtgtcgcccgcacctcagccaaccgaggagaggctgccctcgagccccgtctatgaggatgcggcttccttcaaggcagagctgagctacagaggccctgtgagtgggacggagccggagcccgtgtacagcatggaggccgctgactaccgagaggccagcagccagcagggcctggcctatgccacagaggctgtctatgaaagcgcagaggccccgggccactatcccgcagctctgtcatggctttcttttagaggacagcacctacgatgagtacgagaacgatctggggatcacagccgtcgccctgtacgactaccaggctgcgggcgatgatgagatctcatttgaccctgatgacatcatcaccaacatcgagatgattgacgacggctggtggcgcggggtgtgcaagggccggtacgggctcttcccagccaactatgtggagct

SEQ ID NO: 122477 - DNA, 5970 bp, Homo sapiens
  Payload ID: 3988
  Gene Symbol: CTTNBP2
  Gene Name: cortactin binding protein 2
  Uniprot ID: Q8WZ74
  ENST ID: ENST00000160373
  CDS Start-End: 93-5084
ggacagcagcgggttaagtgccgcccgcgcggagacggctgagtccggagccgcggctccgagctcgcattcggatccgctagagcaggaagatggcgacggacggcgcgagctgcgagcccgacttgtcccgggccccggaggacgcggcgggggccgcggcggaggcggcgaaaaaagagtttgatgtggatactctcagtaaatccgagctgcggatgctcctcagcgtgatggaaggggagctggaggccagagaccttgtcatcgaggccctgcgggctcgcaggaaggaggtatttatccaggaacggtatgggagatttaatctaaatgacccgttcctggcactccagagagactatgaagcaggtgctggtgacaaagagaagaagccagtttgtaccaaccccctctccatccttgaagcagtcatggcccactgcaagaaaatgcaagaaaggatgtccgcacagctggctgctgctgagagcagacaaaagaagctggaaatggagaagcttcagctacaagcccttgagcaagagcacaagaagctggctgcccgccttgaggaagagcgtggcaagaacaagcaggtggtcctgatgctggtcaaagagtgcaagcagctctcaggcaaagtcatagaggaggcccagaagctcgaagacgtaatggccaaactggaagaggaaaagaaaaagacgaatgaattagaagaggaactctccgctgagaaacgaagaagcacagaaatggaagctcagatggaaaaacaactctctgagtttgacactgagcgggaacagcttcgtgccaagctgaaccgggaagaagcacacaccactgacctcaaagaggagatagacaagatgaggaaaatgattgagcaactgaaaaggggaagtgacagcaaaccaagcctctctcttccacggaagacaaaagataggcgtttggtttccatatctgtgggaacagaaggaactgtgacaaggtctgttgcatgccagacagacctagtgacagaaaatgctgaccacatgaaaaagttgcctttaaccatgcctgtaaaaccttccacagggagtcccctagtttctgcaaatgcaaaagggagcgtgtgcaccagtgccaccatggccagaccaggtattgacaggcaggcttcctatggtgacttgattggcgcttctgtacccgctttcccacctccaagtgcaaacaaaattgaggaaaatggaccaagcactggctcaacaccagatccaaccagtagcacacccccacttcccagtaacgctgcccctcccaccgctcaaacaccaggcatagctcctcagaactcgcaagctccacctatgcacagtttacattcaccatgtgccaacacctctttgcatccaggtctaaacccacgaatccaagcagctagatttagatttcagggcaatgctaacgacccagaccaaaatggaaatactacccaaagtcctccgtcaagagatgtctcgcctacaagtcgtgacaacctagtggccaaacaactagctcggaatactgtgacccaagcactgtcaagatttacaagccctcaagcaggtgctccctcaaggcctggagtgcccccaacaggggatgttggcacccaccctccagttggtcggaccagtttaaagactcatggtgtagcacgagttgacagaggaaatcctcctcctatccctccaaaaaagccagggctctcccaaactccttctccaccacacccccaactcaaggttattatagacagcagcagggcctcgaacacaggggccaaagttgataacaaaactgtggcttcgactccttccagtttgccacaagggaacagggtgatcaatgaggagaaccttcctaagtcatcctcccctcagctgccaccaaaaccatccatagatttaactgtggcacctgcaggctgtgccgtttcagccctggccacgtctcaggtgggtgcctggcctgctgcaacccccggactgaaccaacctgcatgttcagacagttcccttgtcattcctaccaccattgccttttgctcttccataaaccccgttagtgcctcatcctgtagaccaggtgcctcagacagcctcctggtaacagcatcaggctggtcaccctccctaacccctttgctaatgagtggtggtcctgcccccctggctggcaggcccacccttcttcagcaagctgctgcccagggaaatgtcactttattatcaatgctgcttaatgaagaaggactggacattaattactcctgtgaagatggccattctgccttgtattctgctgctaagaatggacatacagactgtgtgagattgctgctgagtgcagaagcccaagtcaatgctgctgataaaaatggcttcacacccttgtgtgctgcagctgctcagggacatttcgagtgtgtagaattattaatttcatatgatgctaacattaatcatgctgctgatggaggacagacacctctatacctggcctgtaaaaatggaaataaagaatgtattaaactcttgttggaagctggaaccaatcgaagtgtaaaaaccacagatggctggacaccagttcacgcagctgtggacactggtaatgtggacagcctcaagcttcttatgtaccatagaataccagctcatggaaattctttcaatgaggaggagtccgagtcaagtgtctttgacttggatggaggagaagagagtcctgaaggcatatccaagcctgttgttcctgcagacctcattaaccacgccaacagagaaggctggactgctgcccacattgctgcttccaaaggttttaagaactgcctagaaatcttgtgtaggcacggagggcttgagccagaaaggagagacaagtgcaatcggactgtgcatgatgttgccactgatgactgcaagcatttgctggagaatctgaatgctcttaaaatacccttaaggatttcagtgggtgagattgaaccaagcaactatggttctgatgacttggaatgtgaaaacacaatatgtgctttaaatatccgcaaacagacatcatgggatgatttttcaaaagcagtgagtcaagctctgacaaatcatttccaggcaatctcttctgatggatggtggagtctggaagacgtgacttgcaataacaccactgattccaacatcggcctcagtgcaagaagcatacgatccatcacgctaggaaatgtgccgtggtcagtgggtcagagcttcgcgcagtccccgtgggactttatgaggaagaataaggcagagcacatcactgtgcttttgtcaggtcctcaagaaggctgtctcagtagtgtgacttatgcctccatgatccctctccagatgatgcagaactacctcaggctggttgagcaatatcataatgtcattttccacggcccagaaggaagcttgcaagactacatagtacatcagcttgcactctgcctgaagcacagacaaatggctgcaggattctcctgtgaaatagtgagagctgaagtagatgctggtttttccaaggaacagctactagacctgttcattagtagcgcttgtctgatcccagtgaaacaatctcccagtaagaagaaaatcatcatcattttagaaaatttagaaaaatcttcactgtcggagttattgagggactttttggcacctcttgaaaatcgcagcactgaaagcccctgcactttccaaaaaggaaatggactgtccgaatgttattactttcatgagaactgctttctgatgggaaccatcgccaaggcctgtctccagggctccgacttgctggtgcagcagcatttccgctgggtgcagctgcggtgggatggcgagcccatgcaaggactgctgcagaggttcttacgaaggaaagttgtgaataagttcaaaggtcaggcgccctccccctgcgatcctgtgtgcaagattgtcgactgggctctgtccgtctggcgtcagcttaactcctgcctggcccgcttgggcacacctgaagcacttcttggaccaaaatatttcctgtcttgtcctgtagttcctgggcatgcccaagtgacagtgaagtggatgtctaagctgtggaatggcgtcatcgcacccagagttcaagaagcaatattgtcaagagcctctgtgaaaagacaacctggctttgggcagacaactgctaaaagacaccctagccaaggacagcaggctgtggtcaaagctgctctcagcatcttgctaaataaagctgtactgcatggctgtcccctccccagagcagagctagaccagcatacagctgatttcaaaggaggaagtttccctttatccatagtttccagttataacacttgtaacaagaagaaaggagagagtggtgcctggagaaaggtgaacaccagtcctcgcaggaagtctggccgcttctctttacccacctggaataagccagacctaagcactgaaggtatgaaaaataagactatatcacagctgaattgtaacaggaatgcttctctgtcaaaacaaaagtctttagagaatgatctatcactgacgttgaatttggatcagagactctctctgggttcagatgacgaagcagatcttgtcaaggaacttcagagcatgtgctccagcaagtctgagtctgatatcagcaagattgctgattccagggatgatttaaggatgtttgatagttctggaaacaaccctgtactttcagcaactattaataatctgagaatgccagtgtcacaaaaggaggtcagtcctctcagcagccatcaaactactgaatgcagcaacagtaaatcaaagactgagttgggtgtttcaagagttaaatcttttcttcctgttcctagaagtaaagtcacccagtgttcccagaacaccaaaagaagcagcagcagcagtaatacaaggcaaatagaaatcaacaacaactcaaaagaagtgaattggaacttacacaaaaatgaacacctagaaaaacctaacaaataggcctgcctacaatattctcattattaacttcctctatttcacacagaaaccaaggacaacaagatacaaatacctttaaattgataaaatgttttcactgtaatataaattatgagtgcgggaccactattcaatttttttttgtaaagaatgtatttataaccaacattttgttgcttttttttttaattctgtaggattgaacttcaataccaggaagttatgccaacttttcaagtagttttataatagaaaaattgtaatagttttaatcaagatgttcaggggtattaaaacagaactgtgtactgtatatctgtatatatgtatatatgtatgtatatttaaggaagtccagaaatcatactgcatacatgctacaaaaaagtagcaaaaaagtacaaagttggcttagataacttgtaccgttttaaatggagatcataattttatgttcacttgatggggaatgactagaatggggcaataacaaatcatttctaaacagttattttccattaaaagccatattaagtattttgcttgttaaattctagttttatgttttaaatctcttagtggttacattgccatttggtagcatcatgtatatatttatgcttataagtttgcattatgactcctgtaaaatatgaaattataatgcaataaaagtgttatctttcttacaaaagttttgtacctaagtggatatagataactgcataaatgaataaattcagaattaactccttcaatatttctagtagcacaactgataatattgatattttctacaaatgttacttctaaaattacagacaaaattacttacacaattcagttaagatgctttgacactgaataaaatattgatttcatgaaa

SEQ ID NO: 122478 - DNA, 760 bp, Homo sapiens
  Payload ID: 3988
  Gene Symbol: CTTNBP2
  Gene Name: cortactin binding protein 2
  ENST ID: ENST00000445366
  CDS Start-End: 1-142
gtccgtctggcgtcagcttaactcctgcctggcccgcttgggcacacctgaagcacttcttggaccaaaatatttcctgtcttgtcctgtagttcctgggcatgcccaagtgacagtgaaagctagaccagcatacagctgatttcaaaggaggaagtttccctttatccatagtttccagttataacacttgtaacaagaagaaaggagagagtggtgcctggagaaaggtgaacaccagtcctcgcaggaagtctggccgcttctctttacccacctggaataagccagacctaagcactgaaggtatgaaaaataagactatatcacagctgaattgtaacaggaatgcttctctgtcaaaacaaaagtctttagagaatgatctatcactgacgttgaatttggatcagagactctctctgggttcagatgacgaagcagatcttgtcaaggaacttcagagcatgtgctccagcaagtctgagtctgatatcagcaagattgctgattccagggatgatttaaggatgtttgatagttctggaaacaaccctgtactttcagcaactattaataatctgagaatgccagtgtcacaaaaggaggtcagtcctctcagcagccatcaaactactgaatgcagcaacagtaaatcaaagactgagttgggtgtttcaagagttaaatcttttcttcctgttcctagaagtaaagtcacccagtgttcccagaacaccaaaagaagcagcagcagcag

SEQ ID NO: 122479 - DNA, 4250 bp, Homo sapiens
  Payload ID: 3988
  Gene Symbol: CTTNBP2
  Gene Name: cortactin binding protein 2
  ENST ID: ENST00000446636
  CDS Start-End: 1-3454
agatgtctcgcctacaagtcgtgacaacctagtggccaaacaactagctcggaatactgtgacccaagcactgtcaagatttacaagccctcaagcaggtgctccctcaaggcctggagtgcccccaacaggggatgttggcacccaccctccagttggtcggaccagtttaaagactcatggtgtagcacgagttgacagaggaaatcctcctcctatccctccaaaaaagccagggctctcccaaactccttctccaccacacccccaactcaaggttattatagacagcagcagggcctcgaacacaggggccaaagttgataacaaaactgtggcttcgactccttccagtttgccacaagggaacagggtgatcaatgaggagaaccttcctaagtcatcctcccctcagctgccaccaaaaccatccatagatttaactgtggcacctgcaggctgtgccgtttcagccctggccacgtctcagaaaatacaaaaggtaaaatgtaccagagaggagccttcttgctggtcaccctccctaacccctttgctaatgagtggtggtcctgcccccctggctggcaggcccacccttcttcagcaagctgctgcccagggaaatgtcactttattatcaatgctgcttaatgaagaaggactggacattaattactcctgtgaagatggccattctgccttgtattctgctgctaagaatggacatacagactgtgtgagattgctgctgagtgcagaagcccaagtcaatgctgctgataaaaatggcttcacacccttgtgtgctgcagctgctcagggacatttcgagtgtgtagaattattaatttcatatgatgctaacattaatcatgctgctgatggaggacagacacctctatacctggcctgtaaaaatggaaataaagaatgtattaaactcttgttggaagctggaaccaatcgaagtgtaaaaaccacagatggctggacaccagttcacgcagctgtggacactggtaatgtggacagcctcaagcttcttatgtaccatagaataccagctcatggaaattctttcaatgaggaggagtccgagtcaagtgtctttgacttggatggaggagaagagagtcctgaaggcatatccaagcctgttgttcctgcagacctcattaaccacgccaacagagaaggctggactgctgcccacattgctgcttccaaaggttttaagaactgcctagaaatcttgtgtaggcacggagggcttgagccagaaaggagagacaagtgcaatcggactgtgcatgatgttgccactgatgactgcaagcatttgctggagaatctgaatgctcttaaaatacccttaaggatttcagtgggtgagattgaaccaagcaactatggttctgatgacttggaatgtgaaaacacaatatgtgctttaaatatccgcaaacagacatcatgggatgatttttcaaaagcagtgagtcaagctctgacaaatcatttccaggcaatctcttctgatggatggtggagtctggaagacgtgacttgcaataacaccactgattccaacatcggcctcagtgcaagaagcatacgatccatcacgctaggaaatgtgccgtggtcagtgggtcagagcttcgcgcagtccccgtgggactttatgaggaagaataaggcagagcacatcactgtgcttttgtcaggtcctcaagaaggctgtctcagtagtgtgacttatgcctccatgatccctctccagatgatgcagaactacctcaggctggttgagcaatatcataatgtcattttccacggcccagaaggaagcttgcaagactacatagtacatcagcttgcactctgcctgaagcacagacaaatggctgcaggattctcctgtgaaatagtgagagctgaagtagatgctggtttttccaaggaacagctactagacctgttcattagtagcgcttgtctgatcccagtgaaacaatctcccagtaagaagaaaatcatcatcattttagaaaatttagaaaaatcttcactgtcggagttattgagggactttttggcacctcttgaaaatcgcagcactgaaagcccctgcactttccaaaaaggaaatggactgtccgaatgttattactttcatgagaactgctttctgatgggaaccatcgccaaggcctgtctccagggctccgacttgctggtgcagcagcatttccgctgggtgcagctgcggtgggatggcgagcccatgcaaggactgctgcagaggttcttacgaaggaaagttgtgaataagttcaaaggtcaggcgccctccccctgcgatcctgtgtgcaagattgtcgactgggctctgtccgtctggcgtcagcttaactcctgcctggcccgcttgggcacacctgaagcacttcttggaccaaaatatttcctgtcttgtcctgtagttcctgggcatgcccaagtgacagtgaagtggatgtctaagctgtggaatggcgtcatcgcacccagagttcaagaagcaatattgtcaagagcctctgtgaaaagacaacctggctttgggcagacaactgctaaaagacaccctagccaaggacagcaggctgtggtcaaagctgctctcagcatcttgctaaataaagctgtactgcatggctgtcccctccccagagcagagctagaccagcatacagctgatttcaaaggaggaagtttccctttatccatagtttccagttataacacttgtaacaagaagaaaggagagagtggtgcctggagaaaggtgaacaccagtcctcgcaggaagtctggccgcttctctttacccacctggaataagccagacctaagcactgaaggtatgaaaaataagactatatcacagctgaattgtaacaggaatgcttctctgtcaaaacaaaagtctttagagaatgatctatcactgacgttgaatttggatcagagactctctctgggttcagatgacgaagcagatcttgtcaaggaacttcagagcatgtgctccagcaagtctgagtctgatatcagcaagattgctgattccagggatgatttaaggatgtttgatagttctggaaacaaccctgtactttcagcaactattaataatctgagaatgccagtgtcacaaaaggaggtcagtcctctcagcagccatcaaactactgaatgcagcaacagtaaatcaaagactgagttgggtgtttcaagagttaaatcttttcttcctgttcctagaagtaaagtcacccagtgttcccagaacaccaaaagaagcagcagcagcagtaatacaaggcaaatagaaatcaacaacaactcaaaagaagtgaattggaacttacacaaaaatgaacacctagaaaaacctaacaaataggcctgcctacaatattctcattattaacttcctctatttcacacagaaaccaaggacaacaagatacaaatacctttaaattgataaaatgttttcactgtaatataaattatgagtgcgggaccactattcaatttttttttgtaaagaatgtatttataaccaacattttgttgcttttttttttaattctgtaggattgaacttcaataccaggaagttatgccaacttttcaagtagttttataatagaaaaattgtaatagttttaatcaagatgttcaggggtattaaaacagaactgtgtactgtatatctgtatatatgtatatatgtatgtatatttaaggaagtccagaaatcatactgcatacatgctacaaaaaagtagcaaaaaagtacaaagttggcttagataacttgtaccgttttaaatggagatcataattttatgttcacttgatggggaatgactagaatggggcaataacaaatcatttctaaacagttattttccattaaaagccatattaagtattttgcttgttaaattctagttttatgttttaaatctcttagtggttacattgccatttggtagcatcatgtatatatttatgcttataagtttgcattatgactcctgtaaaatatgaaattataatgcaataaaagtgttatctttcttacaaaagttttgtacctaagtggatatagataactgcataaatgaataaattcagaattaactccttcaatatttctagtagcacaactgataatattgatattttct

SEQ ID NO: 122480 - DNA, 470 bp, Homo sapiens
  Payload ID: 3988
  Gene Symbol: CTTNBP2
  Gene Name: cortactin binding protein 2
  ENST ID: ENST00000412853
  CDS Start-End: 185-470
aaaaggagattgtatagaaagttaggagctgaggggctggtgccacgttctaaaagaaaacaggacagacaaatcgttttcatctgagaattgtttttggagaaacactagagtcaacgatagaataaatcagagccagaaaaaagagtttgatgtggatactctcagtaaatccgagctgcggatgctcctcagcgtgatggaaggggagctggaggccagagaccttgtcatcgaggccctgcgggctcgcaggaaggaggtatttatccaggaacggtatgggagatttaatctaaatgacccgttcctggcactccagagagactatgaagcaggtgctggtgacaaagagaagaagccagtttgtaccaaccccctctccatccttgaagcagtcatggcccactgcaagaaaatgcaagaaaggatgtccgcacagctggctgctgctgagagcagacaaaaga

SEQ ID NO: 122481 - DNA, 580 bp, Homo sapiens
  Payload ID: 3988
  Gene Symbol: CTTNBP2
  Gene Name: cortactin binding protein 2
  ENST ID: ENST00000435233
  CDS Start-End: 1-580
atgacttggaatgtgaaaacacaatatgtgctttaaatatccgcaaacagacatcatgggatgatttttcaaaagcagtgagtcaagctctgacaaatcatttccaggcaatctcttctgatggatggtggagtctggaagacgtgacttgcaataacaccactgattccaacatcggcctcagtgcaagaagcatacgatccatcacgctaggaaatgtgccgtggtcagtgggtcagagcttcgcgcagtccccgtgggactttatgaggaagaataaggcagagcacatcactgtgcttttgtcaggtcctcaagaaggctgtctcagtagtgtgacttatgcctccatgatccctctccagatgatgcagaactacctcaggctgcacagacaaatggctgcaggattctcctgtgaaatagtgagagctgaagtagatgctggtttttccaaggaacagctactagacctgttcattagtagcgcttgtctgatcccagtgaaacaatctcccagtaagaagaaaatcatcatcattttagaaaatttagaaaaatcttcactgtcggagttatt

SEQ ID NO: 122482 - DNA, 578 bp, Homo sapiens
  Payload ID: 3988
  Gene Symbol: CTTNBP2
  Gene Name: cortactin binding protein 2
  ENST ID: ENST00000434890
  CDS Start-End: 95-578
agatcgtaaacaaaacccaggacgccaggcagatttctgtgttaacaagaaaaaagagtttgatgtggatactctcagtaaatccgagctgcggatgctcctcagcgtgatggaaggggagctggaggccagagaccttgtcatcgaggccctgcgggctcgcaggaaggaggtatttatccaggaacggtatgggagatttaatctaaatgacccgttcctggcactccagagagactatgaagcaggtgctggtgacaaagagaagaagccagtttgtaccaaccccctctccatccttgaagcagtcatggcccactgcaagaaaatgcaagaaaggatgtccgcacagctggctgctgctgagagcagacaaaagaagctggaaatggagaagcttcagctacaagcccttgagcaagagcacaagaagctggctgcccgccttgaggaagagcgtggcaagaacaagcaggtggtcctgatgctggtcaaagagtgcaagcagctctcaggcaaagtcatagaggaggcccagaagctcgaagacgtaatggccaaactggaagaggaaaaga

SEQ ID NO: 122483 - DNA, 5517 bp, Homo sapiens
  Payload ID: 3988
  Gene Symbol: CTTNBP2
  Gene Name: cortactin binding protein 2
  ENST ID: ENST00000441556
  CDS Start-End: 15-1937
gctagagcaggaagatggcgacggacggcgcgagctgcgagcccgacttgtcccgggccccggaggacgcggcgggggccgcggcggaggcggcgaaaaaagagtttgatgtggatactctcagtaaatccgagctgcggatgctcctcagcgtgatggaaggggagctggaggccagagaccttgtcatcgaggccctgcgggctcgcaggaaggaggtatttatccaggaacggtatgggagatttaatctaaatgacccgttcctggcactccagagagactatgaagcaggtgctggtgacaaagagaagaagccagtttgtaccaaccccctctccatccttgaagcagtcatggcccactgcaagaaaatgcaagaaaggatgtccgcacagctggctgctgctgagagcagacaaaagaagctggaaatggagaagcttcagctacaagcccttgagcaagagcacaagaagctggctgcccgccttgaggaagagcgtggcaagaacaagcaggtggtcctgatgctggtcaaagagtgcaagcagctctcaggcaaagtcatagaggaggcccagaagctcgaagacgtaatggccaaactggaagaggaaaagaaaaagacgaatgaattagaagaggaactctccgctgagaaacgaagaagcacagaaatggaagctcagatggaaaaacaactctctgagtttgacactgagcgggaacagcttcgtgccaagctgaaccgggaagaagcacacaccactgacctcaaagaggagatagacaagatgaggaaaatgattgagcaactgaaaaggggaagtgacagcaaaccaagcctctctcttccacggaagacaaaagataggcgtttggtttccatatctgtgggaacagaaggaactgtgacaaggtctgttgcatgccagacagacctagtgacagaaaatgctgaccacatgaaaaagttgcctttaaccatgcctgtaaaaccttccacagggagtcccctagtttctgcaaatgcaaaagggagcgtgtgcaccagtgccaccatggccagaccaggtattgacaggcaggcttcctatggtgacttgattggcgcttctgtacccgctttcccacctccaagtgcaaacaaaattgaggaaaatggaccaagcactggctcaacaccagatccaaccagtagcacacccccacttcccagtaacgctgcccctcccaccgctcaaacaccaggcatagctcctcagaactcgcaagctccacctatgcacagtttacattcaccatgtgccaacacctctttgcatccaggtctaaacccacgaatccaagcagctagatttagatttcagggcaatgctaacgacccagaccaaaatggaaatactacccaaagtcctccgtcaagagatgtctcgcctacaagtcgtgacaacctagtggccaaacaactagctcggaatactgtgacccaagcactgtcaagatttacaagccctcaagcaggtgctccctcaaggcctggagtgcccccaacaggggatgttggcacccaccctccagttggtcggaccagtttaaagactcatggtgtagcacgagttgacagaggaaatcctcctcctatccctccaaaaaagccagggctctcccaaactccttctccaccacacccccaactcaaggttattatagacagcagcagggcctcgaacacaggggccaaagttgataacaaaactgtggcttcgactccttccagtttgccacaagggaacagggtgatcaatgaggagaaccttcctaagtcatcctcccctcagctgccaccaaaaccatccatagatttaactgtggcacctgcaggctgtgccgtttcagccctggccacgtctcaggctggtcaccctccctaacccctttgctaatgagtggtggtcctgcccccctggctggcaggcccacccttcttcagcaagctgctgcccagggaaatgtcactttattatcaatgctgcttaatgaagaaggactggacattaattactcctgtgaagatggccattctgccttgtattctgctgctaagaatggacatacagactgtgtgagattgctgctgagtgcagaagcccaagtcaatgctgctgataaaaatggcttcacacccttgtgtgctgcagctgctcagggacatttcgagtgtgtagaattattaatttcatatgatgctaacattaatcatgctgctgatggaggacagacacctctatacctggcctgtaaaaatggaaataaagaatgtattaaactcttgttggaagctggaaccaatcgaagtgtaaaaaccacagatggctggacaccagttcacgcagctgtggacactggtaatgtggacagcctcaagcttcttatgtaccatagaataccagctcatggaaattctttcaatgaggaggagtccgagtcaagtgtctttgacttggatggaggagaagagagtcctgaaggcatatccaagcctgttgttcctgcagacctcattaaccacgccaacagagaaggctggactgctgcccacattgctgcttccaaaggttttaagaactgcctagaaatcttgtgtaggcacggagggcttgagccagaaaggagagacaagtgcaatcggactgtgcatgatgttgccactgatgactgcaagcatttgctggagaatctgaatgctcttaaaatacccttaaggatttcagtgggtgagattgaaccaagcaactatggttctgatgacttggaatgtgaaaacacaatatgtgctttaaatatccgcaaacagacatcatgggatgatttttcaaaagcagtgagtcaagctctgacaaatcatttccaggcaatctcttctgatggatggtggagtctggaagacgtgacttgcaataacaccactgattccaacatcggcctcagtgcaagaagcatacgatccatcacgctaggaaatgtgccgtggtcagtgggtcagagcttcgcgcagtccccgtgggactttatgaggaagaataaggcagagcacatcactgtgcttttgtcaggtcctcaagaaggctgtctcagtagtgtgacttatgcctccatgatccctctccagatgatgcagaactacctcaggctggttgagcaatatcataatgtcattttccacggcccagaaggaagcttgcaagactacatagtacatcagcttgcactctgcctgaagcacagacaaatggctgcaggattctcctgtgaaatagtgagagctgaagtagatgctggtttttccaaggaacagctactagacctgttcattagtagcgcttgtctgatcccagtgaaacaatctcccagtaagaagaaaatcatcatcattttagaaaatttagaaaaatcttcactgtcggagttattgagggactttttggcacctcttgaaaatcgcagcactgaaagcccctgcactttccaaaaaggaaatggactgtccgaatgttattactttcatgagaactgctttctgatgggaaccatcgccaaggcctgtctccagggctccgacttgctggtgcagcagcatttccgctgggtgcagctgcggtgggatggcgagcccatgcaaggactgctgcagaggttcttacgaaggaaagttgtgaataagttcaaaggtcaggcgccctccccctgcgatcctgtgtgcaagattgtcgactgggctctgtccgtctggcgtcagcttaactcctgcctggcccgcttgggcacacctgaagcacttcttggaccaaaatatttcctgtcttgtcctgtagttcctgggcatgcccaagtgacagtgaagtggatgtctaagctgtggaatggcgtcatcgcacccagagttcaagaagcaatattgtcaagagcctctgtgaaaagacaacctggctttgggcagacaactgctaaaagacaccctagccaaggacagcaggctgtggtcaaagctgctctcagcatcttgctaaataaagctgtactgcatggctgtcccctccccagagcagagctagaccagcatacagctgatttcaaaggaggaagtttccctttatccatagtttccagttataacacttgtaacaagaagaaaggagagagtggtgcctggagaaaggtgaacaccagtcctcgcaggaagtctggccgcttctctttacccacctggaataagccagacctaagcactgaaggtatgaaaaataagactatatcacagctgaattgtaacaggaatgcttctctgtcaaaacaaaagtctttagagaatgatctatcactgacgttgaatttggatcagagactctctctgggttcagatgacgaagcagatcttgtcaaggaacttcagagcatgtgctccagcaagtctgagtctgatatcagcaagattgctgattccagggatgatttaaggatgtttgatagttctggaaacaaccctgtactttcagcaactattaataatctgagaatgccagtgtcacaaaaggaggtcagtcctctcagcagccatcaaactactgaatgcagcaacagtaaatcaaagactgagttgggtgtttcaagagttaaatcttttcttcctgttcctagaagtaaagtcacccagtgttcccagaacaccaaaagaagcagcagcagcagtaatacaaggcaaatagaaatcaacaacaactcaaaagaagtgaattggaacttacacaaaaatgaacacctagaaaaacctaacaaataggcctgcctacaatattctcattattaacttcctctatttcacacagaaaccaaggacaacaagatacaaatacctttaaattgataaaatgttttcactgtaatataaattatgagtgcgggaccactattcaatttttttttgtaaagaatgtatttataaccaacattttgttgcttttttttttaattctgtaggattgaacttcaataccaggaagttatgccaacttttcaagtagttttataatagaaaaattgtaatagttttaatcaagatgttcaggggtattaaaacagaactgtgtactgtatatctgtatatatgtatatatgtatgtatatttaaggaagtccagaaatcatactgcatacatgctacaaaaaagtagcaaaaaagtacaaagttggcttagataacttgtaccgttttaaatggagatcataattttatgttcacttgatggggaatgactagaatggggcaataacaaatcatttctaaacagttattttccattaaaagccatattaagtattttgcttgttaaattctagttttatgttttaaatctcttagtggttacattgccatttggtagcatcatgtatatatttatgcttataagtttgcattatgactcctgtaaaatatgaaattataatgcaataaaa

SEQ ID NO: 122484 - DNA, 570 bp, Homo sapiens
  Payload ID: 3988
  Gene Symbol: CTTNBP2
  Gene Name: cortactin binding protein 2
  ENST ID: ENST00000454375
  CDS Start-End: 163-570
gctttctggagagggagaggagagatgtggaggaaggtacttggggtgagaggagctgagcctggcaatggaaggagaaacggggaggaggactgctaatttccacttgtaaaactgaaaaaagagtttgatgtggatactctcagtaaatccgagctgcggatgctcctcagcgtgatggaaggggagctggaggccagagaccttgtcatcgaggccctgcgggctcgcaggaaggaggtatttatccaggaacggtatgggagatttaatctaaatgacccgttcctggcactccagagagactatgaagcaggtgctggtgacaaagagaagaagccagtttgtaccaaccccctctccatccttgaagcagtcatggcccactgcaagaaaatgcaagaaaggatgtccgcacagctggctgctgctgagagcagacaaaagaagctggaaatggagaagcttcagctacaagcccttgagcaagagcacaagaagctggctgcccgccttgaggaagagcgtggcaagaacaagcaggtggtcctgatgctggtcaaagagtgc

SEQ ID NO: 122485 - DNA, 530 bp, Homo sapiens
  Payload ID: 3988
  Gene Symbol: CTTNBP2
  Gene Name: cortactin binding protein 2
  ENST ID: ENST00000416239
  CDS Start-End: 1-362
catgggatgatttttcaaaagcagtgagtcaagctctgacaaatcatttccaggcaatctcttctgatggatggtggagtctggaagacgtgacttgcaataacaccactgattccaacatcggcctcagtgcaagaagcatacgatccatcacgctaggaaatgtgccgtggtcagtgggtcagagcttcgcgcagtccccgtgggactttatgaggaagaataaggcagagcacatcactgtgcttttgtcaggtcctcaagaaggctgtctcagtagtgtgacttatgcctccatgatccctctccagatgatgcagaactacctcaggctgatggggaaactgaacagagagaggtaaaatgctcaaagtcatgcatctagcaagtgatgaagccaggattgtgcaagtctctgatgtgtatgagatcaatctgaaactaatactactggtataaaacattaaacataattttgcttgctgccttaatttcgatgacctttttaaataaatgagttggaactatga

SEQ ID NO: 122486 - DNA, 1274 bp, Homo sapiens
  Payload ID: 3989
  Gene Symbol: CTXN1
  Gene Name: cortexin 1
  Uniprot ID: P60606
  ENST ID: ENST00000318978
  CDS Start-End: 221-469
ataggaacagccgcggcggcccggctcgcgcgctgcttgcctgcctcggtctccgccgctccaggggcgggtggggtgggctgagccggagcccgggccgccgccgccgccgccggggagaggccgaacgcgcagccggcgcgggtccctgagagagcgcggccgccgggcggtcggtccccgtccgggtcgaagccaggggcgcgcggcgatgtgagccatgagcgcgacgtggacgctgtcgccggagcccctgccgccgtcgacggggcccccggtgggcgcgggcctggacgcggagcagcgcacggtgttcgccttcgtgctctgcctgctcgtggtgctggtgctgttgatggtgcgctgcgtgcgcatcctgctcgacccctacagccgcatgcccgcctcgtcctggaccgaccacaaggaggcgctcgagcgcgggcagttcgactacgcgttggtgtgaggggcgcggcgccccctagccggccctgcgccggggtctcagagggccggcccggcggggggcgccgcggggccaggactgcgctcaggatcccgccccggagcccccagcccgggggagagggggagggagttgggagaagcccagcccctccccctcgagacccctcccatgtcccttcctggcctggccggagccccacctcgtgcctttatccgccctgtcccttcctctctgcgcatctcacccgcccggctggcccccacccccgactctgaatcccgggcgggaggaggacccccgcaccgccccctccccagcgtgtaagtggctctgctattgtgcgtccctggaagtggggacccccttgtccctcctccctcccctgttgtctggccgtcgtcaaccccaccttgactgagtgttgagcccgtccttgggctctggtccctgcggggcaggctctcccgggcccacggggcggacgctgcataccaatttgccctgcaccgcctgtcccggagacggagcccgaaggcctgccatggcggctgtgtcgaggatgcgtggcgcctgccgtggcgggacagcgtgggcaggctcatttctgcccccaacccgggccccaggacaggtcagcgcgccctgccccggtgcccaccgctgccccccatccgccctcctgccacttgcccctgacccccctgccgtgcctcccgcagccctcccatgccgttccactcctccctgcctctgagccgaacatgataataaaagctattattgagcgcttactgcatgccaa

SEQ ID NO: 122487 - DNA, 2828 bp, Homo sapiens
  Payload ID: 3990
  Gene Symbol: CTXN2
  Gene Name: cortexin 2
  Uniprot ID: P0C2S0
  ENST ID: ENST00000417307
  CDS Start-End: 373-618
acacagatgctgccacagacacacgcgagcgcaaatatttacacactgccacaccgaagaaatccatgcacgttttcctgcaaacgcgcgcgcgcacacgtacttcggcgggcgcccacgtcctctgtctcaccaacagacacagacatttacacttctaggccaggaaagcgctaaccagggccctgtgactctacgcaggttccagaacacgccttctacatttgttactgaaccgatcagcgaacacagacaaacgtgccaacacttaagtctactggctggacttcatctccatggcaacaagcatggaaggcaaagagttgattccagaaggaactgtgaagagccacaacaatgtgccagtgaataatgagtagtacctactgtggcaactcttcagctaagatgagtgtcaacgaagtatcagctttctcattgactctggagcaaaaaactggctttgcttttgttgggattttgtgtatcttcttgggacttcttattatccgatgcttcaaaatcctgctagacccatatagtagcatgccttcctctacatgggaagatgaagttgaagagtttgataaagggacatttgaatatgcactcgcgtgagagttccagctatatggtttttatggttgtgccatcgggacacattctggatacaattgtaactaccttgagggtgtgggagagaggctcattttgttcagtgaattcaataaacatctgtgactaatttcttcaccatgctgtgtaaatgataaactattgttgggattcctcactttcctctgttcccacttagaggtttccaatgaatagagcataaggatggctgccgccatgtttaccatctttattcttatcttgaacaactgccttgaatttctgcttcctttcttgtgctaataaactgtgccaaaggcatcttgctctctcccctctgaaaagcccaggcatcccctccacattcctgactcagacccctttagctttagtgagtcaggtcttaaacagagaatttagtccaaagaataatcaaaatattatttgtctaataataaccataggcccaaaaggttcacaggtgaaaaaatatctcaaaaatctaacacccaaagcctacaagtagtcacaggccctaaagctccccaaatttcacagagccctgaccctcctatctcttctgtttgtcgaatctcttgcagtaaaatcccatagcttggaatccaaaccagatctgcctcatactgatgctccctcccctaccccttgcataaatagaatttaaaagggagtttccagcatgacctagtggaaagagtactctaagcagaaacaaagacagtctcagctgtgccaccagtagagctatgctctaatgggtaagtcatctaatctctgtgagcttcagtgaagagtagtgttaacatccttttcaattctagtgccctatgaatgctacaaatgtatctgaaaacccagagatctgaaatgaatgaggatttaagatatcatgaaaagtttttcagattaggagcctaaactcagagatttgaattctaatgttagcttagccaagaactagctttatgacctagaaagttacctaaagggaacctatattgcacaacaagaattaagaaacccatcctgcatgtcttcagcaatattgagagggccaattagatataatgaatgtgaaagcattttgtaaaccataaaacagtatctaaacataccttgctatcaatatttattgtcctcatcagtagcagtaatagagattctcaaaccctaagaagcaatggcttagtgtaaattattcaatctctctagtatttcattctcttcaattgagaaataaaaagataaaattatatagttctaaattctttccaactacaaacttctgactctctatgagtcagaatggaggaacatagcaggagataaatacaaaaatatttatgtcctttgaaaacacagaactgcaaaacataccatgaaggaacaagactaatattaccaagaggtagcactaagttagttactttcaatttatttgatactcttataaattctttgagttggagactactatttccattttatttttaatcttaattttgcagaagagaaactgaagctaagagaaattaactagcttcccaaggtcaccatagctagggaatggttatgttagggattgaacttgggcagtttgatttctgctgtatccctagacactgtcctcaacacttctacatagcttataggcatggttactgctcaggtctatggaattccaaaaccagctgtctctgtgagattccttgatgctttccatctcataatagatttagaacatatctgttattagctatggatcttctggaccaaatcctcacctcaaggaggctctctgtaccccagttggttcaagagtgtaggcctggtacacctcatagccagttagtaacttggcccaagaacaggccactgggccaagttcaactgaacatactgaaaattgtgtgtgccaggaaactaggtctctttgttgaccaaggcttttaaagtaccagatgtttcatttgtctcccagagaagacacccaccaagaccctccattttgatgactagaacaaaccaaggccagatctttatttcaaaggaagaaagacctctacaaccaagaaaactttatgaaatatgagcattgtttctggaagttcaactcccataagcttttcaagtatattaactctaccataatattatttccaaatccactaaagaaaaattctattaaccaa

SEQ ID NO: 122488 - DNA, 1660 bp, Homo sapiens
  Payload ID: 3991
  Gene Symbol: CTXN3
  Gene Name: cortexin 3
  Uniprot ID: Q4LDR2
  ENST ID: ENST00000379445
  CDS Start-End: 552-797
agacacactgctaggatactgcctctactcgctgaagcagaatcctctgaagagttgctgaggcagaactgaaatcatggctcacctcaaagaagcagcagtattggccgttaatgatgcctcacacagaaagacgatgctcctttaactcggggttttaatgggaagtttctaagcctgaaacaacagctttagacctggggtgtgccatcagctgccttgcagctaccactgtctactgctttcacacagcgtggtcgggaagaatggaaactaaagaggcttgtaactacctgtaactgttccaccaggaaatggatcaagtgtttgttcagccagagccagtattaaaattagactctatttcctgagcacccacaaatggacctgacaaagggaagacacagatgtactgcgtgatgaggaaagcctatcaggattaaaatatggctataactcagcctctccagagtgcagccaccatgacctccgcagattgatgatggaagaaaagaaaaccaggatatcctgtgctctggcttccctggaccatggatggaggacagcccatcccctcatccctagtgccccttgggaacgaatcagcagattctagcatgtccctggagcagaaaatgacatttgtttttgtgattctgttgtttattttcttgggcattctcattgtccggtgcttccggattcttttggatccatatcgaagcatgccaacctctacctgggctgatggacttgaaggcctggagaaagggcagttcgaccatgcccttgcttaggagggatggtgtgggatctcctcctgaggagatgaagtgctttgtgtcttggtgaggattccctttatttagtgttctcaacaaatcaaatttaaacaatatttggtcccaggaccataatccattattccataaatatgcagttgggttaaagacatttgaggatgttggaaatggacacttatataactaatccaacataagaaggtttaaatttttatgtttgctcaatgaatgagtactcttaaaattgtgtgattgtgaaaccaagagcgttaatactgacatagatttgccatcaaacaaaacaccacctgatctgactaaagaataaaagactagaaaggatctcatatgaatctggtgacaaggccaggaagagatttccttgctctaattatgtctatatttgttttatttcatgggcacctatctgggtcctgagcagaatgaggaagattgtgctgaatggacccaaagtagtttcttgttttctcccaaagcagggagctttgggaagcaatggaaaagcttaaaagagatgattctgtccttggtaaatgtgagtgagaatagcgttttgtttttcaagtaaaacttaattcaaaggctacaaagttttaaaaactatttaccaagccaactacattatatgtattcatattaataacatgtgtagaggtagctatacattacttgaatttacactttacacaaatgatttaaaaaataggttgcaagtgcagcttaaagttttttttcaatgaaaagttaattgtttagaggagaagacttttatagtcttcagaggaatgtgtatttatgattgtatatagtcaccaaataaaacttttcaagaaaca

SEQ ID NO: 122489 - DNA, 1458 bp, Homo sapiens
  Payload ID: 3991
  Gene Symbol: CTXN3
  Gene Name: cortexin 3
  Uniprot ID: Q4LDR2
  ENST ID: ENST00000395322
  CDS Start-End: 350-595
ggcttaaaaagatgaatcgagatgcagtgtgtaggaagcatgggcaagggatgaggaacgccactttgaaaattactaaaactaaagcaagtgactaagagtgtgaatgaccctggctgcaatgactacgcctgctgggcttctattaaaattagactctatttcctgagcacccacaaatggacctgacaaagggaagacacagatgtactgcgtgatgaggaaagcctatcaggattaaaatatggctataactcagcctctccagagtgcagccaccatgacctccgcagattgatgatggaagaaaagaaaaccaggatatcctgtgctctggcttccctggaccatggatggaggacagcccatcccctcatccctagtgccccttgggaacgaatcagcagattctagcatgtccctggagcagaaaatgacatttgtttttgtgattctgttgtttattttcttgggcattctcattgtccggtgcttccggattcttttggatccatatcgaagcatgccaacctctacctgggctgatggacttgaaggcctggagaaagggcagttcgaccatgcccttgcttaggagggatggtgtgggatctcctcctgaggagatgaagtgctttgtgtcttggtgaggattccctttatttagtgttctcaacaaatcaaatttaaacaatatttggtcccaggaccataatccattattccataaatatgcagttgggttaaagacatttgaggatgttggaaatggacacttatataactaatccaacataagaaggtttaaatttttatgtttgctcaatgaatgagtactcttaaaattgtgtgattgtgaaaccaagagcgttaatactgacatagatttgccatcaaacaaaacaccacctgatctgactaaagaataaaagactagaaaggatctcatatgaatctggtgacaaggccaggaagagatttccttgctctaattatgtctatatttgttttatttcatgggcacctatctgggtcctgagcagaatgaggaagattgtgctgaatggacccaaagtagtttcttgttttctcccaaagcagggagctttgggaagcaatggaaaagcttaaaagagatgattctgtccttggtaaatgtgagtgagaatagcgttttgtttttcaagtaaaacttaattcaaaggctacaaagttttaaaaactatttaccaagccaactacattatatgtattcatattaataacatgtgtagaggtagctatacattacttgaatttacactttacacaaatgatttaaaaaataggttgcaagtgcagcttaaagttttttttcaatgaaaagttaattgtttagaggagaagacttttatagtcttcagaggaatgtgtatttatgattgtatatagtcaccaaataaaacttttcaagaaaca

SEQ ID NO: 122490 - DNA, 1208 bp, Homo sapiens
  Payload ID: 3991
  Gene Symbol: CTXN3
  Gene Name: cortexin 3
  Uniprot ID: Q4LDR2
  ENST ID: ENST00000620385
  CDS Start-End: 100-345
ataactcagcctctccagagtgcagccaccatgacctccgcagattgatgatggaagaaaagaaaaccaggatatcctgtgctctggcttccctggaccatggatggaggacagcccatcccctcatccctagtgccccttgggaacgaatcagcagattctagcatgtccctggagcagaaaatgacatttgtttttgtgattctgttgtttattttcttgggcattctcattgtccggtgcttccggattcttttggatccatatcgaagcatgccaacctctacctgggctgatggacttgaaggcctggagaaagggcagttcgaccatgcccttgcttaggagggatggtgtgggatctcctcctgaggagatgaagtgctttgtgtcttggtgaggattccctttatttagtgttctcaacaaatcaaatttaaacaatatttggtcccaggaccataatccattattccataaatatgcagttgggttaaagacatttgaggatgttggaaatggacacttatataactaatccaacataagaaggtttaaatttttatgtttgctcaatgaatgagtactcttaaaattgtgtgattgtgaaaccaagagcgttaatactgacatagatttgccatcaaacaaaacaccacctgatctgactaaagaataaaagactagaaaggatctcatatgaatctggtgacaaggccaggaagagatttccttgctctaattatgtctatatttgttttatttcatgggcacctatctgggtcctgagcagaatgaggaagattgtgctgaatggacccaaagtagtttcttgttttctcccaaagcagggagctttgggaagcaatggaaaagcttaaaagagatgattctgtccttggtaaatgtgagtgagaatagcgttttgtttttcaagtaaaacttaattcaaaggctacaaagttttaaaaactatttaccaagccaactacattatatgtattcatattaataacatgtgtagaggtagctatacattacttgaatttacactttacacaaatgatttaaaaaataggttgcaagtgcagcttaaagttttttttcaatgaaaagttaattgtttagaggagaagacttttatagtcttcagaggaatgtgtatttatgattgtatatagtcaccaaataaaacttttcaagaaaca

SEQ ID NO: 122491 - DNA, 1543 bp, Homo sapiens
  Payload ID: 3992
  Gene Symbol: CRH
  Gene Name: corticotropin releasing hormone
  Uniprot ID: P06850
  ENST ID: ENST00000276571
  CDS Start-End: 448-1038
aagtcataagaagcccttccattttagggctcgttgacgtcaccaagaggcgataaatatctgttgatataattggatgtgagattcagtgttgagatagcaaaattctgcccctcgttccttggcagggccctatgatttatgcaggagcagaggcagcacgcaatcgagctgtcaagagagcgtcagcttattaggcaaatgctgcgtggtttttgaagagggtcgacactataaaatcccactccaggctctggagtggagaaactcagagaccaagtccattgagagactgaggggaaagagaggagagaaagaaaaagagagtgggaacagtaaagagaaaggaagacaacctccagagaaagcccccggagacgtctctctgcagagaggcggcagcacccggctcacctgcgaagcgcctgggaagcgagtgcccctaacatgcggctgccgctgcttgtgtccgcgggagtcctgctggtggctctcctgccctgcccgccatgcagggcgctcctgagccgcgggccggtcccgggagctcggcaggcgccgcagcaccctcagcccttggatttcttccagccgccgccgcagtccgagcagccccagcagccgcaggctcggccggtcctgctccgcatgggagaggagtacttcctccgcctggggaacctcaacaagagcccggccgctcccctttcgcccgcctcctcgctcctcgccggaggcagcggcagccgcccttcgccggaacaggcgaccgccaactttttccgcgtgttgctgcagcagctgctgctgcctcggcgctcgctcgacagccccgcggctctcgcggagcgcggcgctaggaatgccctcggcggccaccaggaggcaccggagagagaaaggcggtccgaggagcctcccatctccctggatctcaccttccacctcctccgggaagtcttggaaatggccagggccgagcagttagcacagcaagctcacagcaacaggaaactcatggagattattgggaaataaaacggtgcgtttggccaaaaagaatctgcatttagcacaaaaaaaatttaaaaaaatacagtattctgtaccatagcgctgctcttatgccatttgtttatttttatatagcttgaaacatagagggagagagggagagagcctataccccttacttagcatgcacaaagtgtattcacgtgcagcagcaacacaatgttattcgttttgtctacgtttagtttccgtttccaggtgtttatagtggtgttttaaagagaatgtagacctgtgagaaaacgttttgtttgaaaaagcagacagaagtcactcaattgtttttgttgtggtctgagccaaagagaatgccattctcttgggtgggtaagactaaatctgtaagctctttgaaacaactttctcttgtaaacgtttcagtaataaaacatctttccagtccttggtcagtttggttgtgtaagagaatgttgaatacttatatttttaataaaagttgcaaaggtaa

SEQ ID NO: 122492 - DNA, 1980 bp, Homo sapiens
  Payload ID: 3993
  Gene Symbol: CRHBP
  Gene Name: corticotropin releasing hormone binding protein
  Uniprot ID: P24387
  ENST ID: ENST00000274368
  CDS Start-End: 423-1391
actttgatttgcaaaatggaaaattccctgaatgcccacagaaaagtataatgtagcatttagcaggtcaacaaaatgcactcccttattctttgtctccgcctcattctccaacactttagtgcactaagttgtagtgactgaaatcattcttggtgaataatgctgggccacgctgaaaatttgtggctgagagctggaccctcgtcatcgccacgtactctgtcaatgagacagggtaacccatggttactgagctccgatcagttaaggggcagagagcctccgctccccactgctctataaaagagacccagcaaagggaccctaccagcttctagctctcagtctgcgcgagggtgtaggaaggaaagcccaggacctccggagcagagcacagcagctgcagaggcaaggccagcatgtcgcccaacttcaaacttcagtgtcacttcattctcatcttcctgacggctctaagaggggaaagccggtacctagagctgagggaagcggcggactacgatcctttcctgctcttcagcgccaacctgaagcgggagctggctggggagcagccgtaccgccgcgctctgcggtgcctggacatgctgagcctccagggccagttcaccttcaccgccgaccggccgcagctgcactgcgcagccttcttcatcagcgagcccgaggagttcattaccatccactacgaccaggtctccatcgactgtcagggcggcgacttcctgaaggtatttgatggttggattctcaagggggagaagttccccagttcccaggatcatcctctcccctcagctgagcggtacatagatttctgtgagagtggtcttagcaggaggagcatcagatcttcccagaatgtggccatgatcttcttccgagtccatgaaccaggaaatggattcacattaaccataaagacagaccccaacctctttccttgcaatgtcatttctcagactccaaatggaaagtttaccctggtagttccacaccagcatcgaaactgcagcttctccataatttatcctgtggtgatcaaaatatctgatcttaccctgggacacgtaaatggtcttcagttaaagaaatcctcagcaggttgcgagggaataggagactttgtggagctgctgggaggaactggattggacccttccaagatgacgcctttagctgatctctgctacccctttcatggcccggcccagatgaaagttggctgtgacaacactgtggtgcgcatggtctccagtggaaaacacgtaaatcgtgtgacttttgagtatcgtcagctggagccgtacgagctggaaaacccaaatggaaacagtatcggggaattctgtttgtctggtctttgaataaccaacccagtgatttacatgctgatagctaagtgagtttttaatggccattgtgtatgattttgatgcacaactagttaaaagcctttcataccagtcagtattcccagccttgagcgcacgcgcgcacacacacacacacatacacacacgcattaatttttgtactttgcttcttttatgtttgtaatctgtaaatgaacacatggcagaaaataacccctgattggtaggatcatagttctaaatggaaatgtttgtaattctttgatgtgctacaaacctgaaactggtaagacaagcacaaagcaacgtgcaatacaaaaatcgtatctcaagggaaaatactcaaagaaagaaaagtggcagcacttatattagttttataacaggataaagtcttgtgtatagcaaagtagttgcatctgtttattttctatttattattgttacaataggtaatagttatagcaattatttattgatttgtaacaacttgtttttaaccaaactttgtagcatggaaaaaattttccatccacaaatacaaacatgaataaatacattcagaatgttggcaccatga

SEQ ID NO: 122493 - DNA, 912 bp, Homo sapiens
  Payload ID: 3993
  Gene Symbol: CRHBP
  Gene Name: corticotropin releasing hormone binding protein
  ENST ID: ENST00000506501
  CDS Start-End: 87-803
tctagctctcagtctgcgcgagggtgtaggaaggaaagcccaggacctccggagcagagcacagcagctgcagaggcaaggccagcatgtcgcccaacttcaaacttcagtgtcacttcattctcatcttcctgacggctctaagaggggaaagccggtacctagagctgagggaagcggcggactacgatcctttcctgctcttcagcgccaacctgaagcgggagctggctggggagcagccgtaccgccgcgctctgcggtgcctggacatgctgagcctccagggccagttcaccttcaccgccgaccggccgcagctgcactgcgcagccttcttcatcagcgagcccgaggagttcattaccatccactacgaccaggtctccatcgactgtcagggcggcgacttcctgaaggtatttgatggttggattctcaagggggagaagttccccagttcccaggatcatcctctcccctcagctgagcggtacatagatttctgtgagagtggtcttagcaggaggagcatcagatcttcccagaatgtggccatgatcttcttccgagtccatgaaccaggaaatggattcacattaaccataaagacagaccccaacctctttccttgcaatgtcatttctcagactccaaatggaaagtttaccctggtagttccacaccagcatcgaaactgcagcttctccataatttatcctgtggtgatcaaaatatctgatcttaccctgggacacgtaaatggtcttcagttaaaggtgagttgcttacttgtttcctaaccgtttgataaggccacaactttatcagagcagaagcaatcatatagggaaaacctggacactagcaaattggcgtagtacgttgctctgatgaactcttaaatctcaa

SEQ ID NO: 122494 - DNA, 2462 bp, Homo sapiens
  Payload ID: 3994
  Gene Symbol: CRHR1
  Gene Name: corticotropin releasing hormone receptor 1
  ENST ID: ENST00000347197
  CDS Start-End: 239-676
gccgggctgcgtcgggaaacggcggccagacttccccgggaaggggcgagcgagagccgggccgggccgggccgggccgcggggccgggaagcgccgagccgggcatctcctcaccaggcagcgaccgaggagcccggccgcccaccccgtgccgcccgagcccgcagccgcccgccggtccctctgggatgtccgtaggacccgggcattcaggacggtagccgagcgagcccgaggatgggagggcacccgcagctccgtctcgtcaaggcccttctccttctggggctgaaccccgtctctgcctccctccaggaccagcactgcgagagcctgtccctggccagcaacatctcaggactgcagtgcaacgcatccgtggacctcattggcacctgctggccccgcagccctgcggggcagctagtggttcggccctgccctgcctttttctatggtgtccgctacaataccacaaacaatggctaccgggagtgcctggccaatggcagctgggccgcccgcgtgaattactccgagtgccaggagatcctcaatgaggagaaaaaaagcaaggtgcactaccatgtcgcagtcatcatcaactacctgggccactgtatctccctggtggccctcctggtggcctttgtcctctttctgcggctcagctaaccatgagccccgaggtccaccagagcaacgtgggctggtgcaggttggtgacagccgcctacaactacttccatgtgaccaacttcttctggatgttcggcgagggctgctacctgcacacagccatcgtgctcacctactccactgaccggctgcgcaaatggatgttcatctgcattggctggggtgtgcccttccccatcattgtggcctgggccattgggaagctgtactacgacaatgagaagtgctggtttggcaaaaggcctggggtgtacaccgactacatctaccagggccccatgatcctggtcctgctgatcaatttcatcttccttttcaacatcgtccgcatcctcatgaccaagctccgggcatccaccacgtctgagaccattcagtacaggaaggctgtgaaagccactctggtgctgctgcccctcctgggcatcacctacatgctgttcttcgtcaatcccggggaggatgaggtctcccgggtcgtcttcatctacttcaactccttcctggaatccttccagggcttctttgtgtctgtgttctactgtttcctcaatagtgaggtccgttctgccatccggaagaggtggcaccggtggcaggacaagcactcgatccgtgcccgagtggcccgtgccatgtccatccccacctccccaacccgtgtcagctttcacagcatcaagcagtccacagcagtctgagctggcaggtcatggagcagcccccaaagagctgtggctggggggatgacggccaggctccctgaccaccctgcctgtggaggtgacctgttaggtctcatgcccactcccccaggagcagctggcactgacagcctgggggggccgctctccccctgcagccgtgcaggactctagctcatgagtggaaagtcacctacaggactgggccgggcccagggcctctggcttccctgcccaatcctccctggagaagggacatgggaatgaattgaaatggggcgctggacacctacagcagcacgcatgtccctccaaggctgtcttctcccagagcacaagaaggccagcccactgggccctggggctgccctcggcaaccgtggggaggccatttgctgccctggggcatcatgggcaactcgtgacagcctctgactcaccacgatgacgcctctggacctcggtgatgccttccgacaccactgggaaccaagggccctcactcaggaaccctggagacagaagtcaggtgtcatcatcagacttgcggccacagcactagagtcacccccccaggcctccagaaccttactggcactgtggcactgccaccagcaatgccctgccttgctgccttcaccctgaacatttagtaccctgcaggccaggccagcttcccctcacttaaccaccccataccagtcacctcctgctccttttcctcttttgtgagaagatgggggctggagggggcagagtggcctgtgagcaagagccaggggtgtcccagtcccagcctctggggcagagcttgtagccctggatggcctctggggcaggaccactagctaagcaagccaggagaagacccctgcccaagtggctcttgggacaacgtgctgcttacactccaggtgtggaccggccgcagcccccactgacctgcccatgtccagagggactggacagccagggcagggctttggggggcactagaagatgagggtgtcggctgtgaggcgggtggctggtataaataatatttatcttttcaacca

SEQ ID NO: 122495 - DNA, 2621 bp, Homo sapiens
  Payload ID: 3994
  Gene Symbol: CRHR1
  Gene Name: corticotropin releasing hormone receptor 1
  ENST ID: ENST00000293493
  CDS Start-End: 266-1558
ggcgaggccggcaagaggcggccgcgggccgggctgcgtcgggaaacggcggccagacttccccgggaaggggcgagcgagagccgggccgggccgggccgggccgcggggccgggaagcgccgagccgggcatctcctcaccaggcagcgaccgaggagcccggccgcccaccccgtgccgcccgagcccgcagccgcccgccggtccctctgggatgtccgtaggacccgggcattcaggacggtagccgagcgagcccgaggatgggagggcacccgcagctccgtctcgtcaaggcccttctccttctggggctgaaccccgtctctgcctccctccaggaccagcactgcgagagcctgtccctggccagcaacatctcaggactgcagtgcaacgcatccgtggacctcattggcacctgctggccccgcagccctgcggggcagctagtggttcggccctgccctgcctttttctatggtgtccgctacaataccacaaacaatggctaccgggagtgcctggccaatggcagctgggccgcccgcgtgaattactccgagtgccaggagatcctcaatgaggagaaaaaaagcaaggtgcactaccatgtcgcagtcatcatcaactacctgggccactgtatctccctggtggccctcctggtggcctttgtcctctttctgcggctcaggccaggctgcacccattggggtgaccaggcagatggagccctggaggtgggggctccatggagtggtgccccatttcaggttcgaaggagcatccggtgcctgcgaaacatcatccactggaacctcatctccgccttcatcctgcgcaacgccacctggttcgtggtccagctaaccatgagccccgaggtccaccagagcaacgtgggctggtgcaggttggtgacagccgcctacaactacttccatgtgaccaacttcttctggatgttcggcgagggctgctacctgcacacagccatcgtgctcacctactccactgaccggctgcgcaaatggatgttcatctgcattggctggggtgtgcccttccccatcattgtggcctgggccattgggaagctgtactacgacaatgagaagtgctggtttggcaaaaggcctggggtgtacaccgactacatctaccagggccccatgatcctggtcctgctgatcaatttcatcttccttttcaacatcgtccgcatcctcatgaccaagctccgggcatccaccacgtctgagaccattcagtacaggaaggctgtgaaagccactctggtgctgctgcccctcctgggcatcacctacatgctgttcttcgtcaatcccggggaggatgaggtctcccgggtcgtcttcatctacttcaactccttcctggaatccttccaggtccgttctgccatccggaagaggtggcaccggtggcaggacaagcactcgatccgtgcccgagtggcccgtgccatgtccatccccacctccccaacccgtgtcagctttcacagcatcaagcagtccacagcagtctgagctggcaggtcatggagcagcccccaaagagctgtggctggggggatgacggccaggctccctgaccaccctgcctgtggaggtgacctgttaggtctcatgcccactcccccaggagcagctggcactgacagcctgggggggccgctctccccctgcagccgtgcaggactctagctcatgagtggaaagtcacctacaggactgggccgggcccagggcctctggcttccctgcccaatcctccctggagaagggacatgggaatgaattgaaatggggcgctggacacctacagcagcacgcatgtccctccaaggctgtcttctcccagagcacaagaaggccagcccactgggccctggggctgccctcggcaaccgtggggaggccatttgctgccctggggcatcatgggcaactcgtgacagcctctgactcaccacgatgacgcctctggacctcggtgatgccttccgacaccactgggaaccaagggccctcactcaggaaccctggagacagaagtcaggtgtcatcatcagacttgcggccacagcactagagtcacccccccaggcctccagaaccttactggcactgtggcactgccaccagcaatgccctgccttgctgccttcaccctgaacatttagtaccctgcaggccaggccagcttcccctcacttaaccaccccataccagtcacctcctgctccttttcctcttttgtgagaagatgggggctggagggggcagagtggcctgtgagcaagagccaggggtgtcccagtcccagcctctggggcagagcttgtagccctggatggcctctggggcaggaccactagctaagcaagccaggagaagacccctgcccaagtggctcttgggacaacgtgctgcttacactccaggtgtggaccggccgcagcccccactgacctgcccatgtccagagggactggacagccagggcagggctttggggggcactagaagatgagggtgtcggctgtgaggcgggtggctggtataaataatatttatcttttcaaccagc

SEQ ID NO: 122496 - DNA, 2535 bp, Homo sapiens
  Payload ID: 3994
  Gene Symbol: CRHR1
  Gene Name: corticotropin releasing hormone receptor 1
  Uniprot ID: P34998
  ENST ID: ENST00000314537
  CDS Start-End: 226-1473
gggaaacggcggccagacttccccgggaaggggcgagcgagagccgggccgggccgggccgggccgcggggccgggaagcgccgagccgggcatctcctcaccaggcagcgaccgaggagcccggccgcccaccccgtgccgcccgagcccgcagccgcccgccggtccctctgggatgtccgtaggacccgggcattcaggacggtagccgagcgagcccgaggatgggagggcacccgcagctccgtctcgtcaaggcccttctccttctggggctgaaccccgtctctgcctccctccaggaccagcactgcgagagcctgtccctggccagcaacatctcaggactgcagtgcaacgcatccgtggacctcattggcacctgctggccccgcagccctgcggggcagctagtggttcggccctgccctgcctttttctatggtgtccgctacaataccacaaacaatggctaccgggagtgcctggccaatggcagctgggccgcccgcgtgaattactccgagtgccaggagatcctcaatgaggagaaaaaaagcaaggtgcactaccatgtcgcagtcatcatcaactacctgggccactgtatctccctggtggccctcctggtggcctttgtcctctttctgcggctcaggagcatccggtgcctgcgaaacatcatccactggaacctcatctccgccttcatcctgcgcaacgccacctggttcgtggtccagctaaccatgagccccgaggtccaccagagcaacgtgggctggtgcaggttggtgacagccgcctacaactacttccatgtgaccaacttcttctggatgttcggcgagggctgctacctgcacacagccatcgtgctcacctactccactgaccggctgcgcaaatggatgttcatctgcattggctggggtgtgcccttccccatcattgtggcctgggccattgggaagctgtactacgacaatgagaagtgctggtttggcaaaaggcctggggtgtacaccgactacatctaccagggccccatgatcctggtcctgctgatcaatttcatcttccttttcaacatcgtccgcatcctcatgaccaagctccgggcatccaccacgtctgagaccattcagtacaggaaggctgtgaaagccactctggtgctgctgcccctcctgggcatcacctacatgctgttcttcgtcaatcccggggaggatgaggtctcccgggtcgtcttcatctacttcaactccttcctggaatccttccagggcttctttgtgtctgtgttctactgtttcctcaatagtgaggtccgttctgccatccggaagaggtggcaccggtggcaggacaagcactcgatccgtgcccgagtggcccgtgccatgtccatccccacctccccaacccgtgtcagctttcacagcatcaagcagtccacagcagtctgagctggcaggtcatggagcagcccccaaagagctgtggctggggggatgacggccaggctccctgaccaccctgcctgtggaggtgacctgttaggtctcatgcccactcccccaggagcagctggcactgacagcctgggggggccgctctccccctgcagccgtgcaggactctagctcatgagtggaaagtcacctacaggactgggccgggcccagggcctctggcttccctgcccaatcctccctggagaagggacatgggaatgaattgaaatggggcgctggacacctacagcagcacgcatgtccctccaaggctgtcttctcccagagcacaagaaggccagcccactgggccctggggctgccctcggcaaccgtggggaggccatttgctgccctggggcatcatgggcaactcgtgacagcctctgactcaccacgatgacgcctctggacctcggtgatgccttccgacaccactgggaaccaagggccctcactcaggaaccctggagacagaagtcaggtgtcatcatcagacttgcggccacagcactagagtcacccccccaggcctccagaaccttactggcactgtggcactgccaccagcaatgccctgccttgctgccttcaccctgaacatttagtaccctgcaggccaggccagcttcccctcacttaaccaccccataccagtcacctcctgctccttttcctcttttgtgagaagatgggggctggagggggcagagtggcctgtgagcaagagccaggggtgtcccagtcccagcctctggggcagagcttgtagccctggatggcctctggggcaggaccactagctaagcaagccaggagaagacccctgcccaagtggctcttgggacaacgtgctgcttacactccaggtgtggaccggccgcagcccccactgacctgcccatgtccagagggactggacagccagggcagggctttggggggcactagaagatgagggtgtcggctgtgaggcgggtggctggtataaataatatttatcttttcaaccag

SEQ ID NO: 122497 - DNA, 2490 bp, Homo sapiens
  Payload ID: 3994
  Gene Symbol: CRHR1
  Gene Name: corticotropin releasing hormone receptor 1
  ENST ID: ENST00000339069
  CDS Start-End: 483-1427
ggcgaggccggcaagaggcggccgcgggccgggctgcgtcgggaaacggcggccagacttccccgggaaggggcgagcgagagccgggccgggccgggccgggccgcggggccgggaagcgccgagccgggcatctcctcaccaggcagcgaccgaggagcccggccgcccaccccgtgccgcccgagcccgcagccgcccgccggtccctctgggatgtccgtaggacccgggcattcaggacggtagccgagcgagcccgaggatgggagggcacccgcagctccgtctcgtcaaggcccttctccttctggggctgaaccccgtctctgcctccctccaggaccagcactgcgagagcctgtccctggccagcaacatctcaggactgcagtgcaacgcatccgtggacctcattggcacctgctggccccgcagccctgcggggcagctagtggttcggccctgccctgcctttttctatggtgtccgctacaataccacaaaaaaaaagcaaggtgcactaccatgtcgcagtcatcatcaactacctgggccactgtatctccctggtggccctcctggtggcctttgtcctctttctgcggctcaggagcatccggtgcctgcgaaacatcatccactggaacctcatctccgccttcatcctgcgcaacgccacctggttcgtggtccagctaaccatgagccccgaggtccaccagagcaacgtgggctggtgcaggttggtgacagccgcctacaactacttccatgtgaccaacttcttctggatgttcggcgagggctgctacctgcacacagccatcgtgctcacctactccactgaccggctgcgcaaatggatgttcatctgcattggctggggtgtgcccttccccatcattgtggcctgggccattgggaagctgtactacgacaatgagaagtgctggtttggcaaaaggcctggggtgtacaccgactacatctaccagggccccatgatcctggtcctgctgatcaatttcatcttccttttcaacatcgtccgcatcctcatgaccaagctccgggcatccaccacgtctgagaccattcagtacaggaaggctgtgaaagccactctggtgctgctgcccctcctgggcatcacctacatgctgttcttcgtcaatcccggggaggatgaggtctcccgggtcgtcttcatctacttcaactccttcctggaatccttccagggcttctttgtgtctgtgttctactgtttcctcaatagtgaggtccgttctgccatccggaagaggtggcaccggtggcaggacaagcactcgatccgtgcccgagtggcccgtgccatgtccatccccacctccccaacccgtgtcagctttcacagcatcaagcagtccacagcagtctgagctggcaggtcatggagcagcccccaaagagctgtggctggggggatgacggccaggctccctgaccaccctgcctgtggaggtgacctgttaggtctcatgcccactcccccaggagcagctggcactgacagcctgggggggccgctctccccctgcagccgtgcaggactctagctcatgagtggaaagtcacctacaggactgggccgggcccagggcctctggcttccctgcccaatcctccctggagaagggacatgggaatgaattgaaatggggcgctggacacctacagcagcacgcatgtccctccaaggctgtcttctcccagagcacaagaaggccagcccactgggccctggggctgccctcggcaaccgtggggaggccatttgctgccctggggcatcatgggcaactcgtgacagcctctgactcaccacgatgacgcctctggacctcggtgatgccttccgacaccactgggaaccaagggccctcactcaggaaccctggagacagaagtcaggtgtcatcatcagacttgcggccacagcactagagtcacccccccaggcctccagaaccttactggcactgtggcactgccaccagcaatgccctgccttgctgccttcaccctgaacatttagtaccctgcaggccaggccagcttcccctcacttaaccaccccataccagtcacctcctgctccttttcctcttttgtgagaagatgggggctggagggggcagagtggcctgtgagcaagagccaggggtgtcccagtcccagcctctggggcagagcttgtagccctggatggcctctggggcaggaccactagctaagcaagccaggagaagacccctgcccaagtggctcttgggacaacgtgctgcttacactccaggtgtggaccggccgcagcccccactgacctgcccatgtccagagggactggacagccagggcagggctttggggggcactagaagatgagggtgtcggctgtgaggcgggtggctggtataaataatatttatcttttcaaccagc

SEQ ID NO: 122498 - DNA, 1146 bp, Homo sapiens
  Payload ID: 3994
  Gene Symbol: CRHR1
  Gene Name: corticotropin releasing hormone receptor 1
  Uniprot ID: P34998
  ENST ID: ENST00000352855
  CDS Start-End: 19-1146
agccgagcgagcccgaggatgggagggcacccgcagctccgtctcgtcaaggcccttctccttctggggctgaaccccgtctctgcctccctccaggaccagcactgcgagagcctgtccctggccagcaacatctcagacaatggctaccgggagtgcctggccaatggcagctgggccgcccgcgtgaattactccgagtgccaggagatcctcaatgaggagaaaaaaagcaaggtgcactaccatgtcgcagtcatcatcaactacctgggccactgtatctccctggtggccctcctggtggcctttgtcctctttctgcggctcaggagcatccggtgcctgcgaaacatcatccactggaacctcatctccgccttcatcctgcgcaacgccacctggttcgtggtccagctaaccatgagccccgaggtccaccagagcaacgtgggctggtgcaggttggtgacagccgcctacaactacttccatgtgaccaacttcttctggatgttcggcgagggctgctacctgcacacagccatcgtgctcacctactccactgaccggctgcgcaaatggatgttcatctgcattggctggggtgtgcccttccccatcattgtggcctgggccattgggaagctgtactacgacaatgagaagtgctggtttggcaaaaggcctggggtgtacaccgactacatctaccagggccccatgatcctggtcctgctgatcaatttcatcttccttttcaacatcgtccgcatcctcatgaccaagctccgggcatccaccacgtctgagaccattcagtacaggaaggctgtgaaagccactctggtgctgctgcccctcctgggcatcacctacatgctgttcttcgtcaatcccggggaggatgaggtctcccgggtcgtcttcatctacttcaactccttcctggaatccttccagggcttctttgtgtctgtgttctactgtttcctcaatagtgaggtccgttctgccatccggaagaggtggcaccggtggcaggacaagcactcgatccgtgcccgagtggcccgtgccatgtccatccccacctccccaacccgtgtcagctttcacagcatcaagcagtccacagcagtctga

SEQ ID NO: 122499 - DNA, 2399 bp, Homo sapiens
  Payload ID: 3994
  Gene Symbol: CRHR1
  Gene Name: corticotropin releasing hormone receptor 1
  Uniprot ID: P34998
  ENST ID: ENST00000398285
  CDS Start-End: 1-1335
atgggagggcacccgcagctccgtctcgtcaaggcccttctccttctggggctgaaccccgtctctgcctccctccaggaccagcactgcgagagcctgtccctggccagcaacatctcaggactgcagtgcaacgcatccgtggacctcattggcacctgctggccccgcagccctgcggggcagctagtggttcggccctgccctgcctttttctatggtgtccgctacaataccacaaacaatggctaccgggagtgcctggccaatggcagctgggccgcccgcgtgaattactccgagtgccaggagatcctcaatgaggagaaaaaaagcaaggtgcactaccatgtcgcagtcatcatcaactacctgggccactgtatctccctggtggccctcctggtggcctttgtcctctttctgcggctcaggccaggctgcacccattggggtgaccaggcagatggagccctggaggtgggggctccatggagtggtgccccatttcaggttcgaaggagcatccggtgcctgcgaaacatcatccactggaacctcatctccgccttcatcctgcgcaacgccacctggttcgtggtccagctaaccatgagccccgaggtccaccagagcaacgtgggctggtgcaggttggtgacagccgcctacaactacttccatgtgaccaacttcttctggatgttcggcgagggctgctacctgcacacagccatcgtgctcacctactccactgaccggctgcgcaaatggatgttcatctgcattggctggggtgtgcccttccccatcattgtggcctgggccattgggaagctgtactacgacaatgagaagtgctggtttggcaaaaggcctggggtgtacaccgactacatctaccagggccccatgatcctggtcctgctgatcaatttcatcttccttttcaacatcgtccgcatcctcatgaccaagctccgggcatccaccacgtctgagaccattcagtacaggaaggctgtgaaagccactctggtgctgctgcccctcctgggcatcacctacatgctgttcttcgtcaatcccggggaggatgaggtctcccgggtcgtcttcatctacttcaactccttcctggaatccttccagggcttctttgtgtctgtgttctactgtttcctcaatagtgaggtccgttctgccatccggaagaggtggcaccggtggcaggacaagcactcgatccgtgcccgagtggcccgtgccatgtccatccccacctccccaacccgtgtcagctttcacagcatcaagcagtccacagcagtctgagctggcaggtcatggagcagcccccaaagagctgtggctggggggatgacggccaggctccctgaccaccctgcctgtggaggtgacctgttaggtctcatgcccactcccccaggagcagctggcactgacagcctgggggggccgctctccccctgcagccgtgcaggactctagctcatgagtggaaagtcacctacaggactgggccgggcccagggcctctggcttccctgcccaatcctccctggagaagggacatgggaatgaattgaaatggggcgctggacacctacagcagcacgcatgtccctccaaggctgtcttctcccagagcacaagaaggccagcccactgggccctggggctgccctcggcaaccgtggggaggccatttgctgccctggggcatcatgggcaactcgtgacagcctctgactcaccacgatgacgcctctggacctcggtgatgccttccgacaccactgggaaccaagggccctcactcaggaaccctggagacagaagtcaggtgtcatcatcagacttgcggccacagcactagagtcacccccccaggcctccagaaccttactggcactgtggcactgccaccagcaatgccctgccttgctgccttcaccctgaacatttagtaccctgcaggccaggccagcttcccctcacttaaccaccccataccagtcacctcctgctccttttcctcttttgtgagaagatgggggctggagggggcagagtggcctgtgagcaagagccaggggtgtcccagtcccagcctctggggcagagcttgtagccctggatggcctctggggcaggaccactagctaagcaagccaggagaagacccctgcccaagtggctcttgggacaacgtgctgcttacactccaggtgtggaccggccgcagcccccactgacctgcccatgtccagagggactggacagccagggcagggctttggggggcactagaagatgagggtgtcggctgtgaggcgggtggctggtataaataatatttatcttttcaaccagca

SEQ ID NO: 122500 - DNA, 1272 bp, Homo sapiens
  Payload ID: 3994
  Gene Symbol: CRHR1
  Gene Name: corticotropin releasing hormone receptor 1
  ENST ID: ENST00000535778
  CDS Start-End: 1-157
gtgctggtttggcaaaaggcctggggtgtacaccgactacatctaccagggccccatgatcctggtcctgctggaaggctgtgaaagccactctggtgctgctgcccctcctgggcatcacctacatgctgttcttcgtcaatcccggggaggatgaggtctcccgggtcgtcttcatctacttcaactccttcctggaatccttccagggcttctttgtgtctgtgttctactgtttcctcaatagtgaggtccgttctgccatccggaagaggtggcaccggtggcaggacaagcactcgatccgtgcccgagtggcccgtgccatgtccatccccacctccccaacccgtgtcagctttcacagcatcaagcagtccacagcagtctgagctggcaggtcatggagcagcccccaaagagctgtggctggggggatgacggccaggctccctgaccaccctgcctgtggaggtgacctgttaggtctcatgcccactcccccaggagcagctggcactgacagcctgggggggccgctctccccctgcagccgtgcaggactctagctcatgagtggaaagtcacctacaggactgggccgggcccagggcctctggcttccctgcccaatcctccctggagaagggacatgggaatgaattgaaatggggcgctggacacctacagcagcacgcatgtccctccaaggctgtcttctcccagagcacaagaaggccagcccactgggccctggggctgccctcggcaaccgtggggaggccatttgctgccctggggcatcatgggcaactcgtgacagcctctgactcaccacgatgacgcctctggacctcggtgatgccttccgacaccactgggaaccaagggccctcactcaggaaccctggagacagaagtcaggtgtcatcatcagacttgcggccacagcactagagtcacccccccaggcctccagaaccttactggcactgtggcactgccaccagcaatgccctgccttgctgccttcaccctgaacatttagtaccctgcaggccaggccagcttcccctcacttaaccaccccataccagtcacctcctgctccttttcctcttttgtgagaagatgggggctggagggggcagagtggcctgtgagcaagagccaggggtgtcccagtcccagcctctggggcagagcttgtagccctggatggcctctggggcaggaccactagctaagcaagccaggagaagacccctgccc

SEQ ID NO: 122501 - DNA, 1206 bp, Homo sapiens
  Payload ID: 3994
  Gene Symbol: CRHR1
  Gene Name: corticotropin releasing hormone receptor 1
  Uniprot ID: P34998
  ENST ID: ENST00000577353
  CDS Start-End: 1-1206
atgggagggcacccgcagctccgtctcgtcaaggcccttctccttctggggctgaaccccgtctctgcctccctccaggaccagcactgcgagagcctgtccctggccagcaacatctcaggactgcagtgcaacgcatccgtggacctcattggcacctgctggccccgcagccctgcggggcagctagtggttcggccctgccctgcctttttctatggtgtccgctacaataccacaaacaatggctaccgggagtgcctggccaatggcagctgggccgcccgcgtgaattactccgagtgccaggagatcctcaatgaggagaaaaaaagcaaggtgcactaccatgtcgcagtcatcatcaactacctgggccactgtatctccctggtggccctcctggtggcctttgtcctctttctgcggctcaggagcatccggtgcctgcgaaacatcatccactggaacctcatctccgccttcatcctgcgcaacgccacctggttcgtggtccagctaaccatgagccccgaggtccaccagagcaacgtgggctggtgcaggttggtgacagccgcctacaactacttccatgtgaccaacttcttctggatgttcggcgagggctgctacctgcacacagccatcgtgctcacctactccactgaccggctgcgcaaatggatgttcatctgcattggctggggtgtgcccttccccatcattgtggcctgggccattgggaagctgtactacgacaatgagaagtgctggtttggcaaaaggcctggggtgtacaccgactacatctaccagggccccatgatcctggtcctgctgatcaatttcatcttccttttcaacatcgtccgcatcctcatgaccaagctccgggcatccaccacgtctgagaccattcagtacaggaaggctgtgaaagccactctggtgctgctgcccctcctgggcatcacctacatgctgttcttcgtcaatcccggggaggatgaggtctcccgggtcgtcttcatctacttcaactccttcctggaatccttccaggtccgttctgccatccggaagaggtggcaccggtggcaggacaagcactcgatccgtgcccgagtggcccgtgccatgtccatccccacctccccaacccgtgtcagctttcacagcatcaagcagtccacagcagtctga

SEQ ID NO: 122502 - DNA, 777 bp, Homo sapiens
  Payload ID: 3994
  Gene Symbol: CRHR1
  Gene Name: corticotropin releasing hormone receptor 1
  ENST ID: ENST00000583888
  CDS Start-End: 1-459
tatggtgtccgctacaataccacaaacaatggctaccgggagtgcctggccaatggcagctgggccgcccgcgtgaattactccgagtgccaggagatcctcaatgaggagaaaaaaagcaaggtgcactaccatgtcgcagtcatcatcaactacctgggccactgtatctccctggtggccctcctggtggcctttgtcctctttctgcggctcaggagcatccggtgcctgcgaaacatcatccactggaacctcatctccgccttcatcctgcgcaacgccacctggttcgtggtccagctaaccatgagccccgaggtccaccagagcaacgtggtgtgcccttccccatcattgtggcctgggccattgggaagctgtactacgacaatgagaagtgctggtttggcaaaaggcctggggtgtacaccgactacatctaccagggccccatgatcctggtcctgctgatcaatttcatcttccttttcaacatcgtccgcatcctcatgaccaagctccgggcatccaccacgtctgagaccattcagtacaggtccgttctgccatccggaagaggtggcaccggtggcaggacaagcactcgatccgtgcccgagtggcccgtgccatgtccatccccacctccccaacccgtgtcagctttcacagcatcaagcagtccacagcagtctgagctggcaggtcatggagcagcccccaaagagctgtggctggggggatgacggccaggctccctgaccaccctgcctg

SEQ ID NO: 122503 - DNA, 223 bp, Homo sapiens
  Payload ID: 3994
  Gene Symbol: CRHR1
  Gene Name: corticotropin releasing hormone receptor 1
  ENST ID: ENST00000580876
  CDS Start-End: 1-223
gtgctggtttggcaaaaggcctggggtgtacaccgactacatctaccagggccccatgatcctggtcctgctgatcaatttcatcttccttttcaacatcgtccgcatcctcatgaccaagctccgggcatccaccacgtctgagaccattcagtacagggcttctttgtgtctgtgttctactgtttcctcaatagtgaggtccgttctgccatccggaaga

SEQ ID NO: 122504 - DNA, 479 bp, Homo sapiens
  Payload ID: 3994
  Gene Symbol: CRHR1
  Gene Name: corticotropin releasing hormone receptor 1
  ENST ID: ENST00000580955
  CDS Start-End: 1-281
tgtccctggccagcaacatctcaggactgcagtgcaacgcatccgtggacctcattggcacctgctggccccgcagccctgcggggcagctagtggttcggccctgccctgcctttttctatggtgtccgctacaataccacaaacaatggctaccgggagtgcctggccaatggcagctgggccgcccgcgtgaattactccgagtgccaggagatcctcaatgaggaggagcctgggcctcaggcacagcctgggagagcacaccgtggtgggacatgaaacggattctgggggtctggtttgtggaccaaggttcactgctcaccgtgtggggagagaaaaaaagcaaggtgcactaccatgtcgcagtcatcatcaactacctgggccactgtatctccctggtggccctcctggtggcctttgtcctctttctgcggctcaggagcatccggtgcctgcgaaacatcatccact

SEQ ID NO: 122505 - DNA, 2577 bp, Homo sapiens
  Payload ID: 3994
  Gene Symbol: CRHR1
  Gene Name: corticotropin releasing hormone receptor 1
  Uniprot ID: P34998
  ENST ID: ENST00000618382
  CDS Start-End: 266-1513
ggcgaggccggcaagaggcggccgcgggccgggctgcgtcgggaaacggcggccagacttccccgggaaggggcgagcgagagccgggccgggccgggccgggccgcggggccgggaagcgccgagccgggcatctcctcaccaggcagcgaccgaggagcccggccgcccaccccgtgccgcccgagcccgcagccgcccgccggtccctctgggatgtccgtaggacccgggcattcaggacggtagccgagcgagcccgaggatgggagggcacccgcagctccgtctcgtcaaggcccttctccttctggggctgaaccccgtctctgcctccctccaggaccagcactgcgagagcctgtccctggccagcaacatctcaggactgcagtgcaacgcatccgtggacctcattggcacctgctggccccgcagccctgcggggcagctagtggttcggccctgccctgcctttttctatggtgtccgctacaataccacaaacaatggctaccgggagtgcctggccaatggcagctgggccgcccgcgtgaattactccgagtgccaggagatcctcaatgaggagaaaaaaagcaaggtgcactaccatgtcgcagtcatcatcaactacctgggccactgtatctccctggtggccctcctggtggcctttgtcctctttctgcggctcaggagcatccggtgcctgcgaaacatcatccactggaacctcatctccgccttcatcctgcgcaacgccacctggttcgtggtccagctaaccatgagccccgaggtccaccagagcaacgtgggctggtgcaggttggtgacagccgcctacaactacttccatgtgaccaacttcttctggatgttcggcgagggctgctacctgcacacagccatcgtgctcacctactccaccgaccggctgcgcaaatggatgttcatctgcattggctggggtgtgcccttccccatcattgtggcctgggccattgggaagctgtactacgacaatgagaagtgttggtttggcaaaaggcctggggtgtacaccgactacatctaccagggccccatgatcctggtcctgctgatcaatttcatcttccttttcaacatcgtccgcatcctcatgaccaagctccgggcatccaccacgtctgagaccattcagtacaggaaggctgtgaaagccactctggtgctgctgcccctcctgggcatcacctacatgctgttcttcgtcaatcccggggaggatgaggtctcccgggtcgtcttcatctacttcaactccttcctggaatccttccagggcttctttgtgtctgtgttctactgtttcctcaatagtgaggtccgttctgccatccggaagaggtggcaccggtggcaggacaagcactcgatccgtgcccgagtggcccgtgccatgtccatccccacctccccaacccgtgtcagctttcacagcatcaagcagtccacagcagtctgagctggcaggtcatggagcagcccccaaacagctgtggctggggggatgacggccaggctccctgaccaccctgcctgtggaggtgacctgttaggtctcatgcccactcccccaggagcagctggcactgacagcctggggggggccgctcttcccctgcagccgtgcaggactctagctcatgagtggaaagtcacctacaggactgggccgggcccagggcctctggcttccctgcccaatcctccctggagaagggacatgggaatgaattgaaatggggcgctggacacctacagcagcacgcatgtccctccaaggctgccttctcccagagcacaagaaggccagcccactggggcctggggctgccctcggcaaccgtggggaggccatttgctgccctggggcatcatgggcaactcgtgacagcctctgactcaccacgatgatgcctctggacctcggtgatgccttccgacaccactgggaaccaagggccctcgctcaggaaccctggagacagaagtcaggtgtcatcatcagacttgcggccacagcactagagtcacccccccaggcctccagaacctcactggcactgtggcactgccaccagcaatgccctgccttgctgccttcaccctgaacatttactaccctgcaggccaggccagcttcccctcacttaaccaccccacaccagtcacctcctgctccttttcctcttttgtgagaagatgggggctggagggggcagagtggcctgtgagcaagagccaggggtgtcccagtcccagcctctggggcagagcttgtagccctggatggcctctggggcaggaccactagctaagcaagccaggagaagacccctgcccaagtggctcttgggacaacgtgctgcttacactccaggtgtggaccggccgcagcccccactgacctgcccatgtccagagggactggacagccagggcagggctttggggggcactagaagatgagggtgtcggctgtgaggcgggtggctggtataaataatatttatcttttcaaccagc

SEQ ID NO: 122506 - DNA, 1146 bp, Homo sapiens; identical to SEQ ID NO: 122498
  Payload ID: 3994
  Gene Symbol: CRHR1
  Gene Name: corticotropin releasing hormone receptor 1
  Uniprot ID: P34998
  ENST ID: ENST00000616748
  CDS Start-End: 19-1146

SEQ ID NO: 122507 - DNA, 2370 bp, Homo sapiens
  Payload ID: 3994
  Gene Symbol: CRHR1
  Gene Name: corticotropin releasing hormone receptor 1
  ENST ID: ENST00000618144
  CDS Start-End: 266-730
ggcgaggccggcaagaggcggccgcgggccgggctgcgtcgggaaacggcggccagacttccccgggaaggggcgagcgagagccgggccgggccgggccgggccgcggggccgggaagcgccgagccgggcatctcctcaccaggcagcgaccgaggagcccggccgcccaccccgtgccgcccgagcccgcagccgcccgccggttcctctgggatgtccgtaggacccgggcattcaggacggtagccgagcgagcccgaggatgggagggcacccgcagctccgtctcgtcaaggcccttctccttctggggctgaaccccgtctctgcctccctccaggaccagcactgcgagagcctgtccctggccagcaacatctcagaaaaaaagcaaggtgcactaccatgtcgcagtcatcatcaactacctgggccactgtatctccctggtggccctcctggtggcctttgtcctctttctgcggctcaggagcatccggtgcctgcgaaacatcatccactggaacctcatctccgccttcatcctgcgcaacgccacctggttcgtggtccagctaaccatgagccccgaggtccaccagagcaacgtgggctggtgcaggttggtgacagccgcctacaactacttccatgtgaccaacttcttctggatgttcggcgagggctgctacctgcacacagccatcgtgctcacctactccactgaccggctgcgcaaatggatgttcatctgcattggctggggtgtgcccttccccatcattgtggcctgggccattgggaagctgtactacgacaatgagaagtgctggtttggcaaaaggcctggggtgtacaccgactacatctaccagggccccatgatcctggtcctgctgatcaatttcatcttccttttcaacatcgtccgcatcctcatgaccaagctccgggcatccaccacgtctgagaccattcagtacaggaaggctgtgaaagccactctggtgctgctgcccctcctgggcatcacctacatgctgttcttcgtcaatcccggggaggatgaggtctcccgggtcgtcttcatctacttcaactccttcctggaatccttccagggcttctttgtgtctgtgttctactgtttcctcaatagtgaggtccgttctgccatccggaagaggtggcaccggtggcaggacaagcactcgatccgtgcccgagtggcccgtgccatgtccatccccacctccccaacccgtgtcagctttcacagcatcaagcagtccacagcagtctgagctggcaggtcatggagcagcccccaaagagctgtggctggggggatgacggccaggctccctgaccaccctgcctgtggaggtgacctgttaggtctcatgcccactcccccaggagcagctggcactgacagcctgggggggccgctctccccctgcagccgtgcaggactctagctcatgagtggaaagtcacctacaggactgggccgggcccagggcctctggcttccctgcccaatcctccctggagaagggacatgggaatgaattgaaatggggcgctggacacctacagcagcacgcatgtccctccaaggctgtcttctcccagagcacaagaaggccagcccactgggccctggggctgccctcggcaaccgtggggaggccatttgctgccctggggcatcatgggcaactcgtgacagcctctgactcaccacgatgacgcctctggacctcggtgatgccttccgacaccactgggaaccaagggccctcactcaggaaccctggagacagaagtcaggtgtcatcatcagacttgcggccacagcactagagtcacccccccaggcctccagaaccttactggcactgtggcactgccaccagcaatgccctgccttgctgccttcaccctgaacatttagtaccctgcaggccaggccagcttcccctcacttaaccaccccataccagtcacctcctgctccttttcctcttttgtgagaagatgggggctggagggggcagagtggcctgtgagcaagagccaggggtgtcccagtcccagcctctggggcagagcttgtagccctggatggcctctggggcaggaccactagctaagcaagccaggagaagacccctgcccaagtggctcttgggacaacgtgctgcttacactccaggtgtggaccggccgcagcccccactgacctgcccatgtccagagggactggacagccagggcagggctttggggggcactagaagatgagggtgtcggctgtgaggcgggtggctggtataaataatatttatcttttcaaccagc

SEQ ID NO: 122508 - DNA, 2371 bp, Homo sapiens
  Payload ID: 3994
  Gene Symbol: CRHR1
  Gene Name: corticotropin releasing hormone receptor 1
  ENST ID: ENST00000617446
  CDS Start-End: 266-826
ggcgaggccggcaagaggcggccgcgggccgggctgcgtcgggaaacggcggccagacttccccgggaaggggcgagcgagagccgggccgggccgggccgggccgcggggccgggaagcgccgagccgggcatctcctcaccaggcagcgaccgaggagcccggccgcccaccccgtgccgcccgagcccgcagccgcccgccggtccctctgggatgtccgtaggacccgggcattcaggacggtagccgagcgagcccgaggatgggagggcacccgcagctccgtctcgtcaaggcccttctccttctggggctgaaccccgtctctgcctccctccaggaccagcactgcgagagcctgtccctggccagcaacatctcagaaaaaaagcaaggtgcactaccatgtcgcagtcatcatcaactacctgggccactgtatctccctggtggccctcctggtggcctttgtcctctttctgcggctcaggagcatccggtgcctgcgaaacatcatccactggaacctcatctccgccttcatcctgcgcaacgccacctggttcgtggtccagctaaccatgagccccgaggtccaccagagcaacgtgggctggtgcaggttggtgacagccgcctacaactacttccatgtgaccaacttcttctggatgttcggcgagggctgctacctgcacacagccatcgtgctcacctactccaccgaccggctgcgcaaatggatgttcatctgcattggctggggtgtgcccttccccatcattgtggcctgggccattgggaagctgtactacgacaatgagaagtgttggtttggcaaaaggcctggggtgtacaccgactacatctaccagggccccatgatcctggtcctgctgatcaatttcatcttccttttcaacatcgtccgcatcctcatgaccaagctccgggcatccaccacgtctgagaccattcagtacaggaaggctgtgaaagccactctggtgctgctgcccctcctgggcatcacctacatgctgttcttcgtcaatcccggggaggatgaggtctcccgggtcgtcttcatctacttcaactccttcctggaatccttccagggcttctttgtgtctgtgttctactgtttcctcaatagtgaggtccgttctgccatccggaagaggtggcaccggtggcaggacaagcactcgatccgtgcccgagtggcccgtgccatgtccatccccacctccccaacccgtgtcagctttcacagcatcaagcagtccacagcagtctgagctggcaggtcatggagcagcccccaaacagctgtggctggggggatgacggccaggctccctgaccaccctgcctgtggaggtgacctgttaggtctcatgcccactcccccaggagcagctggcactgacagcctggggggggccgctcttcccctgcagccgtgcaggactctagctcatgagtggaaagtcacctacaggactgggccgggcccagggcctctggcttccctgcccaatcctccctggagaagggacatgggaatgaattgaaatggggcgctggacacctacagcagcacgcatgtccctccaaggctgccttctcccagagcacaagaaggccagcccactggggcctggggctgccctcggcaaccgtggggaggccatttgctgccctggggcatcatgggcaactcgtgacagcctctgactcaccacgatgatgcctctggacctcggtgatgccttccgacaccactgggaaccaagggccctcgctcaggaaccctggagacagaagtcaggtgtcatcatcagacttgcggccacagcactagagtcacccccccaggcctccagaacctcactggcactgtggcactgccaccagcaatgccctgccttgctgccttcaccctgaacatttactaccctgcaggccaggccagcttcccctcacttaaccaccccacaccagtcacctcctgctccttttcctcttttgtgagaagatgggggctggagggggcagagtggcctgtgagcaagagccaggggtgtcccagtcccagcctctggggcagagcttgtagccctggatggcctctggggcaggaccactagctaagcaagccaggagaagacccctgcccaagtggctcttgggacaacgtgctgcttacactccaggtgtggaccggccgcagcccccactgacctgcccatgtccagagggactggacagccagggcagggctttggggggcactagaagatgagggtgtcggctgtgaggcgggtggctggtataaataatatttatcttttcaaccagc

SEQ ID NO: 122509 - DNA, 2622 bp, Homo sapiens
  Payload ID: 3994
  Gene Symbol: CRHR1
  Gene Name: corticotropin releasing hormone receptor 1
  ENST ID: ENST00000614143
  CDS Start-End: 266-1558
ggcgaggccggcaagaggcggccgcgggccgggctgcgtcgggaaacggcggccagacttccccgggaaggggcgagcgagagccgggccgggccgggccgggccgcggggccgggaagcgccgagccgggcatctcctcaccaggcagcgaccgaggagcccggccgcccaccccgtgccgcccgagcccgcagccgcccgccggtccctctgggatgtccgtaggacccgggcattcaggacggtagccgagcgagcccgaggatgggagggcacccgcagctccgtctcgtcaaggcccttctccttctggggctgaaccccgtctctgcctccctccaggaccagcactgcgagagcctgtccctggccagcaacatctcaggactgcagtgcaacgcatccgtggacctcattggcacctgctggccccgcagccctgcggggcagctagtggttcggccctgccctgcctttttctatggtgtccgctacaataccacaaacaatggctaccgggagtgcctggccaatggcagctgggccgcccgcgtgaattactccgagtgccaggagatcctcaatgaggagaaaaaaagcaaggtgcactaccatgtcgcagtcatcatcaactacctgggccactgtatctccctggtggccctcctggtggcctttgtcctctttctgcggctcaggccaggctgcacccattggggtgaccaggcagatggagccctggaggtgggggctccatggagtggtgccccatttcaggttcgaaggagcatccggtgcctgcgaaacatcatccactggaacctcatctccgccttcatcctgcgcaacgccacctggttcgtggtccagctaaccatgagccccgaggtccaccagagcaacgtgggctggtgcaggttggtgacagccgcctacaactacttccatgtgaccaacttcttctggatgttcggcgagggctgctacctgcacacagccatcgtgctcacctactccaccgaccggctgcgcaaatggatgttcatctgcattggctggggtgtgcccttccccatcattgtggcctgggccattgggaagctgtactacgacaatgagaagtgttggtttggcaaaaggcctggggtgtacaccgactacatctaccagggccccatgatcctggtcctgctgatcaatttcatcttccttttcaacatcgtccgcatcctcatgaccaagctccgggcatccaccacgtctgagaccattcagtacaggaaggctgtgaaagccactctggtgctgctgcccctcctgggcatcacctacatgctgttcttcgtcaatcccggggaggatgaggtctcccgggtcgtcttcatctacttcaactccttcctggaatccttccaggtccgttctgccatccggaagaggtggcaccggtggcaggacaagcactcgatccgtgcccgagtggcccgtgccatgtccatccccacctccccaacccgtgtcagctttcacagcatcaagcagtccacagcagtctgagctggcaggtcatggagcagcccccaaacagctgtggctggggggatgacggccaggctccctgaccaccctgcctgtggaggtgacctgttaggtctcatgcccactcccccaggagcagctggcactgacagcctggggggggccgctcttcccctgcagccgtgcaggactctagctcatgagtggaaagtcacctacaggactgggccgggcccagggcctctggcttccctgcccaatcctccctggagaagggacatgggaatgaattgaaatggggcgctggacacctacagcagcacgcatgtccctccaaggctgccttctcccagagcacaagaaggccagcccactggggcctggggctgccctcggcaaccgtggggaggccatttgctgccctggggcatcatgggcaactcgtgacagcctctgactcaccacgatgatgcctctggacctcggtgatgccttccgacaccactgggaaccaagggccctcgctcaggaaccctggagacagaagtcaggtgtcatcatcagacttgcggccacagcactagagtcacccccccaggcctccagaacctcactggcactgtggcactgccaccagcaatgccctgccttgctgccttcaccctgaacatttactaccctgcaggccaggccagcttcccctcacttaaccaccccacaccagtcacctcctgctccttttcctcttttgtgagaagatgggggctggagggggcagagtggcctgtgagcaagagccaggggtgtcccagtcccagcctctggggcagagcttgtagccctggatggcctctggggcaggaccactagctaagcaagccaggagaagacccctgcccaagtggctcttgggacaacgtgctgcttacactccaggtgtggaccggccgcagcccccactgacctgcccatgtccagagggactggacagccagggcagggctttggggggcactagaagatgagggtgtcggctgtgaggcgggtggctggtataaataatatttatcttttcaaccagc

SEQ ID NO: 122510 - DNA, 2621 bp, Homo sapiens
  Payload ID: 3994
  Gene Symbol: CRHR1
  Gene Name: corticotropin releasing hormone receptor 1
  ENST ID: ENST00000616225
  CDS Start-End: 266-1558
ggcgaggccggcaagaggcggccgcgggccgggctgcgtcgggaaacggcggccagacttccccgggaaggggcgagcgagagccgggccgggccgggccgggccgcggggccgggaagcgccgagccgggcatctcctcaccaggcagcgaccgaggagcccggccgcccaccccgtgccgcccgagcccgcagccgcccgccggttcctctgggatgtccgtaggacccgggcattcaggacggtagccgagcgagcccgaggatgggagggcacccgcagctccgtctcgtcaaggcccttctccttctggggctgaaccccgtctctgcctccctccaggaccagcactgcgagagcctgtccctggccagcaacatctcaggactgcagtgcaacgcatccgtggacctcattggcacctgctggccccgcagccctgcggggcagctagtggttcggccctgccctgcctttttctatggtgtccgctacaataccacaaacaatggctaccgggagtgcctggccaatggcagctgggccgcccgcgtgaattactccgagtgccaggagatcctcaatgaggagaaaaaaagcaaggtgcactaccatgtcgcagtcatcatcaactacctgggccactgtatctccctggtggccctcctggtggcctttgtcctctttctgcggctcaggccaggctgcacccattggggtgaccaggcagatggagccctggaggtgggggctccatggagtggtgccccatttcaggttcgaaggagcatccggtgcctgcgaaacatcatccactggaacctcatctccgccttcatcctgcgcaacgccacctggttcgtggtccagctaaccatgagccccgaggtccaccagagcaacgtgggctggtgcaggttggtgacagccgcctacaactacttccatgtgaccaacttcttctggatgttcggcgagggctgctacctgcacacagccatcgtgctcacctactccactgaccggctgcgcaaatggatgttcatctgcattggctggggtgtgcccttccccatcattgtggcctgggccattgggaagctgtactacgacaatgagaagtgctggtttggcaaaaggcctggggtgtacaccgactacatctaccagggccccatgatcctggtcctgctgatcaatttcatcttccttttcaacatcgtccgcatcctcatgaccaagctccgggcatccaccacgtctgagaccattcagtacaggaaggctgtgaaagccactctggtgctgctgcccctcctgggcatcacctacatgctgttcttcgtcaatcccggggaggatgaggtctcccgggtcgtcttcatctacttcaactccttcctggaatccttccaggtccgttctgccatccggaagaggtggcaccggtggcaggacaagcactcgatccgtgcccgagtggcccgtgccatgtccatccccacctccccaacccgtgtcagctttcacagcatcaagcagtccacagcagtctgagctggcaggtcatggagcagcccccaaagagctgtggctggggggatgacggccaggctccctgaccaccctgcctgtggaggtgacctgttaggtctcatgcccactcccccaggagcagctggcactgacagcctgggggggccgctctccccctgcagccgtgcaggactctagctcatgagtggaaagtcacctacaggactgggccgggcccagggcctctggcttccctgcccaatcctccctggagaagggacatgggaatgaattgaaatggggcgctggacacctacagcagcacgcatgtccctccaaggctgtcttctcccagagcacaagaaggccagcccactgggccctggggctgccctcggcaaccgtggggaggccatttgctgccctggggcatcatgggcaactcgtgacagcctctgactcaccacgatgacgcctctggacctcggtgatgccttccgacaccactgggaaccaagggccctcactcaggaaccctggagacagaagtcaggtgtcatcatcagacttgcggccacagcactagagtcacccccccaggcctccagaaccttactggcactgtggcactgccaccagcaatgccctgccttgctgccttcaccctgaacatttagtaccctgcaggccaggccagcttcccctcacttaaccaccccataccagtcacctcctgctccttttcctcttttgtgagaagatgggggctggagggggcagagtggcctgtgagcaagagccaggggtgtcccagtcccagcctctggggcagagcttgtagccctggatggcctctggggcaggaccactagctaagcaagccaggagaagacccctgcccaagtggctcttgggacaacgtgctgcttacactccaggtgtggaccggccgcagcccccactgacctgcccatgtccagagggactggacagccagggcagggctttggggggcactagaagatgagggtgtcggctgtgaggcgggtggctggtataaataatatttatcttttcaaccagc

SEQ ID NO: 122511 - DNA, 2399 bp, Homo sapiens; identical to SEQ ID NO: 122499
  Payload ID: 3994
  Gene Symbol: CRHR1
  Gene Name: corticotropin releasing hormone receptor 1
  Uniprot ID: P34998
  ENST ID: ENST00000616274
  CDS Start-End: 1-1335

SEQ ID NO: 122512 - DNA, 2457 bp, Homo sapiens
  Payload ID: 3994
  Gene Symbol: CRHR1
  Gene Name: corticotropin releasing hormone receptor 1
  Uniprot ID: P34998
  ENST ID: ENST00000615345
  CDS Start-End: 266-1393
ggcgaggccggcaagaggcggccgcgggccgggctgcgtcgggaaacggcggccagacttccccgggaaggggcgagcgagagccgggccgggccgggccgggccgcggggccgggaagcgccgagccgggcatctcctcaccaggcagcgaccgaggagcccggccgcccaccccgtgccgcccgagcccgcagccgcccgccggtccctctgggatgtccgtaggacccgggcattcaggacggtagccgagcgagcccgaggatgggagggcacccgcagctccgtctcgtcaaggcccttctccttctggggctgaaccccgtctctgcctccctccaggaccagcactgcgagagcctgtccctggccagcaacatctcagacaatggctaccgggagtgcctggccaatggcagctgggccgcccgcgtgaattactccgagtgccaggagatcctcaatgaggagaaaaaaagcaaggtgcactaccatgtcgcagtcatcatcaactacctgggccactgtatctccctggtggccctcctggtggcctttgtcctctttctgcggctcaggagcatccggtgcctgcgaaacatcatccactggaacctcatctccgccttcatcctgcgcaacgccacctggttcgtggtccagctaaccatgagccccgaggtccaccagagcaacgtgggctggtgcaggttggtgacagccgcctacaactacttccatgtgaccaacttcttctggatgttcggcgagggctgctacctgcacacagccatcgtgctcacctactccaccgaccggctgcgcaaatggatgttcatctgcattggctggggtgtgcccttccccatcattgtggcctgggccattgggaagctgtactacgacaatgagaagtgttggtttggcaaaaggcctggggtgtacaccgactacatctaccagggccccatgatcctggtcctgctgatcaatttcatcttccttttcaacatcgtccgcatcctcatgaccaagctccgggcatccaccacgtctgagaccattcagtacaggaaggctgtgaaagccactctggtgctgctgcccctcctgggcatcacctacatgctgttcttcgtcaatcccggggaggatgaggtctcccgggtcgtcttcatctacttcaactccttcctggaatccttccagggcttctttgtgtctgtgttctactgtttcctcaatagtgaggtccgttctgccatccggaagaggtggcaccggtggcaggacaagcactcgatccgtgcccgagtggcccgtgccatgtccatccccacctccccaacccgtgtcagctttcacagcatcaagcagtccacagcagtctgagctggcaggtcatggagcagcccccaaacagctgtggctggggggatgacggccaggctccctgaccaccctgcctgtggaggtgacctgttaggtctcatgcccactcccccaggagcagctggcactgacagcctggggggggccgctcttcccctgcagccgtgcaggactctagctcatgagtggaaagtcacctacaggactgggccgggcccagggcctctggcttccctgcccaatcctccctggagaagggacatgggaatgaattgaaatggggcgctggacacctacagcagcacgcatgtccctccaaggctgccttctcccagagcacaagaaggccagcccactggggcctggggctgccctcggcaaccgtggggaggccatttgctgccctggggcatcatgggcaactcgtgacagcctctgactcaccacgatgatgcctctggacctcggtgatgccttccgacaccactgggaaccaagggccctcgctcaggaaccctggagacagaagtcaggtgtcatcatcagacttgcggccacagcactagagtcacccccccaggcctccagaacctcactggcactgtggcactgccaccagcaatgccctgccttgctgccttcaccctgaacatttactaccctgcaggccaggccagcttcccctcacttaaccaccccacaccagtcacctcctgctccttttcctcttttgtgagaagatgggggctggagggggcagagtggcctgtgagcaagagccaggggtgtcccagtcccagcctctggggcagagcttgtagccctggatggcctctggggcaggaccactagctaagcaagccaggagaagacccctgcccaagtggctcttgggacaacgtgctgcttacactccaggtgtggaccggccgcagcccccactgacctgcccatgtccagagggactggacagccagggcagggctttggggggcactagaagatgagggtgtcggctgtgaggcgggtggctggtataaataatatttatcttttcaaccagc

SEQ ID NO: 122513 - DNA, 2490 bp, Homo sapiens
  Payload ID: 3994
  Gene Symbol: CRHR1
  Gene Name: corticotropin releasing hormone receptor 1
  ENST ID: ENST00000621969
  CDS Start-End: 483-1427
ggcgaggccggcaagaggcggccgcgggccgggctgcgtcgggaaacggcggccagacttccccgggaaggggcgagcgagagccgggccgggccgggccgggccgcggggccgggaagcgccgagccgggcatctcctcaccaggcagcgaccgaggagcccggccgcccaccccgtgccgcccgagcccgcagccgcccgccggttcctctgggatgtccgtaggacccgggcattcaggacggtagccgagcgagcccgaggatgggagggcacccgcagctccgtctcgtcaaggcccttctccttctggggctgaaccccgtctctgcctccctccaggaccagcactgcgagagcctgtccctggccagcaacatctcaggactgcagtgcaacgcatccgtggacctcattggcacctgctggccccgcagccctgcggggcagctagtggttcggccctgccctgcctttttctatggtgtccgctacaataccacaaaaaaaaagcaaggtgcactaccatgtcgcagtcatcatcaactacctgggccactgtatctccctggtggccctcctggtggcctttgtcctctttctgcggctcaggagcatccggtgcctgcgaaacatcatccactggaacctcatctccgccttcatcctgcgcaacgccacctggttcgtggtccagctaaccatgagccccgaggtccaccagagcaacgtgggctggtgcaggttggtgacagccgcctacaactacttccatgtgaccaacttcttctggatgttcggcgagggctgctacctgcacacagccatcgtgctcacctactccactgaccggctgcgcaaatggatgttcatctgcattggctggggtgtgcccttccccatcattgtggcctgggccattgggaagctgtactacgacaatgagaagtgctggtttggcaaaaggcctggggtgtacaccgactacatctaccagggccccatgatcctggtcctgctgatcaatttcatcttccttttcaacatcgtccgcatcctcatgaccaagctccgggcatccaccacgtctgagaccattcagtacaggaaggctgtgaaagccactctggtgctgctgcccctcctgggcatcacctacatgctgttcttcgtcaatcccggggaggatgaggtctcccgggtcgtcttcatctacttcaactccttcctggaatccttccagggcttctttgtgtctgtgttctactgtttcctcaatagtgaggtccgttctgccatccggaagaggtggcaccggtggcaggacaagcactcgatccgtgcccgagtggcccgtgccatgtccatccccacctccccaacccgtgtcagctttcacagcatcaagcagtccacagcagtctgagctggcaggtcatggagcagcccccaaagagctgtggctggggggatgacggccaggctccctgaccaccctgcctgtggaggtgacctgttaggtctcatgcccactcccccaggagcagctggcactgacagcctgggggggccgctctccccctgcagccgtgcaggactctagctcatgagtggaaagtcacctacaggactgggccgggcccagggcctctggcttccctgcccaatcctccctggagaagggacatgggaatgaattgaaatggggcgctggacacctacagcagcacgcatgtccctccaaggctgtcttctcccagagcacaagaaggccagcccactgggccctggggctgccctcggcaaccgtggggaggccatttgctgccctggggcatcatgggcaactcgtgacagcctctgactcaccacgatgacgcctctggacctcggtgatgccttccgacaccactgggaaccaagggccctcactcaggaaccctggagacagaagtcaggtgtcatcatcagacttgcggccacagcactagagtcacccccccaggcctccagaaccttactggcactgtggcactgccaccagcaatgccctgccttgctgccttcaccctgaacatttagtaccctgcaggccaggccagcttcccctcacttaaccaccccataccagtcacctcctgctccttttcctcttttgtgagaagatgggggctggagggggcagagtggcctgtgagcaagagccaggggtgtcccagtcccagcctctggggcagagcttgtagccctggatggcctctggggcaggaccactagctaagcaagccaggagaagacccctgcccaagtggctcttgggacaacgtgctgcttacactccaggtgtggaccggccgcagcccccactgacctgcccatgtccagagggactggacagccagggcagggctttggggggcactagaagatgagggtgtcggctgtgaggcgggtggctggtataaataatatttatcttttcaaccagc

SEQ ID NO: 122514 - DNA, 2535 bp, Homo sapiens
  Payload ID: 3994
  Gene Symbol: CRHR1
  Gene Name: corticotropin releasing hormone receptor 1
  Uniprot ID: P34998
  ENST ID: ENST00000617905
  CDS Start-End: 226-1473
gggaaacggcggccagacttccccgggaaggggcgagcgagagccgggccgggccgggccgggccgcggggccgggaagcgccgagccgggcatctcctcaccaggcagcgaccgaggagcccggccgcccaccccgtgccgcccgagcccgcagccgcccgccggttcctctgggatgtccgtaggacccgggcattcaggacggtagccgagcgagcccgaggatgggagggcacccgcagctccgtctcgtcaaggcccttctccttctggggctgaaccccgtctctgcctccctccaggaccagcactgcgagagcctgtccctggccagcaacatctcaggactgcagtgcaacgcatccgtggacctcattggcacctgctggccccgcagccctgcggggcagctagtggttcggccctgccctgcctttttctatggtgtccgctacaataccacaaacaatggctaccgggagtgcctggccaatggcagctgggccgcccgcgtgaattactccgagtgccaggagatcctcaatgaggagaaaaaaagcaaggtgcactaccatgtcgcagtcatcatcaactacctgggccactgtatctccctggtggccctcctggtggcctttgtcctctttctgcggctcaggagcatccggtgcctgcgaaacatcatccactggaacctcatctccgccttcatcctgcgcaacgccacctggttcgtggtccagctaaccatgagccccgaggtccaccagagcaacgtgggctggtgcaggttggtgacagccgcctacaactacttccatgtgaccaacttcttctggatgttcggcgagggctgctacctgcacacagccatcgtgctcacctactccactgaccggctgcgcaaatggatgttcatctgcattggctggggtgtgcccttccccatcattgtggcctgggccattgggaagctgtactacgacaatgagaagtgctggtttggcaaaaggcctggggtgtacaccgactacatctaccagggccccatgatcctggtcctgctgatcaatttcatcttccttttcaacatcgtccgcatcctcatgaccaagctccgggcatccaccacgtctgagaccattcagtacaggaaggctgtgaaagccactctggtgctgctgcccctcctgggcatcacctacatgctgttcttcgtcaatcccggggaggatgaggtctcccgggtcgtcttcatctacttcaactccttcctggaatccttccagggcttctttgtgtctgtgttctactgtttcctcaatagtgaggtccgttctgccatccggaagaggtggcaccggtggcaggacaagcactcgatccgtgcccgagtggcccgtgccatgtccatccccacctccccaacccgtgtcagctttcacagcatcaagcagtccacagcagtctgagctggcaggtcatggagcagcccccaaagagctgtggctggggggatgacggccaggctccctgaccaccctgcctgtggaggtgacctgttaggtctcatgcccactcccccaggagcagctggcactgacagcctgggggggccgctctccccctgcagccgtgcaggactctagctcatgagtggaaagtcacctacaggactgggccgggcccagggcctctggcttccctgcccaatcctccctggagaagggacatgggaatgaattgaaatggggcgctggacacctacagcagcacgcatgtccctccaaggctgtcttctcccagagcacaagaaggccagcccactgggccctggggctgccctcggcaaccgtggggaggccatttgctgccctggggcatcatgggcaactcgtgacagcctctgactcaccacgatgacgcctctggacctcggtgatgccttccgacaccactgggaaccaagggccctcactcaggaaccctggagacagaagtcaggtgtcatcatcagacttgcggccacagcactagagtcacccccccaggcctccagaaccttactggcactgtggcactgccaccagcaatgccctgccttgctgccttcaccctgaacatttagtaccctgcaggccaggccagcttcccctcacttaaccaccccataccagtcacctcctgctccttttcctcttttgtgagaagatgggggctggagggggcagagtggcctgtgagcaagagccaggggtgtcccagtcccagcctctggggcagagcttgtagccctggatggcctctggggcaggaccactagctaagcaagccaggagaagacccctgcccaagtggctcttgggacaacgtgctgcttacactccaggtgtggaccggccgcagcccccactgacctgcccatgtccagagggactggacagccagggcagggctttggggggcactagaagatgagggtgtcggctgtgaggcgggtggctggtataaataatatttatcttttcaaccag

SEQ ID NO: 122515 - DNA, 2491 bp, Homo sapiens
  Payload ID: 3994
  Gene Symbol: CRHR1
  Gene Name: corticotropin releasing hormone receptor 1
  ENST ID: ENST00000611599
  CDS Start-End: 483-1427
ggcgaggccggcaagaggcggccgcgggccgggctgcgtcgggaaacggcggccagacttccccgggaaggggcgagcgagagccgggccgggccgggccgggccgcggggccgggaagcgccgagccgggcatctcctcaccaggcagcgaccgaggagcccggccgcccaccccgtgccgcccgagcccgcagccgcccgccggtccctctgggatgtccgtaggacccgggcattcaggacggtagccgagcgagcccgaggatgggagggcacccgcagctccgtctcgtcaaggcccttctccttctggggctgaaccccgtctctgcctccctccaggaccagcactgcgagagcctgtccctggccagcaacatctcaggactgcagtgcaacgcatccgtggacctcattggcacctgctggccccgcagccctgcggggcagctagtggttcggccctgccctgcctttttctatggtgtccgctacaataccacaaaaaaaaagcaaggtgcactaccatgtcgcagtcatcatcaactacctgggccactgtatctccctggtggccctcctggtggcctttgtcctctttctgcggctcaggagcatccggtgcctgcgaaacatcatccactggaacctcatctccgccttcatcctgcgcaacgccacctggttcgtggtccagctaaccatgagccccgaggtccaccagagcaacgtgggctggtgcaggttggtgacagccgcctacaactacttccatgtgaccaacttcttctggatgttcggcgagggctgctacctgcacacagccatcgtgctcacctactccaccgaccggctgcgcaaatggatgttcatctgcattggctggggtgtgcccttccccatcattgtggcctgggccattgggaagctgtactacgacaatgagaagtgttggtttggcaaaaggcctggggtgtacaccgactacatctaccagggccccatgatcctggtcctgctgatcaatttcatcttccttttcaacatcgtccgcatcctcatgaccaagctccgggcatccaccacgtctgagaccattcagtacaggaaggctgtgaaagccactctggtgctgctgcccctcctgggcatcacctacatgctgttcttcgtcaatcccggggaggatgaggtctcccgggtcgtcttcatctacttcaactccttcctggaatccttccagggcttctttgtgtctgtgttctactgtttcctcaatagtgaggtccgttctgccatccggaagaggtggcaccggtggcaggacaagcactcgatccgtgcccgagtggcccgtgccatgtccatccccacctccccaacccgtgtcagctttcacagcatcaagcagtccacagcagtctgagctggcaggtcatggagcagcccccaaacagctgtggctggggggatgacggccaggctccctgaccaccctgcctgtggaggtgacctgttaggtctcatgcccactcccccaggagcagctggcactgacagcctggggggggccgctcttcccctgcagccgtgcaggactctagctcatgagtggaaagtcacctacaggactgggccgggcccagggcctctggcttccctgcccaatcctccctggagaagggacatgggaatgaattgaaatggggcgctggacacctacagcagcacgcatgtccctccaaggctgccttctcccagagcacaagaaggccagcccactggggcctggggctgccctcggcaaccgtggggaggccatttgctgccctggggcatcatgggcaactcgtgacagcctctgactcaccacgatgatgcctctggacctcggtgatgccttccgacaccactgggaaccaagggccctcgctcaggaaccctggagacagaagtcaggtgtcatcatcagacttgcggccacagcactagagtcacccccccaggcctccagaacctcactggcactgtggcactgccaccagcaatgccctgccttgctgccttcaccctgaacatttactaccctgcaggccaggccagcttcccctcacttaaccaccccacaccagtcacctcctgctccttttcctcttttgtgagaagatgggggctggagggggcagagtggcctgtgagcaagagccaggggtgtcccagtcccagcctctggggcagagcttgtagccctggatggcctctggggcaggaccactagctaagcaagccaggagaagacccctgcccaagtggctcttgggacaacgtgctgcttacactccaggtgtggaccggccgcagcccccactgacctgcccatgtccagagggactggacagccagggcagggctttggggggcactagaagatgagggtgtcggctgtgaggcgggtggctggtataaataatatttatcttttcaaccagc

SEQ ID NO: 122516 - DNA, 2664 bp, Homo sapiens
  Payload ID: 3994
  Gene Symbol: CRHR1
  Gene Name: corticotropin releasing hormone receptor 1
  Uniprot ID: P34998
  ENST ID: ENST00000613260
  CDS Start-End: 266-1600
ggcgaggccggcaagaggcggccgcgggccgggctgcgtcgggaaacggcggccagacttccccgggaaggggcgagcgagagccgggccgggccgggccgggccgcggggccgggaagcgccgagccgggcatctcctcaccaggcagcgaccgaggagcccggccgcccaccccgtgccgcccgagcccgcagccgcccgccggtccctctgggatgtccgtaggacccgggcattcaggacggtagccgagcgagcccgaggatgggagggcacccgcagctccgtctcgtcaaggcccttctccttctggggctgaaccccgtctctgcctccctccaggaccagcactgcgagagcctgtccctggccagcaacatctcaggactgcagtgcaacgcatccgtggacctcattggcacctgctggccccgcagccctgcggggcagctagtggttcggccctgccctgcctttttctatggtgtccgctacaataccacaaacaatggctaccgggagtgcctggccaatggcagctgggccgcccgcgtgaattactccgagtgccaggagatcctcaatgaggagaaaaaaagcaaggtgcactaccatgtcgcagtcatcatcaactacctgggccactgtatctccctggtggccctcctggtggcctttgtcctctttctgcggctcaggccaggctgcacccattggggtgaccaggcagatggagccctggaggtgggggctccatggagtggtgccccatttcaggttcgaaggagcatccggtgcctgcgaaacatcatccactggaacctcatctccgccttcatcctgcgcaacgccacctggttcgtggtccagctaaccatgagccccgaggtccaccagagcaacgtgggctggtgcaggttggtgacagccgcctacaactacttccatgtgaccaacttcttctggatgttcggcgagggctgctacctgcacacagccatcgtgctcacctactccaccgaccggctgcgcaaatggatgttcatctgcattggctggggtgtgcccttccccatcattgtggcctgggccattgggaagctgtactacgacaatgagaagtgttggtttggcaaaaggcctggggtgtacaccgactacatctaccagggccccatgatcctggtcctgctgatcaatttcatcttccttttcaacatcgtccgcatcctcatgaccaagctccgggcatccaccacgtctgagaccattcagtacaggaaggctgtgaaagccactctggtgctgctgcccctcctgggcatcacctacatgctgttcttcgtcaatcccggggaggatgaggtctcccgggtcgtcttcatctacttcaactccttcctggaatccttccagggcttctttgtgtctgtgttctactgtttcctcaatagtgaggtccgttctgccatccggaagaggtggcaccggtggcaggacaagcactcgatccgtgcccgagtggcccgtgccatgtccatccccacctccccaacccgtgtcagctttcacagcatcaagcagtccacagcagtctgagctggcaggtcatggagcagcccccaaacagctgtggctggggggatgacggccaggctccctgaccaccctgcctgtggaggtgacctgttaggtctcatgcccactcccccaggagcagctggcactgacagcctggggggggccgctcttcccctgcagccgtgcaggactctagctcatgagtggaaagtcacctacaggactgggccgggcccagggcctctggcttccctgcccaatcctccctggagaagggacatgggaatgaattgaaatggggcgctggacacctacagcagcacgcatgtccctccaaggctgccttctcccagagcacaagaaggccagcccactggggcctggggctgccctcggcaaccgtggggaggccatttgctgccctggggcatcatgggcaactcgtgacagcctctgactcaccacgatgatgcctctggacctcggtgatgccttccgacaccactgggaaccaagggccctcgctcaggaaccctggagacagaagtcaggtgtcatcatcagacttgcggccacagcactagagtcacccccccaggcctccagaacctcactggcactgtggcactgccaccagcaatgccctgccttgctgccttcaccctgaacatttactaccctgcaggccaggccagcttcccctcacttaaccaccccacaccagtcacctcctgctccttttcctcttttgtgagaagatgggggctggagggggcagagtggcctgtgagcaagagccaggggtgtcccagtcccagcctctggggcagagcttgtagccctggatggcctctggggcaggaccactagctaagcaagccaggagaagacccctgcccaagtggctcttgggacaacgtgctgcttacactccaggtgtggaccggccgcagcccccactgacctgcccatgtccagagggactggacagccagggcagggctttggggggcactagaagatgagggtgtcggctgtgaggcgggtggctggtataaataatatttatcttttcaaccagc

SEQ ID NO: 122517 - DNA, 2370 bp, Homo sapiens
  Payload ID: 3994
  Gene Symbol: CRHR1
  Gene Name: corticotropin releasing hormone receptor 1
  ENST ID: ENST00000619154
  CDS Start-End: 266-730
ggcgaggccggcaagaggcggccgcgggccgggctgcgtcgggaaacggcggccagacttccccgggaaggggcgagcgagagccgggccgggccgggccgggccgcggggccgggaagcgccgagccgggcatctcctcaccaggcagcgaccgaggagcccggccgcccaccccgtgccgcccgagcccgcagccgcccgccggtccctctgggatgtccgtaggacccgggcattcaggacggtagccgagcgagcccgaggatgggagggcacccgcagctccgtctcgtcaaggcccttctccttctggggctgaaccccgtctctgcctccctccaggaccagcactgcgagagcctgtccctggccagcaacatctcagaaaaaaagcaaggtgcactaccatgtcgcagtcatcatcaactacctgggccactgtatctccctggtggccctcctggtggcctttgtcctctttctgcggctcaggagcatccggtgcctgcgaaacatcatccactggaacctcatctccgccttcatcctgcgcaacgccacctggttcgtggtccagctaaccatgagccccgaggtccaccagagcaacgtgggctggtgcaggttggtgacagccgcctacaactacttccatgtgaccaacttcttctggatgttcggcgagggctgctacctgcacacagccatcgtgctcacctactccactgaccggctgcgcaaatggatgttcatctgcattggctggggtgtgcccttccccatcattgtggcctgggccattgggaagctgtactacgacaatgagaagtgctggtttggcaaaaggcctggggtgtacaccgactacatctaccagggccccatgatcctggtcctgctgatcaatttcatcttccttttcaacatcgtccgcatcctcatgaccaagctccgggcatccaccacgtctgagaccattcagtacaggaaggctgtgaaagccactctggtgctgctgcccctcctgggcatcacctacatgctgttcttcgtcaatcccggggaggatgaggtctcccgggtcgtcttcatctacttcaactccttcctggaatccttccagggcttctttgtgtctgtgttctactgtttcctcaatagtgaggtccgttctgccatccggaagaggtggcaccggtggcaggacaagcactcgatccgtgcccgagtggcccgtgccatgtccatccccacctccccaacccgtgtcagctttcacagcatcaagcagtccacagcagtctgagctggcaggtcatggagcagcccccaaagagctgtggctggggggatgacggccaggctccctgaccaccctgcctgtggaggtgacctgttaggtctcatgcccactcccccaggagcagctggcactgacagcctgggggggccgctctccccctgcagccgtgcaggactctagctcatgagtggaaagtcacctacaggactgggccgggcccagggcctctggcttccctgcccaatcctccctggagaagggacatgggaatgaattgaaatggggcgctggacacctacagcagcacgcatgtccctccaaggctgtcttctcccagagcacaagaaggccagcccactgggccctggggctgccctcggcaaccgtggggaggccatttgctgccctggggcatcatgggcaactcgtgacagcctctgactcaccacgatgacgcctctggacctcggtgatgccttccgacaccactgggaaccaagggccctcactcaggaaccctggagacagaagtcaggtgtcatcatcagacttgcggccacagcactagagtcacccccccaggcctccagaaccttactggcactgtggcactgccaccagcaatgccctgccttgctgccttcaccctgaacatttagtaccctgcaggccaggccagcttcccctcacttaaccaccccataccagtcacctcctgctccttttcctcttttgtgagaagatgggggctggagggggcagagtggcctgtgagcaagagccaggggtgtcccagtcccagcctctggggcagagcttgtagccctggatggcctctggggcaggaccactagctaagcaagccaggagaagacccctgcccaagtggctcttgggacaacgtgctgcttacactccaggtgtggaccggccgcagcccccactgacctgcccatgtccagagggactggacagccagggcagggctttggggggcactagaagatgagggtgtcggctgtgaggcgggtggctggtataaataatatttatcttttcaaccagc

SEQ ID NO: 122518 - DNA, 777 bp, Homo sapiens; identical to SEQ ID NO: 122502
  Payload ID: 3994
  Gene Symbol: CRHR1
  Gene Name: corticotropin releasing hormone receptor 1
  ENST ID: ENST00000631395
  CDS Start-End: 1-459

SEQ ID NO: 122519 - DNA, 1272 bp, Homo sapiens; identical to SEQ ID NO: 122500
  Payload ID: 3994
  Gene Symbol: CRHR1
  Gene Name: corticotropin releasing hormone receptor 1
  ENST ID: ENST00000632957
  CDS Start-End: 1-157

SEQ ID NO: 122520 - DNA, 1206 bp, Homo sapiens; identical to SEQ ID NO: 122501
  Payload ID: 3994
  Gene Symbol: CRHR1
  Gene Name: corticotropin releasing hormone receptor 1
  Uniprot ID: P34998
  ENST ID: ENST00000633723
  CDS Start-End: 1-1206

SEQ ID NO: 122521 - DNA, 479 bp, Homo sapiens; identical to SEQ ID NO: 122504
  Payload ID: 3994
  Gene Symbol: CRHR1
  Gene Name: corticotropin releasing hormone receptor 1
  ENST ID: ENST00000632552
  CDS Start-End: 1-281

SEQ ID NO: 122522 - DNA, 2462 bp, Homo sapiens
  Payload ID: 3994
  Gene Symbol: CRHR1
  Gene Name: corticotropin releasing hormone receptor 1
  ENST ID: ENST00000632383
  CDS Start-End: 239-676
gccgggctgcgtcgggaaacggcggccagacttccccgggaaggggcgagcgagagccgggccgggccgggccgggccgcggggccgggaagcgccgagccgggcatctcctcaccaggcagcgaccgaggagcccggccgcccaccccgtgccgcccgagcccgcagccgcccgccggttcctctgggatgtccgtaggacccgggcattcaggacggtagccgagcgagcccgaggatgggagggcacccgcagctccgtctcgtcaaggcccttctccttctggggctgaaccccgtctctgcctccctccaggaccagcactgcgagagcctgtccctggccagcaacatctcaggactgcagtgcaacgcatccgtggacctcattggcacctgctggccccgcagccctgcggggcagctagtggttcggccctgccctgcctttttctatggtgtccgctacaataccacaaacaatggctaccgggagtgcctggccaatggcagctgggccgcccgcgtgaattactccgagtgccaggagatcctcaatgaggagaaaaaaagcaaggtgcactaccatgtcgcagtcatcatcaactacctgggccactgtatctccctggtggccctcctggtggcctttgtcctctttctgcggctcagctaaccatgagccccgaggtccaccagagcaacgtgggctggtgcaggttggtgacagccgcctacaactacttccatgtgaccaacttcttctggatgttcggcgagggctgctacctgcacacagccatcgtgctcacctactccactgaccggctgcgcaaatggatgttcatctgcattggctggggtgtgcccttccccatcattgtggcctgggccattgggaagctgtactacgacaatgagaagtgctggtttggcaaaaggcctggggtgtacaccgactacatctaccagggccccatgatcctggtcctgctgatcaatttcatcttccttttcaacatcgtccgcatcctcatgaccaagctccgggcatccaccacgtctgagaccattcagtacaggaaggctgtgaaagccactctggtgctgctgcccctcctgggcatcacctacatgctgttcttcgtcaatcccggggaggatgaggtctcccgggtcgtcttcatctacttcaactccttcctggaatccttccagggcttctttgtgtctgtgttctactgtttcctcaatagtgaggtccgttctgccatccggaagaggtggcaccggtggcaggacaagcactcgatccgtgcccgagtggcccgtgccatgtccatccccacctccccaacccgtgtcagctttcacagcatcaagcagtccacagcagtctgagctggcaggtcatggagcagcccccaaagagctgtggctggggggatgacggccaggctccctgaccaccctgcctgtggaggtgacctgttaggtctcatgcccactcccccaggagcagctggcactgacagcctgggggggccgctctccccctgcagccgtgcaggactctagctcatgagtggaaagtcacctacaggactgggccgggcccagggcctctggcttccctgcccaatcctccctggagaagggacatgggaatgaattgaaatggggcgctggacacctacagcagcacgcatgtccctccaaggctgtcttctcccagagcacaagaaggccagcccactgggccctggggctgccctcggcaaccgtggggaggccatttgctgccctggggcatcatgggcaactcgtgacagcctctgactcaccacgatgacgcctctggacctcggtgatgccttccgacaccactgggaaccaagggccctcactcaggaaccctggagacagaagtcaggtgtcatcatcagacttgcggccacagcactagagtcacccccccaggcctccagaaccttactggcactgtggcactgccaccagcaatgccctgccttgctgccttcaccctgaacatttagtaccctgcaggccaggccagcttcccctcacttaaccaccccataccagtcacctcctgctccttttcctcttttgtgagaagatgggggctggagggggcagagtggcctgtgagcaagagccaggggtgtcccagtcccagcctctggggcagagcttgtagccctggatggcctctggggcaggaccactagctaagcaagccaggagaagacccctgcccaagtggctcttgggacaacgtgctgcttacactccaggtgtggaccggccgcagcccccactgacctgcccatgtccagagggactggacagccagggcagggctttggggggcactagaagatgagggtgtcggctgtgaggcgggtggctggtataaataatatttatcttttcaacca

SEQ ID NO: 122523 - DNA, 223 bp, Homo sapiens; identical to SEQ ID NO: 122503
  Payload ID: 3994
  Gene Symbol: CRHR1
  Gene Name: corticotropin releasing hormone receptor 1
  ENST ID: ENST00000633333
  CDS Start-End: 1-223

SEQ ID NO: 122524 - DNA, 2695 bp, Homo sapiens
  Payload ID: 3995
  Gene Symbol:
  Gene Name: corticotropin releasing hormone receptor 1 [Source:EntrezGene
  Acc:1394]
  ENST ID: ENST00000634540
  CDS Start-End: 911-1633
ccacttctaggcttggttgaaccgtgcagataccttctcgaaacaaaagattttcctacctgcttatacttggtaaccgagggaatttctaagacttcttgctcatttctgagtattgtctttatatcctgacactatgaatgctacttggatgcctcttaagggtctcttctgcagggtccccatgaattgtggctgaagttgtgcacaaacaagtatctccagtgacaggagtgccttctgaggcagccattgcatcttcatctgctgacactctgctaggctgacttctgtagttttcaccactgatcttcagtccacctcacagagctctataaaacgcttaaatcctctttacatcatagactttcagctacttgaagatagccatcagccgctacgtgactcttttctccaggcccttctccttctggggctgaaccccgtctctgcctccctccaggaccagcactgcgagagcctgtccctggccagcaacatctcaggactgcagtgcaacgcatccgtggacctcattggcacctgctggccccgcagccctgcggggcagctagtggttcggccctgccctgcctttttctatggtgtccgctacaataccacaaacaatggctaccgggagtgcctggccaatggcagctgggccgcccgcgtgaattactccgagtgccaggagatcctcaatgaggagaaaaaaagcaaggtgcactaccatgtcgcagtcatcatcaactacctgggccactgtatctccctggtggccctcctggtggcctttgtcctctttctgcggctcaggagcatccggtgcctgcgaaacatcatccactggaacctcatctccgccttcatcctgcgcaacgccacctggttcgtggtccagctaaccatgagccccgaggtccaccagagcaacgtgggctggtgcaggttggtgacagccgcctacaactacttccatgtgaccaacttcttctggatgttcggcgagggctgctacctgcacacagccatcgtgctcacctactccactgaccggctgcgcaaatggatgttcatctgcattggctggggtgtgcccttccccatcattgtggcctgggccattgggaagctgtactacgacaatgagaagtgctggtttggcaaaaggcctggggtgtacaccgactacatctaccagggccccatgatcctggtcctgctgatcaatttcatcttccttttcaacatcgtccgcatcctcatgaccaagctccgggcatccaccacgtctgagaccattcagtacaggaaggctgtgaaagccactctggtgctgctgcccctcctgggcatcacctacatgctgttcttcgtcaatcccggggaggatgaggtctcccgggtcgtcttcatctacttcaactccttcctggaatccttccagggcttctttgtgtctgtgttctactgtttcctcaatagtgaggtccgttctgccatccggaagaggtggcaccggtggcaggacaagcactcgatccgtgcccgagtggcccgtgccatgtccatccccacctccccaacccgtgtcagctttcacagcatcaagcagtccacagcagtctgagctggcaggtcatggagcagcccccaaagagctgtggctggggggatgacggccaggctccctgaccaccctgcctgtggaggtgacctgttaggtctcatgcccactcccccaggagcagctggcactgacagcctgggggggccgctctccccctgcagccgtgcaggactctagctcatgagtggaaagtcacctacaggactgggccgggcccagggcctctggcttccctgcccaatcctccctggagaagggacatgggaatgaattgaaatggggcgctggacacctacagcagcacgcatgtccctccaaggctgtcttctcccagagcacaagaaggccagcccactgggccctggggctgccctcggcaaccgtggggaggccatttgctgccctggggcatcatgggcaactcgtgacagcctctgactcaccacgatgacgcctctggacctcggtgatgccttccgacaccactgggaaccaagggccctcactcaggaaccctggagacagaagtcaggtgtcatcatcagacttgcggccacagcactagagtcacccccccaggcctccagaaccttactggcactgtggcactgccaccagcaatgccctgccttgctgccttcaccctgaacatttagtaccctgcaggccaggccagcttcccctcacttaaccaccccataccagtcacctcctgctccttttcctcttttgtgagaagatgggggctggagggggcagagtggcctgtgagcaagagccaggggtgtcccagtcccagcctctggggcagagcttgtagccctggatggcctctggggcaggaccactagctaagcaagccaggagaagacccctgcccaagtggctcttgggacaacgtgctgcttacactccaggtgtggaccggccgcagcccccactgacctgcccatgtccagagggactggacagccagggcagggctttggggggcactagaagatgagggtgtcggctgtgaggcgggtggctggtataaataatatttatcttttcaaccag

SEQ ID NO: 122525 - DNA, 1600 bp, Homo sapiens
  Payload ID: 3996
  Gene Symbol: CRHR2
  Gene Name: corticotropin releasing hormone receptor 2
  Uniprot ID: Q13324
  ENST ID: ENST00000348438
  CDS Start-End: 71-1387
ggggctggccagggtgtgaccaccgtgctgggcagcaggctccagtccctaacccccagccactactggcatgaggggtccctcagggcccccaggcctcctctacgtcccacacctcctcctctgcctgctctgcctcctcccaccgccgctccaatacgcagccgggcagagccagatgcccaaagaccagcccctgtgggcacttctggagcagtactgccacaccatcatgaccctcaccaacctctcaggtccctactcctactgcaacacgaccttggaccagatcggaacgtgctggccccgcagcgctgccggagccctcgtggagaggccgtgccccgagtacttcaacggcgtcaagtacaacacgacccggaatgcctatcgagaatgcttggagaatgggacgtgggcctcaaagatcaactactcacagtgtgagcccattttggatgacaagcagaggaagtatgacctgcactaccgcatcgcccttgtcgtcaactacctgggccactgcgtatctgtggcagccctggtggccgccttcctgcttttcctggccctgcggagcattcgctgtctgcggaatgtgattcactggaacctcatcaccacctttatcctgcgaaatgtcatgtggttcctgctgcagctcgttgaccatgaagtgcacgagagcaatgaggtctggtgccgctgcatcaccaccatcttcaactacttcgtggtgaccaacttcttctggatgtttgtggaaggctgctacctgcacacggccattgtcatgacctactccactgagcgcctgcgcaagtgcctcttcctcttcatcggatggtgcatccccttccccatcatcgtcgcctgggccatcggcaagctctactatgagaatgaacagtgctggtttggcaaggagcctggcgacctggtggactacatctaccaaggccccatcattctcgtgctcctgatcaatttcgtatttctgttcaacatcgtcaggatcctaatgacaaagttacgcgcgtccaccacatccgagacaatccagtacaggaaggcagtgaaggccaccctggtgctcctgcccctcctgggcatcacctacatgctcttcttcgtcaatcccggggaggacgacctgtcacagatcatgttcatctatttcaactccttcctgcagtcgttccagggtttcttcgtgtctgtcttctactgcttcttcaatggagaggtgcgctcagccgtgaggaagaggtggcaccgctggcaggaccatcactcccttcgagtccccatggcccgggccatgtccatccctacatcacccacacggatcagcttccacagcatcaagcagacggccgctgtgtgacccctcggtcgcccacctgcacagctcccctgtcctcctccaccttcttcctctgggttctctgtgctgggcaggctctcgtggggcaggagatgggaggggagagaccagctctccagcctggcaggaaagagggggtgcggcagccaagggggactgcaagggacagggatgagtgggggccaccaggctcagcgcaagaggaagcagagg

SEQ ID NO: 122526 - DNA, 3131 bp, Homo sapiens
  Payload ID: 3996
  Gene Symbol: CRHR2
  Gene Name: corticotropin releasing hormone receptor 2
  Uniprot ID: Q13324
  ENST ID: ENST00000341843
  CDS Start-End: 421-1614
ggggctggccagggtgtgaccaccgtgctgggcagcaggctccagtccctaacccccagccactactggcatgaggggtccctcagggcccccaggcctcctctacgtcccacacctcctcctctgcctgctctgcctcctcccaccgccgctccaatacgcagccgggcagagccagatgcccaaagaccagcccctgtgggcacttctggagcagtactgccacaccatcatgaccctcaccaacctctcaggctggtcttgaattcctgtgctcaagcaatctgcctaccttggcttccccaagtgctgagattatgggtgtgagccactgcacctggccaagaatccgaatggattcaaagataccttgaaataattcctcaatgcaacacacacacatatgccagggttggtcaaatgggaagagagccttggcctgaagacagggacctgggctttcctcagctcttctgccaaggtccctactcctactgcaacacgaccttggaccagatcggaacgtgctggccccgcagcgctgccggagccctcgtggagaggccgtgccccgagtacttcaacggcgtcaagtacaacacgacccggaatgcctatcgagaatgcttggagaatgggacgtgggcctcaaagatcaactactcacagtgtgagcccattttggatgacaagcagaggaagtatgacctgcactaccgcatcgcccttgtcgtcaactacctgggccactgcgtatctgtggcagccctggtggccgccttcctgcttttcctggccctgcggagcattcgctgtctgcggaatgtgattcactggaacctcatcaccacctttatcctgcgaaatgtcatgtggttcctgctgcagctcgttgaccatgaagtgcacgagagcaatgaggtctggtgccgctgcatcaccaccatcttcaactacttcgtggtgaccaacttcttctggatgtttgtggaaggctgctacctgcacacggccattgtcatgacctactccactgagcgcctgcgcaagtgcctcttcctcttcatcggatggtgcatccccttccccatcatcgtcgcctgggccatcggcaagctctactatgagaatgaacagtgctggtttggcaaggagcctggcgacctggtggactacatctaccaaggccccatcattctcgtgctcctgatcaatttcgtatttctgttcaacatcgtcaggatcctaatgacaaagttacgcgcgtccaccacatccgagacaatccagtacaggaaggcagtgaaggccaccctggtgctcctgcccctcctgggcatcacctacatgctcttcttcgtcaatcccggggaggacgacctgtcacagatcatgttcatctatttcaactccttcctgcagtcgttccagggtttcttcgtgtctgtcttctactgcttcttcaatggagaggtgcgctcagccgtgaggaagaggtggcaccgctggcaggaccatcactcccttcgagtccccatggcccgggccatgtccatccctacatcacccacacggatcagcttccacagcatcaagcagacggccgctgtgtgacccctcggtcgcccacctgcacagctcccctgtcctcctccaccttcttcctctgggttctctgtgctgggcaggctctcgtggggcaggagatgggaggggagagaccagctctccagcctggcaggaaagagggggtgcggcagccaagggggactgcaagggacagggatgagtgggggccaccaggctcagcgcaagaggaagcagagggaattcacaggaccccctgagaagagccagtcagatgtctgcaggcatttgcccatcccagcctctctggccagggccttactgggcccagagcagagaaggacctgtccaacacacacagctatttatagtagcagacacagggctcccctgccctactcatggagccagcagccaggcaatggtgtggccctgcactggcccttggcctccacactcagtggtgcccctgcagttgggtggggtacgccagcaaaggatcagtttggctgccttatcccaggggctgtcacctagagaggctcacttgtaccccacccttgttcctgtgtcccctccccagccatcctcccgccttgggggctccatgaaggatgcaggcttccaggcctggcttcctctcttgggagaccccttctctgcctagtccacagattaggcaatcaaggaagacgccatcagggaagccacatccttagtcaaccagttgcatcgtgcggggcaaaatgaggagcagaggcatggaggagggaggcgtgggatgggaatagcagaaaccaaccatgtcttcagtgattgaaactcataccccattgccctttgccctccagtctccccttcagaaacatctctgctctctgtgaaataaaccatgcctcttggaagtggcctcccctcaggtcaagtcacccaggcacccgaagagtggtgtgggccaaggatcgtggctgggtctgagggggccacatccatcttccttagtgggctcgggccctggcctcgggccagttctctctctctctgacctctggtaggtttggagtctttatggtcaaagcacctgcaggcgggtctgtcccttatcactccaaccaggctaatacctggccccagcccccaaccaagggcagcttgattcagcctggaggaggtgtgcagctcatccagcaagccagggcctgtcccaaaggccaaggctctggaatctggtgggcagggtagacatggcccctcagttgaccaccagggcagcttccaggcttggcttccgtccctgtgtccctgcagcggagccgcaggagtcagggagagagaagcatcaggccatttcttccaaaagaaaccaatgctctaggtaccccctacaaaaataagttttgaaaaatcatgtatcccgtcttgcacatttttaagttgacatgtagtattttttacttaagttttaaatccttcaaaggtgtgatttctgccattttgtaaatatttacatttttaaataaaactgctgcaacaatttaaaatac

SEQ ID NO: 122527 - DNA, 309 bp, Homo sapiens
  Payload ID: 3996
  Gene Symbol: CRHR2
  Gene Name: corticotropin releasing hormone receptor 2
  ENST ID: ENST00000445981
  CDS Start-End: 13-309
gccactactggcatgaggggtccctcagggcccccaggcctcctctacgtcccacacctcctcctctgcctgctctgcctcctcccaccgccgctccaatacgcagccgggcagagccagatgcccaaagaccagcccctgtgggcacttctggagcagtactgccacaccatcatgaccctcaccaacctctcagtcacgccgggcgcgcactcccactccctctccgcacgcggctgcgggacgcgatggacgcggcactgctccacagcctgctggaggccaactgcagcctggcgctggctgaag

SEQ ID NO: 122528 - DNA, 1787 bp, Homo sapiens
  Payload ID: 3996
  Gene Symbol: CRHR2
  Gene Name: corticotropin releasing hormone receptor 2
  ENST ID: ENST00000452278
  CDS Start-End: 31-225
tccagtccctaacccccagccactactggcatgaggggtccctcagggcccccaggcctcctctacgtcccacacctcctcctctgcctgctctgcctcctcccaccgccgctccaatacgcagccgggcagagccagatgcccaaagaccagcccctgtgggcacttctggagcagtactgccacaccatcatgaccctcaccaacctctcaggctggtcttgaattcctgtgctcaagcaatctgcctaccttggcttccccaagtgctgagattatgggtgtgagccactgcacctggccaagaatccgaatggattcaaagataccttgaaataattcctcaatgcaacacacacacatatgccagggttggtcaaatgggaagagagccttggcctgaagacagggacctgggctttcctcagctcttctgccaaggtccctactcctactgcaacacgaccttggaccagatcggaacgtgctggccccgcagcgctgccggagccctcgtggagaggccgtgccccgagtacttcaacggcgtcaagtacaacacgacccggaatgcctatcgagaatgcttggagaatgggacgtgggcctcaaagatcaactactcacagtgtgagcccattttggatgacaagcagaggaagtatgacctgcactaccgcatcgcccttgtcgtcaactacctgggccactgcgtatctgtggcagccctggtggccgccttcctgcttttcctggccctgcggagcattcgctgtctgcggaatgtgattcactggaacctcatcaccacctttatcctgcgaaatgtcatgtggttcctgctgcagctcgttgaccatgaagtgcacgagagcaatgaggtctggtgccgctgcatcaccaccatcttcaactacttcgtggtgaccaacttcttctggatgtttgtggaaggctgctacctgcacacggccattgtcatgacctactccactgagcgcctgcgcaagtgcctcttcctcttcatcggatggtgcatccccttccccatcatcgtcgcctgggccatcggcaagctctactatgagaatgaacagtgctggtttggcaaggagcctggcgacctggtggactacatctaccaaggccccatcattctcgtgctcctgatcaatttcgtatttctgttcaacatcgtcaggatcctaatgacaaagttacgcgcgtccaccacatccgagacaatccagtacaggaaggcagtgaaggccaccctggtgctcctgcccctcctgggcatcacctacatgctcttcttcgtcaatcccggggaggacgacctgtcacagatcatgttcatctatttcaactccttcctgcagtcgttccagggtttcttcgtgtctgtcttctactgcttcttcaatggagaggtgcgctcagccgtgaggaagaggtggcaccgctggcaggaccatcactcccttcgagtccccatggcccgggccatgtccatccctacatcacccacacggatcagcttccacagcatcaagcagacggccgctgtgtgacccctcggtcgcccacctgcacagctcccctgtcctcctccaccttcttcctctgggttctctgtgctgggcaggctctcgtggggcaggagatgggaggggagagaccagctctccagcctggcaggaaagagggggtgcggcagccaagggggactgcaagggacagggatgagtgggggccaccaggctcagcgcaagaggaagcagagg

SEQ ID NO: 122529 - DNA, 536 bp, Homo sapiens
  Payload ID: 3996
  Gene Symbol: CRHR2
  Gene Name: corticotropin releasing hormone receptor 2
  ENST ID: ENST00000423776
  CDS Start-End: 13-207
gccactactggcatgaggggtccctcagggcccccaggcctcctctacgtcccacacctcctcctctgcctgctctgcctcctcccaccgccgctccaatacgcagccgggcagagccagatgcccaaagaccagcccctgtgggcacttctggagcagtactgccacaccatcatgaccctcaccaacctctcaggctggtcttgaattcctgtgctcaagcaatctgcctaccttggcttccccaagtgctgagattatgggtgtgagccactgcacctggccaagaatccgaatggattcaaagataccttgaaataattcctcaatgcaacacacacacatatgccagggttggtcaaatgggaagagagccttggcctgaagacagggacctgggctttcctcagctcttctgccaagtcacgccgggcgcgcactcccactccctctccgcacgcggctgcgggacgcgatggacgcggcactgctccacagcctgctggaggccaactgcagcctggcgctggctgaag

SEQ ID NO: 122530 - DNA, 2530 bp, Homo sapiens
  Payload ID: 3996
  Gene Symbol: CRHR2
  Gene Name: corticotropin releasing hormone receptor 2
  Uniprot ID: Q13324
  ENST ID: ENST00000471646
  CDS Start-End: 419-1654
agcattccgtcaccccaggcccacgctctccagcccaccgccctcctctggacgccgcgagtggaagagagctgcgaactgagaagccgtactttgggcagggtggagggcccgggggctggagactgagcccctccgagaggagccgcccggccccgccccccggcgcagccattggccgcggcggagcggctgtacccgcagctccgtgcactcggcggctcctctccgggaaggtccccacttgacagctctgggcgaccggaggtggcgcccaaaggctgcccgggagatcggggctgggctggcgggggccaggaccccgcgccctctcggccgctcactctcgcgtccactccctcgcagtcacgccgggcgcgcactcccactccctctccgcacgcggctgcgggacgcgatggacgcggcactgctccacagcctgctggaggccaactgcagcctggcgctggctgaagagctgctcttggacggctgggggccacccctggaccccgagggtccctactcctactgcaacacgaccttggaccagatcggaacgtgctggccccgcagcgctgccggagccctcgtggagaggccgtgccccgagtacttcaacggcgtcaagtacaacacgacccggaatgcctatcgagaatgcttggagaatgggacgtgggcctcaaagatcaactactcacagtgtgagcccattttggatgacaagcagaggaagtatgacctgcactaccgcatcgcccttgtcgtcaactacctgggccactgcgtatctgtggcagccctggtggccgccttcctgcttttcctggccctgcggagcattcgctgtctgcggaatgtgattcactggaacctcatcaccacctttatcctgcgaaatgtcatgtggttcctgctgcagctcgttgaccatgaagtgcacgagagcaatgaggtctggtgccgctgcatcaccaccatcttcaactacttcgtggtgaccaacttcttctggatgtttgtggaaggctgctacctgcacacggccattgtcatgacctactccactgagcgcctgcgcaagtgcctcttcctcttcatcggatggtgcatccccttccccatcatcgtcgcctgggccatcggcaagctctactatgagaatgaacagtgctggtttggcaaggagcctggcgacctggtggactacatctaccaaggccccatcattctcgtgctcctgatcaatttcgtatttctgttcaacatcgtcaggatcctaatgacaaagttacgcgcgtccaccacatccgagacaatccagtacaggaaggcagtgaaggccaccctggtgctcctgcccctcctgggcatcacctacatgctcttcttcgtcaatcccggggaggacgacctgtcacagatcatgttcatctatttcaactccttcctgcagtcgttccagggtttcttcgtgtctgtcttctactgcttcttcaatggagaggtgcgctcagccgtgaggaagaggtggcaccgctggcaggaccatcactcccttcgagtccccatggcccgggccatgtccatccctacatcacccacacggatcagcttccacagcatcaagcagacggccgctgtgtgacccctcggtcgcccacctgcacagctcccctgtcctcctccaccttcttcctctgggttctctgtgctgggcaggctctcgtggggcaggagatgggaggggagagaccagctctccagcctggcaggaaagagggggtgcggcagccaagggggactgcaagggacagggatgagtgggggccaccaggctcagcgcaagaggaagcagagggaattcacaggaccccctgagaagagccagtcagatgtctgcaggcatttgcccatcccagcctctctggccagggccttactgggcccagagcagagaaggacctgtccaacacacacagctatttatagtagcagacacagggctcccctgccctactcatggagccagcagccaggcaatggtgtggccctgcactggcccttggcctccacactcagtggtgcccctgcagttgggtggggtacgccagcaaaggatcagtttggctgccttatcccaggggctgtcacctagagaggctcacttgtaccccacccttgttcctgtgtcccctccccagccatcctcccgccttgggggctccatgaaggatgcaggcttccaggcctggcttcctctcttgggagaccccttctctgcctagtccacagattaggcaatcaaggaagacgccatcagggaagccacatccttagtcaaccagttgcatcgtgcggggcaaaatgaggagcagaggcatggaggagggaggcgtgggatgggaatagcagaaaccaaccatgtcttcagtgattgaaactcataccccattgccctttgccctccagtctccccttcagaaacatctctgctctctgtgaaataaaccatgcctcttgg

SEQ ID NO: 122531 - DNA, 3109 bp, Homo sapiens
  Payload ID: 3996
  Gene Symbol: CRHR2
  Gene Name: corticotropin releasing hormone receptor 2
  Uniprot ID: Q13324
  ENST ID: ENST00000506074
  CDS Start-End: 246-1409
attggccgcggcggagcggctgtacccgcagctccgtgcactcggcggctcctctccgggaaggtccccacttgacagctctgggcgaccggaggtggcgcccaaaggctgcccgggagatcggggctgggctggcgggggccaggaccccgcgccctctcggccgctcactctcgcgtccactccctcgcagtcacgccgggcgcgcactcccactccctctccgcacgcggctgcgggacgcgatggacgcggcactgctccacagcctgctggaggccaactgcagcctggcgctggctgaagagctgctcttggacggctgggggccacccctggaccccgagggtccctactcctactgcaacacgaccttggaccagatcggaacgtgctggccccgcagcgctgccggagccctcgtggagaggccgtgccccgagtacttcaacggcgtcaagtacaacacgacccggaatgcctatcgagaatgcttggagaatgggacgtgggcctcaaagatcaactactcacagtgtgagcccattttggatgacaagcagaggaagtatgacctgcactaccgcatcgcccttgtcgtcaactacctgggccactgcgtatctgtggcagccctggtggccgccttcctgcttttcctggccctgcggagcattcgctgtctgcggaatgtgattcactggaacctcatcaccacctttatcctgcgaaatgtcatgtggttcctgctgcagctcgttgaccatgaagtgcacgagagcaatgaggtctggtgccgctgcatcaccaccatcttcaactacttcgtggtgaccaacttcttctggatgtttgtggaaggctgctacctgcacacggccattgtcatgacctactccactgagcgcctgcgcaagtgcctcttcctcttcatcggatggtgcatccccttccccatcatcgtcgcctgggccatcggcaagctctactatgagaatgaacagtgctggtttggcaaggagcctggcgacctggtggactacatctaccaaggccccatcattctcgtgctcctgatcaatttcgtatttctgttcaacatcgtcaggatcctaatgacaaagttacgcgcgtccaccacatccgagacaatccagtacaggaaggcagtgaaggccaccctggtgctcctgcccctcctgggcatcacctacatgctcttcttcgtcaatcccggggaggacgacctgtcacagatcatgttcatctatttcaactccttcctgcagtcgttccagggtttcttcgtgtctgtcttctactgcttcttcaatggagagagctgggtgagcaaggaagcccaggccgcagggcctcatggaagagagaagccagagcagaggtggtgacagaaggaagcttccagaaagagatgtgtgccaagcaatcaggtgcgctcagccgtgaggaagaggtggcaccgctggcaggaccatcactcccttcgagtccccatggcccgggccatgtccatccctacatcacccacacggatcagcttccacagcatcaagcagacggccgctgtgtgacccctcggtcgcccacctgcacagctcccctgtcctcctccaccttcttcctctgggttctctgtgctgggcaggctctcgtggggcaggagatgggaggggagagaccagctctccagcctggcaggaaagagggggtgcggcagccaagggggactgcaagggacagggatgagtgggggccaccaggctcagcgcaagaggaagcagagggaattcacaggaccccctgagaagagccagtcagatgtctgcaggcatttgcccatcccagcctctctggccagggccttactgggcccagagcagagaaggacctgtccaacacacacagctatttatagtagcagacacagggctcccctgccctactcatggagccagcagccaggcaatggtgtggccctgcactggcccttggcctccacactcagtggtgcccctgcagttgggtggggtacgccagcaaaggatcagtttggctgccttatcccaggggctgtcacctagagaggctcacttgtaccccacccttgttcctgtgtcccctccccagccatcctcccgccttgggggctccatgaaggatgcaggcttccaggcctggcttcctctcttgggagaccccttctctgcctagtccacagattaggcaatcaaggaagacgccatcagggaagccacatccttagtcaaccagttgcatcgtgcggggcaaaatgaggagcagaggcatggaggagggaggcgtgggatgggaatagcagaaaccaaccatgtcttcagtgattgaaactcataccccattgccctttgccctccagtctccccttcagaaacatctctgctctctgtgaaataaaccatgcctcttggaagtggcctcccctcaggtcaagtcacccaggcacccgaagagtggtgtgggccaaggatcgtggctgggtctgagggggccacatccatcttccttagtgggctcgggccctggcctcgggccagttctctctctctctgacctctggtaggtttggagtctttatggtcaaagcacctgcaggcgggtctgtcccttatcactccaaccaggctaatacctggccccagcccccaaccaagggcagcttgattcagcctggaggaggtgtgcagctcatccagcaagccagggcctgtcccaaaggccaaggctctggaatctggtgggcagggtagacatggcccctcagttgaccaccagggcagcttccaggcttggcttccgtccctgtgtccctgcagcggagccgcaggagtcagggagagagaagcatcaggccatttcttccaaaagaaaccaatgctctaggtaccccctacaaaaataagttttgaaaaatcatgtatcccgtcttgcacatttttaagttgacatgtagtattttttacttaagttttaaatccttcaaaggtgtgatttctgccattttgtaaatatttacatttttaaataaaactgctgcaacaatttaaaatac

SEQ ID NO: 122532 - DNA, 1130 bp, Homo sapiens
  Payload ID: 3997
  Gene Symbol: CORT
  Gene Name: cortistatin
  Uniprot ID: O00230
  ENST ID: ENST00000377049
  CDS Start-End: 506-823
atagtagaagaatgtctctgaaattactggatgagtttcagtcatactttcacatgggcacaatttcacattcaagctccttatcctaggctaattttatattatgttaaatcacttgtttttgttctcacggcttcctgcctgctataggcataattacgaggaagcagaacttctccagaagcaagcgcacatgcgttccaaaataagagcaaattcgctctaaacacaggaaaagacctgaagctttaattaaggggttacatccaaccccagagcgcttttgtgggcactgattgctccagcttctgcgtcactgcgcgagggaagagggaagaggatccaggcgttagacatgtatagacacaaaaacagctggagattgggcttaaaatacccaccaagctccaaagaagagacccaagtccccaaaacattgatttcagggctgccaggaaggaagagcagcagcagggtgggagagaagctccagtcagcccacaagatgccattgtcccccggcctcctgctgctgctgctctccggggccacggccaccgctgccctgcccctggagggtggccccaccggccgagacagcgagcatatgcaggaagcggcaggaataaggaaaagcagcctcctgactttcctcgcttggtggtttgagtggacctcccaggccagtgccgggcccctcataggagaggaagcccgggaggtggccaggcggcaggaaggcgcacccccccagcaatctgcgcgccgggacagaatgccctgcaggaacttcttctggaagaccttctcctcctgcaaataaaacctcacccatgaatgctcacgcaagtgtaatgacagacctgaataaaatgtattaagcagcagtgatctttcctctcctccttcccaagtcatttgaaaagtgtttgttatttaaattccaataatgcccaatactgacgtgtcttgagtaatttggaacccaaagtgaagatctttgataaagatttttttgtggttcgactggactgtgctgagtgcgggcactgggcttttcttctgatgttcattatggtgctgggaagctctgtctttgatttaaaataaaatagctaaaggctacacaa

SEQ ID NO: 122533 - DNA, 2873 bp, Homo sapiens
  Payload ID: 3998
  Gene Symbol: COX10
  Gene Name: COX10 heme A:farnesyltransferase cytochrome c oxidase assembly factor
  Uniprot ID: Q12887
  ENST ID: ENST00000261643
  CDS Start-End: 78-1409
ggaagatggcggcgcccagcgtcccgtgaggagagaggacacagggatcccggggagcggccccagactcgtaaattatggccgcatctccgcacactctctcctcacgcctcctgacaggttgcgtaggaggctctgtctggtatcttgaaagaagaactatacaggactcccctcacaagttcttacatcttctcaggaatgtcaataagcagtggattacatttcagcactttagcttcctcaaacgcatgtatgtcacacagctgaacagaagccacaaccagcaagtaagacccaagccagaaccagtagcatctcctttccttgaaaaaacatcttcaggtcaagccaaagcagaaatatatgagatgagacctctctcaccgcccagcctatctttgtccagaaagccaaatgaaaaggaattgatagaactagagccagactcagtaattgaagactcaatagatgtagggaaagagacaaaagaggaaaagcggtggaaagagatgaagctgcaagtgtatgatttgccaggaattttggctcgactatccaaaatcaaactcacagctctggttgtaagtaccactgcagctggatttgcattggctccgggcccttttgactggccctgtttcctgcttacttctgttgggacaggccttgcatcctgtgctgccaactccatcaatcagttttttgaggtgccatttgactcaaacatgaataggacaaagaacagaccgctggttcgtggacagatcagcccattgctagctgtgtcctttgccacttgttgtgctgttccgggagttgccattctgaccttgggggtgaatccactcacaggagccctggggctcttcaacattttcctgtatacctgctgctacacaccactgaaaaggatcagcattgccaacacatgggtcggagctgtggttggggccatcccgcctgtcatgggctggacagcggccacgggcagcctcgatgctggcgcatttctcctgggaggaatcctctactcctggcagtttcctcatttcaacgccctgagctggggcctccgtgaagactactcccggggcggctactgcatgatgtcggtcacccacccgggcctgtgccggcgcgtggcgctgcgccactgcctggccctgctcgtgctgtccgcagcagcccctgtgctggacatcaccacatggaccttccccatcatggcccttcccatcaatgcgtacatctcctacctcggcttccgcttctacgtggacgcagaccgcaggagctcgcggagactgttcttctgcagcctgtggcacctgccgctgctgctgctgctcatgctcacctgcaagcggccgagcggaggcggggacgcagggccccctcccagctgagagcactgggacgcccaccgcccctttccctccgctgccaggcgagcatgttgtggtaattctggaacacaagaagagaaattgctgggtttagaacaagattataaacgaattcggtgctcagtgatcacttgacagttttttttttttttaaatattacccaaaatgctccccaaataagaaatgcatcagctcagtcagtgaatacaaaaaaggaattatttttccctttgagggtctttatacatctctcctccaaccccaccctctattctgtttcttcctcctcacatgggggtacacatacacagcttcctcttttggttccatccttaccaccacaccacacgcacactccacatgcccagcagagtggcacttggtggccagaaagtgtgagcctcatgatctgctgtctgtagttctgtgagctcaggtccctcaaaggcctcggagcacccccttcctggtgactgagccagggcctgcatttttggttttccccaccccacacattctcaaccatagtccttctaacaataccaatagctaggacccggctgctgtgcactgggactggggattccacatgtttgccttgggagtctcaagctggactgccagcccctgtcctcccttcacccccattgcgtatgagcatttcagaactccaaggagtcacaggcatctttatagttcacgttaacatatagacactgttggaagcagttccttctaaaagggtagccctggacttaataccagccggatacctctggcccccaccccattactgtacctctggagtcactactgtgggtcgccactcctctgctacacagcacggctttttcaaggctgtattgagaagggaagttaggaagaagggtgtgctgggctaaccagcccacagagctcacattcctgtcccttgggtgaaaaatacatgtccatcctgatatctcctgaattcagaaattagcctccacatgtgcaatggctttaagagccagaagcagggttctgggaattttgcaagttatcctgtggccaggtgtggtctcggttaccaaatacggttacctgcagctttttagtcctttgtgctcccacgggtctgcagagtcccatctgcccaaaggtcttgaagcttgacaggatgttttcattactcagtctcccagggcactgctggtccgtagggattcattggtcggggtgggagagttaaacaacatttaaacagagttctctcaaaaatgtctaaagggattgtaggtagataacatccaatcactgtttgcacttatctgaaatcttccctcttggctgcccccaggtatttactgtggagaacattgcataggaatgtctggaaaaagcctctacaacttgttacagccttcacatttgtacaattcattgattctcttttccttccacaataaaatggtatacaagaa

SEQ ID NO: 122534 - DNA, 875 bp, Homo sapiens
  Payload ID: 3998
  Gene Symbol: COX10
  Gene Name: COX10 heme A:farnesyltransferase cytochrome c oxidase assembly factor
  ENST ID: ENST00000429152
  CDS Start-End: 111-626
ggcccggaactactcccacaggggggcggggaaggaagatggcggcgcccagcgtcccgtgaggagagaggacacagggatcccggggagcggccccagactcgtaaattatggccgcatctccgcacactctctcctcacgcctcctgacaggttgcgtaggaggctctgtctggtatcttgaaagaagaactatacaggactcccctcacaagttcttacatcttctcaggaatgtcaataagcagtggattacatttcagcactttagcttcctcaaacgcatgtatgtcacacagctgaacagaagccacaaccagcaagtaagacccaagccagaaccagtagcatctcctttccttgaaaaaacatcttcaggtcaagccaaagcagaaatatatgagatgagacctctctcaccgcccagcctatctttgtccagaaagccaaatgaaaaggaattgatagaactagagccagactcagtaattgaagactcaatagatgtagggaaagagacaaaagaggaaaagcggtggaaagagatgaagctgcaagtgtatgatttgccaggaattttggctcgactatccaaaatcaaactcacaggtactttgtttttctgatatacttacttatttgaaactctatctttagtgaaacaaaaagctaattttatttaccacctgaaaagaataatttggaactgcaggtcctgtcttagtatttttcctctcttcaatttaactgggatttgaaattaaattttctgaattctatttacacagaattgtaaatagtattgcattgtaagtattgtattaaaaatagtcaccctttcctttgcaattaaagttgaatgtttatcctgctta

SEQ ID NO: 122535 - DNA, 1384 bp, Homo sapiens
  Payload ID: 3998
  Gene Symbol: COX10
  Gene Name: COX10 heme A:farnesyltransferase cytochrome c oxidase assembly factor
  ENST ID: ENST00000580561
  CDS Start-End: 3-191
ttatggccgcatctccgcacactctctcctcacgcctcctgacaggttgcgtaggaggctctgtctggtatcttgaaagaagaactatacaggactcccctcacaagttcttacatcttctcaggaatgtcaataagcagtggattacatttcagcactttagcttcctcaaacgcatgctctggttgtaagtaccactgcagctggatttgcattggctccgggcccttttgactggccctgtttcctgcttacttctgttgggacaggccttgcatcctgtgctgccaactccatcaatcagttttttgaggtgccatttgactcaaacatgaataggacaaagaacagaccgctggttcgtggacagatcagcccattgctagctgtgtcctttgccacttgttgtgctgttccgggagttgccattctgaccttgggggtgaatccactcacaggagccctggggctcttcaacattttcctgtatacctgctgctacacaccactgaaaaggatcagcattgccaacacatgggtcggagctgtggttggggccatcccgcctgtcatgggctggacagcggccacgggcagcctcgatgctggcgcatttctcctgggaggaatcctctactcctggcagtttcctcatttcaacgccctgagctggggcctccgtgaagactactcccggggcggctactgcatgatgtcggtcacccacccgggcctgtgccggcgcgtggcgctgcgccactgcctggccctgctcgtgctgtccgcagcagcccctgtgctggacatcaccacatggaccttccccatcatggcccttcccatcaatgcgtacatctcctacctcggcttccgcttctacgtggacgcagaccgcaggagctcgcggagactgttcttctgcagcctgtggcacctgccgctgctgctgctgctcatgctcacctgcaagcggccgagcggaggcggggacgcagggccccctcccagctgagagcactgggacgcccaccgcccctttccctccgctgccaggcgagcatgttgtggtaattctggaacacaagaagagaaattgctgggtttagaacaagattataaacgaattcggtgctcagtgatcacttgacagttttttttttttttaaatattacccaaaatgctccccaaataagaaatgcatcagctcagtcagtgaatacaaaaaaggaattatttttccctttgagggtctttatacatctctcctccaaccccaccctctattctgtttcttcctcctcacatgggggtacacatacacagcttcctcttttggttccatccttaccaccacaccacacgcacactccacatgcccagcag

SEQ ID NO: 122536 - DNA, 1509 bp, Homo sapiens
  Payload ID: 3998
  Gene Symbol: COX10
  Gene Name: COX10 heme A:farnesyltransferase cytochrome c oxidase assembly factor
  ENST ID: ENST00000581931
  CDS Start-End: 3-509
ttatggccgcatctccgcacactctctcctcacgcctcctgacaggttgcgtaggaggctctgtctggtatcttgaaagaagaactatacaggactcccctcacaagttcttacatcttctcaggaatgtcaataagcagtggattacatttcagcactttagcttcctcaaacgcatgtatgtcacacagctgaacagaagccacaaccagcaagtaagacccaagccagaaccagtagcatctcctttccttgaaaaaacatcttcaggtcaagccaaagcagaaatatatgagatgagacctctctcaccgcccagcctatctttgtccagaaagccaaatgaaaaggaattgatagaactagagccagactcagtaattgaagactcaatagatgtagggaaagagacaaaagaggaaaagcggtggaaagagatgaagctgcaagtgtatgatttgccaggaattttggctcgactatccaaaatcaaactcacagttttttgaggtgccatttgactcaaacatgaataggacaaagaacagaccgctggttcgtggacagatcagcccattgctagctgtgtcctttgccacttgttgtgctgttccgggagttgccattctgaccttgggggtgaatccactcacaggagccctggggctcttcaacattttcctgtatacctgctgctacacaccactgaaaaggatcagcattgccaacacatgggtcggagctgtggttggggccatcccgcctgtcatgggctggacagcggccacgggcagcctcgatgctggcgcatttctcctgggaggaatcctctactcctggcagtttcctcatttcaacgccctgagctggggcctccgtgaagactactcccggggcggctactgcatgatgtcggtcacccacccgggcctgtgccggcgcgtggcgctgcgccactgcctggccctgctcgtgctgtccgcagcagcccctgtgctggacatcaccacatggaccttccccatcatggcccttcccatcaatgcgtacatctcctacctcggcttccgcttctacgtggacgcagaccgcaggagctcgcggagactgttcttctgcagcctgtggcacctgccgctgctgctgctgctcatgctcacctgcaagcggccgagcggaggcggggacgcagggccccctcccagctgagagcactgggacgcccaccgcccctttccctccgctgccaggcgagcatgttgtggtaattctggaacacaagaagagaaattgctgggtttagaacaagattataaacgaattcggtgctcagtgatcacttgacagttttttttttttttaaatattacccaaaatgctccccaaataagaaatgcatcagctcagtcagtgaatacaaaaaaggaattatttttccctttgagggtctttatacatctctcctccaaccccaccctctattctgtttcttcctcctcacatgggggt

SEQ ID NO: 122537 - DNA, 2497 bp, Homo sapiens
  Payload ID: 3999
  Gene Symbol: COX11
  Gene Name: COX11 cytochrome c oxidase copper chaperone
  Uniprot ID: Q9Y6N1
  ENST ID: ENST00000299335
  CDS Start-End: 140-970
cgactgcaagcgctgccacctgaggagcctggtagccaaggcagcggcaggctcaacccagatctcgcgagacggagcacgcctcgcgagatttgacctctcgtccctgagaggcgggtgggtgttagttcagagggttatgggagggctctggcgtcctggatggaggtgcgttcctttctgtggctggcgctggatccaccctgggtctccaaccagggctgcagagagggtagagccgtttcttaggccagagtggagtgggacaggaggtgccgagagaggactgaggtggcttgggacatggaagcgctgcagccttcgagcccggcatccagcattgcagccgccgcggcggcctaagagctcgaaccctttcacacgcgcgcaggaggaggagcggcggcggcagaacaagacgaccctcacttacgtggccgctgtcgccgtgggcatgctgggggcgtcctacgctgccgtacccctttatcggctctattgccagactactggacttggaggatcagcagttgcaggtcatgcctcagacaagattgaaaacatggtgcctgttaaagatcgaatcattaaaattagctttaatgcagatgtgcatgcaagtctccagtggaactttagacctcagcaaacagaaatatatgtggtgccaggagagactgcactggcgttttacagagctaagaatcctactgacaaaccagtaattggaatttctacatacaatattgttccatttgaagctggacagtatttcaataaaatacagtgcttctgttttgaagaacaaaggcttaatccccaagaggaagtagatatgccagtgtttttctacattgatcctgaatttgctgaagatccaagaatgattaaagttgatcttatcactctttcttacactttttttgaagcaaaggaagggcacaagttgccagttccaggatataattgaagtcagcaactaagtcttccttcaaagttgtgatttttgggaaaatcatatatcctatcttctcaaaggagaaatattgtacaataatatgaaggcttatattttaaataattattttttctcaactaatttttttcacttaaacttgagagaacaagttcagcttttatcataagaaactcatatgcctagctagaatatatgactgactattcaataccatactgaagagtttgatactattaaaataagccgctttgttttttaaatatgcaggcatgggttcagcttaattccataattcccttccagattattaactcttcatacttacagcaatgaatctgacaatgtttttcaaaaatgtatgctcagggttatttgtttcaagtcataggccagaacttctaaccatgtttattgtgtctaaaagagttggttgctattttccttcattatgaatagtcagtattttaaaagctcaaagtagaagaggagtcactaagccctaacagcttgtccaaagatttaaattcttatttcaaatttgatttgtcctttaaggtttagggctattttatattcagagttctgaataattactttgaaactgtagtatcataaaattgaaataaaatacatctactaggctgttagccaaagcatcaccattacaagtccatgaatgttaaaatgtacaggtgggattgtgaagatttactgacatcaaaagttcttctggaaacaaacctttgttaaaaaaaaaaagtattaaattgttttaatagtgatttatttgtcatcaaatgtacaacttattctaaatattttcattttctgtgttctaaatagaaatattaagttgcagtaaaaagagaaaaaaaggctatttagcattacaaagaatcatatttaaaggctgcccaatgtagagtctagtgacctgttcaggacacctgaaatataattaaatgacaattatcaaggttttaacaatttataattctaaaccagaggattataaagaagtgcaaattgacttttacattcaactttagttaaatgaaggcactcagtattcttcctgaataatacattcagtttctcacattttatgctttcatctattcagaattatttcatagtaaaataatctactcttatcacagctgtgtgacgatttctaaatgtaggaaggcctgtgaaacatgacactgcagttaaattggttggcctaaggactaagtaatttttcttctgctgaagttttaagtgagtatttgttccaaacaagttctgttgaaatctcacgctgttgtcaggaatcagtgttatcctggaactgttattctatttaatcttcattatagcagaaatgtgccaccatggctttgacatgttggtaggtattgtcttccaggcttcaaagctgcacagagtctacgttttagagagttggcacctttgatgtggtagtgagctgatcatccactttcttctaaaataaagagaagaaaatggccagta

SEQ ID NO: 122538 - DNA, 1054 bp, Homo sapiens
  Payload ID: 3999
  Gene Symbol: COX11
  Gene Name: COX11 cytochrome c oxidase copper chaperone
  Uniprot ID: Q9Y6N1
  ENST ID: ENST00000572558
  CDS Start-End: 9-704
agagggttatgggagggctctggcgtcctggatggaggtgcgttcctttctgtggctggcgctggatccaccctgggtctccaaccagggctgcagagagggtagagccgtttcttaggccagagtggagtgggacaggaggtgccgagagaggactgaggtggcttgggacatggaagcgctgcagccttcgagcccggcatccagcattgcagccgccgcggcggcctaagagctcgaaccctttcacacgcgcgcaggaggaggagcggcggcggcagaacaagacgaccctcacttacgtggccgctgtcgccgtgggcatgctgggggcgtcctacgctgccgtacccctttatcggctctattgccagactactggacttggaggatcagcagttgcaggtcatgcctcagacaagattgaaaacatggtgcctgttaaagatcgaatcattaaaattagctttaatgcagatgtgcatgcaagtctccagtggaactttagacctcagcaaacagaaatatatgtggtgccaggagagactgcactggcgttttacagagctaagaatcctactgacaaaccagtaattggaatttctacatacaatattgttccatttgaagctggacagtatttcaataaaatacaggcttcaaagctgcacagagtctacgttttagagagttggcacctttgatgtggtagtgagctgatcatccactttcttctaaaataaagagaagaaaatggccagtattcatcctgtccttctctttccccattccttgataactctcttgtctttactgggaagctggagagtcacagtctagtagaagaaagattagaaaaatttcaactgtaggtgcctttgcaacctatcctgggagaccctaaaacatatttagttttagtgcctagagattttcactcctctaacatctctggatacagtgtccctggtcaacatgaagaagttacagaagaacgctttctgatcctggcccctaaagaatttacttgtgctaagtaataaaattcctattg

SEQ ID NO: 122539 - DNA, 2663 bp, Homo sapiens
  Payload ID: 3999
  Gene Symbol: COX11
  Gene Name: COX11 cytochrome c oxidase copper chaperone
  Uniprot ID: Q9Y6N1
  ENST ID: ENST00000576370
  CDS Start-End: 8-838
gagggttatgggagggctctggcgtcctggatggaggtgcgttcctttctgtggctggcgctggatccaccctgggtctccaaccagggctgcagagagggtagagccgtttcttaggccagagtggagtgggacaggaggtgccgagagaggactgaggtggcttgggacatggaagcgctgcagccttcgagcccggcatccagcattgcagccgccgcggcggcctaagagctcgaaccctttcacacgcgcgcaggaggaggagcggcggcggcagaacaagacgaccctcacttacgtggccgctgtcgccgtgggcatgctgggggcgtcctacgctgccgtacccctttatcggctctattgccagactactggacttggaggatcagcagttgcaggtcatgcctcagacaagattgaaaacatggtgcctgttaaagatcgaatcattaaaattagctttaatgcagatgtgcatgcaagtctccagtggaactttagacctcagcaaacagaaatatatgtggtgccaggagagactgcactggcgttttacagagctaagaatcctactgacaaaccagtaattggaatttctacatacaatattgttccatttgaagctggacagtatttcaataaaatacagtgcttctgttttgaagaacaaaggcttaatccccaagaggaagtagatatgccagtgtttttctacattgatcctgaatttgctgaagatccaagaatgattaaagttgatcttatcactctttcttacactttttttgaagcaaaggaagggcacaagttgccagttccaggatataattgaagtcagcaactaagtcttccttcaaagttgtgatttttgggaaaatcatatatcctatcttctcaaaggagaaatattgtacaataatatgaaggcttatattttaaataattattttttctcaactaatttttttcacttaaacttgagagaacaagttcagcttttatcataagaaactcatatgcctagctagaatatatgactgactattcaataccatactgaagagtttgatactattaaaataagccgctttgttttttaaatatgcaggcatgggttcagcttaattccataattcccttccagattattaactcttcatacttacagcaatgaatctgacaatgtttttcaaaaatgtatgctcagggttatttgtttcaagtcataggccagaacttctaaccatgtttattgtgtctaaaagagttggttgctattttccttcattatgaatagtcagtattttaaaagctcaaagtagaagaggagtcactaagccctaacagcttgtccaaagatttaaattcttatttcaaatttgatttgtcctttaaggtttagggctattttatattcagagttctgaataattactttgaaactgtagtatcataaaattgaaataaaatacatctactaggctgttagccaaagcatcaccattacaagtccatgaatgttaaaatgtacaggtgggattgtgaagatttactgacatcaaaagttcttctggaaacaaacctttgttaaaaaaaaaaagtattaaattgttttaatagtgatttatttgtcatcaaatgtacaacttattctaaatattttcattttctgtgttctaaatagaaatattaagttgcagtaaaaagagaaaaaaaggctatttagcattacaaagaatcatatttaaaggctgcccaatgtagagtctagtgacctgttcaggacacctgaaatataattaaatgacaattatcaaggttttaacaatttataattctaaaccagaggattataaagaagtgcaaattgacttttacattcaactttagttaaatgaaggcactcagtattcttcctgaataatacattcagtttctcacattttatgctttcatctattcagaattatttcatagtaaaataatctactcttatcacagctgtgtgacgatttctaaatgtaggaaggcctgtgaaacatgacactgcagttaaattggttggcctaaggactaagtaatttttcttctgctgaagttttaagtgagtatttgttccaaacaagttctgttgaaatctcacgctgttgtcaggaatcagtgttatcctggaactgttattctatttaatcttcattatagcagaaatgtgccaccatggctttgacatgttggtaggtattgtcttccaggcttcaaagctgcacagagtctacgttttagagagttggcacctttgatgtggtagtgagctgatcatccactttcttctaaaataaagagaagaaaatggccagtattcatcctgtccttctctttccccattccttgataactctcttgtctttactgggaagctggagagtcacagtctagtagaagaaagattagaaaaatttcaactgtaggtgcctttgcaacctatcctgggagaccctaaaacatatttagttttagtgcctagagattttcactcctctaacatctctggatacagtgtccctggtcaacatgaagaagttacagaagaacgctttctgatcctggcccctaaagaatttacttgtgctaagtaataaaattcctattgatcaaaa

SEQ ID NO: 122540 - DNA, 1108 bp, Homo sapiens
  Payload ID: 3999
  Gene Symbol: COX11
  Gene Name: COX11 cytochrome c oxidase copper chaperone
  ENST ID: ENST00000571584
  CDS Start-End: 58-750
ctcgcgagatttgacctctcgtccctgagaggcgggtgggtgttagttcagagggttatgggagggctctggcgtcctggatggaggtgcgttcctttctgtggctggcgctggatccaccctgggtctccaaccagggctgcagagagggtagagccgtttcttaggccagagtggagtgggacaggaggtgccgagagaggactgaggtggcttgggacatggaagcgctgcagccttcgagcccggcatccagcattgcagccgccgcggcggcctaagagctcgaaccctttcacacgcgcgcaggaggaggagcggcggcggcagaacaagacgaccctcacttacgtggccgctgtcgccgtgggcatgctgggggcgtcctacgctgccgtacccctttatcggctctattgccagactactggacttggaggatcagcagttgcaggtcatgcctcagacaagattgaaaacatggtgcctgttaaagatcgaatcattaaaattagctttaatgcagatgtgcatgcaagtctccagtggaactttagacctcagcaaacagaaatatatgtggtgccaggagagactgcactggcgttttacagagctaagaatcctactgacaaaccagtaattggaatttctacatacaatattgttccatttgaagctggacagtatttcaataaaatacaggtacatcaaagtgtaaactttacagaatatgataaagatacatgaaacggtttagtatgaaacttagtgttttagtagatcttgtgatttctgaaaacgaatttcttctaaacatcaagctatttttcttcactatctatacctgctatgcagagattgagaaccaaaccaaatggatatctgcttttaagattagaatttgttcttcatccttaaagcagaactcattgagatgaaaagatgctcttaatttatcacagaactgtgtatttaatagtatgcttattaaaatcacgaagtgtactggaatgctaagataaaagaactgtatagtttctgttatgtaatacgagaatagaaatgttattaaaatctttctataatttccagtgcttctgttttg

SEQ ID NO: 122541 - DNA, 495 bp, Homo sapiens
  Payload ID: 3999
  Gene Symbol: COX11
  Gene Name: COX11 cytochrome c oxidase copper chaperone
  ENST ID: ENST00000574821
  CDS Start-End: 1-154
tgcactggcgttttacagagctaagaatcctactgacaaaccagtaattggaatttctacatacaatattgttccatttgaagctggacagtatttcaataaaatacaggtattgtcttccaggcttcaaagctgcacagagtctacgttttagagagttggcacctttgatgtggtagtgagctgatcatccactttcttctaaaataaagagaagaaaatggccagtattcatcctgtccttctctttccccattccttgataactctcttgtctttactgggaagctggagagtcacagtctagtagaagaaagattagaaaaatttcaactgtaggtgcctttgcaacctatcctgggagaccctaaaacatatttagttttagtgcctagagattttcactcctctaacatctctggatacagtgtccctggtcaacatgaagaagttacagaagaacgctttctgatcctggcccctaaagaatttact

SEQ ID NO: 122542 - DNA, 708 bp, Homo sapiens
  Payload ID: 4000
  Gene Symbol: COX14
  Gene Name: COX14 cytochrome c oxidase assembly factor
  Uniprot ID: Q96I36
  ENST ID: ENST00000317943
  CDS Start-End: 301-474
ggcaagccgaatcctagaggctaacccggcaggtgggagggagaaagttgctttctgcaccaatagctgaggcgttcagggttgtccagggacgctaccctcacgtgtctggttccgagtgctgcgttcggctgtgctgggaagttgcgtagacagtggcctcgagaccctgcctgcctgaggaggcctcggttggatgcgaaggagctgcagcatccagtgcctctccatgagaccataagctcctgtatgacagaagccatgttctttttagcggcctccgtagcatgatgggacaagatgccaactggcaagcagctagctgacattggctataagaccttctctacctccatgatgcttctcactgtgtatggggggtacctctgcagtgtccgagtctaccactatttccagtggcgcagggcccagcgccaggccgcagaagaacagaagacctcaggaatcatgtagaactggggggctttttctcctgagcagagaggcccaaggcatgctgtggagagacttcacctgccaccatttccaggtcaacaggactagagcgttgatggttttcaaaccctgttggaagaaagtgcccatggtttctctggttctgccagtttgacagtttatggaggcttttgaatcgtaatagcaatgtgagggtgaggtacacctacagacattaaataatttgctgtg

SEQ ID NO: 122543 - DNA, 739 bp, Homo sapiens
  Payload ID: 4000
  Gene Symbol: COX14
  Gene Name: COX14 cytochrome c oxidase assembly factor
  Uniprot ID: Q96I36
  ENST ID: ENST00000550487
  CDS Start-End: 332-505
ggaagttcaaagccggcctccagccagagtgacggcctgcgcggactcccgccttagtgggcggagttgtgccgcgtctgatgcgcagttccctttatagcgcggcaagccgaatcctagaggctaacccggcaggtgggagggagaaagttgctttctgcaccaatagctgaggcgttcagggttgtccagggacgctaccctcacgtgtctggttccgagtgctgcgttcggctgtgctgggaagttgcgtagacagtggcctcgagaccctgcctgcctgaggaggcctcggttggatgcgaaggagctgcagcatccaggggacaagatgccaactggcaagcagctagctgacattggctataagaccttctctacctccatgatgcttctcactgtgtatggggggtacctctgcagtgtccgagtctaccactatttccagtggcgcagggcccagcgccaggccgcagaagaacagaagacctcaggaatcatgtagaactggggggctttttctcctgagcagagaggcccaaggcatgctgtggagagacttcacctgccaccatttccaggtcaacaggactagagcgttgatggttttcaaaccctgttggaagaaagtgcccatggtttctctggttctgccagtttgacagtttatggaggcttttgaatcgtaatagcaatgtgagggtgaggtacacctacagacattaaataatttgctgtg

SEQ ID NO: 122544 - DNA, 677 bp, Homo sapiens
  Payload ID: 4000
  Gene Symbol: COX14
  Gene Name: COX14 cytochrome c oxidase assembly factor
  Uniprot ID: Q96I36
  ENST ID: ENST00000548985
  CDS Start-End: 270-443
gtggcctcgagaccctgcctgcctgaggaggcctcggttggatgcgaaggagctgcagcatccaggtacgctgccggctagggccgagcaggggctgccagtcccactgcctgcgcgcccacctgggccagtctccgcttgccgcgtcctcccatcccctagtctgcaggcctggtgcccttgaattcacccgcttctgttgcgttgcggaccgcgagctgcactgcttcctgcccaagcccaagctcctcgcagcagtaggggacaagatgccaactggcaagcagctagctgacattggctataagaccttctctacctccatgatgcttctcactgtgtatggggggtacctctgcagtgtccgagtctaccactatttccagtggcgcagggcccagcgccaggccgcagaagaacagaagacctcaggaatcatgtagaactggggggctttttctcctgagcagagaggcccaaggcatgctgtggagagacttcacctgccaccatttccaggtcaacaggactagagcgttgatggttttcaaaccctgttggaagaaagtgcccatggtttctctggttctgccagtttgacagtttatggaggcttttgaatcgtaatagcaatgtgagggtgaggtacacctacagacattaaataatttgctgtg

SEQ ID NO: 122545 - DNA, 580 bp, Homo sapiens
  Payload ID: 4000
  Gene Symbol: COX14
  Gene Name: COX14 cytochrome c oxidase assembly factor
  Uniprot ID: Q96I36
  ENST ID: ENST00000550654
  CDS Start-End: 167-340
tgcgttcggctgtgctgggaagttgcgtagacagtggcctcgagaccctgcctgcctgaggaggcctcggttggatgcgaaggagctgcagcatccaggcgcggtggctcacgccgtaatcccagcactttgggaggccaaggcgagtggatcacaaggggacaagatgccaactggcaagcagctagctgacattggctataagaccttctctacctccatgatgcttctcactgtgtatggggggtacctctgcagtgtccgagtctaccactatttccagtggcgcagggcccagcgccaggccgcagaagaacagaagacctcaggaatcatgtagaactggggggctttttctcctgagcagagaggcccaaggcatgctgtggagagacttcacctgccaccatttccaggtcaacaggactagagcgttgatggttttcaaaccctgttggaagaaagtgcccatggtttctctggttctgccagtttgacagtttatggaggcttttgaatcgtaatagcaatgtgagggtgaggtacacctacagacattaaataatttgctgtgtctgtg

SEQ ID NO: 122546 - DNA, 1717 bp, Homo sapiens
  Payload ID: 4001
  Gene Symbol: COX16
  Gene Name: COX16 cytochrome c oxidase assembly homolog
  Uniprot ID: Q9P0S2
  ENST ID: ENST00000389912
  CDS Start-End: 145-465
attcactaaggaccgagcaccaaataaccaaggaaaaggaagtgagttaaggacgtactcgtcttggtgagagcgtgagctgctgagatttgggagtctgcgctaggcccgcttggagttctgagccgatggaagagttcactcatgtttgcacccgcggtgatgcgtgcttttcgcaagaacaagactctcggctatggagtccccatgttgttgctgattgttggaggttcttttggtcttcgtgagttttctcaaatccgatatgatgctgtgaagagtaaaatggatcctgagcttgaaaaaaaactgaaagagaataaaatatctttagagtcggaatatgagaaaatcaaagactccaagtttgatgactggaagaatattcgaggacccaggccttgggaagatcctgacctcctccaaggaagaaatccagaaagccttaagactaagacaacttgactctgctgattcttttttccttttttttttttttaaataaaaatattattaactggacttcctaatatatacttctatcaagtggaaaggaaattccaggcccatggaaacttggatatgggtaatttgatgacaaataatcttcactaaaggtcatgtacaggtttttatacttcccagctattccatctgtggatgaaagtaacaatgttggccacgtatattttacacctcgaaataaaaaatgtgaatactgctccaaaaacagagtcacgtattccactctccaactacccacatattccttttgcaatagccattagggcatcattttgatatttcattctgatttctgattctctgatttctgattcctaatgaggacagtaggtctggatccaaattctcacagtaaaatcaagcagtaattttctctcatatctattagggaaagaaaaatgatcacagtctgctaagagtcttgattttctttgtaatgcctcacatagtatgataatcagtctccaaagcatcacatgataattacaatgataccattaacatgtcaaggaaattatattatttatggttgtcaaaaattatgaagtagtgtatgattataagcagatatggcaaatttgttcagtaaatccatagatgactacattttgagaaatactaagataatactaaaaattatgccttagcataatttgcatgcaaaattgccctctagtgtttttgttttgttttgagacatagtctcgctctgttcgcccaggctggagtgcaggggcacgatctctgctcactgcaagctctgcttcccgggttcacaccattctcctgcctcagcatcctgagtagctgggactacaggcacatgctgtcacacccggctaattttttgtatttagtagagatggggtttcaccacgttagccaggatggtctccatctcctgaccttgtgatccgcccacctcggcctcacaaattgctgggattacaggtgtgagccaccacgcctggccgaaagttagttgttttgaactcattttctcctttttacccctgcctttatcagcttctaccttctggtttcatgctgagttctagttgcctaaagtctccattgaaacactcctgttataattgccataaaatcataaatccactccccctttctcctcctagtcaaaatttgtattcttttcagcaggttggttttaataaaaagtaaattaagttga

SEQ ID NO: 122547 - DNA, 384 bp, Homo sapiens
  Payload ID: 4001
  Gene Symbol: COX16
  Gene Name: COX16 cytochrome c oxidase assembly homolog
  ENST ID: ENST00000555601
  CDS Start-End: 4-81
ctcatgtttgcacccgcggtgatgcgtgcttttcgcaagaacaagactctcggctatggagtccccatgttggtgtactaggatctgtctgcttgtgagcgtggcgtctttcccatcgtcgaacgcggtcattgttactacccttgattcacaatggatcctgagcttgaaaaaaaactgaaagagaataaaatatctttagagtcggaatatgagaaaatcaaagactccaagtttgatgactggaagaatattcgaggacccaggccttgggaagatcctgacctcctccaaggaagaaatccagaaagccttaagactaagacaacttgactctgctgattcttttttccttttttttttttttaaataaaaatattatta

SEQ ID NO: 122548 - DNA, 684 bp, Homo sapiens
  Payload ID: 4002
  Gene Symbol: COX17
  Gene Name: COX17 cytochrome c oxidase copper chaperone
  Uniprot ID: Q14061
  ENST ID: ENST00000261070
  CDS Start-End: 94-285
gcgactgccggaagtgactgcggacgaatcggcgtttgccgaggctggcatagatttggctgtctccgctcatagctgcttttggcgcgaaagatgccgggtctggttgactcaaaccctgccccgcctgagtctcaggagaagaagccgctgaagccctgctgcgcttgcccggagaccaagaaggcgcgcgatgcgtgtatcatcgagaaaggagaagaacactgtggacatctaattgaggcccacaaggaatgcatgagagccctaggatttaaaatatgaaatggtggtctgctgtgtgaataaataattcctgaagaatgaagaagattaattttgggagttctttgacgaactttgatatgtggaaaaagtatttataatttattgtaagaagaaagtaaaatattactagtggaagatcttcagttgtgtttcttttttgtgttcctcatttgctcacgtggctttttcccccaaaggatatataccaacaaatcttgtaacataaggttcttatgttcttattactatgtcattctgggaactctggatatctgttgtcaggagaaagcagatactgacctcaaccaatgaaatctccagaattaggtgcatagaagtaaaataaccctttaccaattcagaatcagtgtggtagccatatcatctcattcaaca

SEQ ID NO: 122549 - DNA, 430 bp, Homo sapiens
  Payload ID: 4002
  Gene Symbol: COX17
  Gene Name: COX17 cytochrome c oxidase copper chaperone
  ENST ID: ENST00000486606
  CDS Start-End: 1-176
actcaaaccctgccccgcctgagtctcaggagaagaagccgctgaagccctgctgcgcttgcccggagaccaagaaggcgcgcgatgcgtgtatcatcgagaaaggagaagaacactgtggacatctaattgaggcccacaaggaatgcatgagagccctaggatttaaaatatgaaatgggtctcactctgttacccaggctggggtgaagtggcccaatcacagctcattgcagcctcaacctgggaggttcaggtgatcctcccctcagcctcctaagtaactgggactacaggtggtctgctgtgtgaataaataattcctgaagaatgaagaagattaattttgggagttctttgacgaactttgatatgtggaaaaagtatttataatttattgtaagaagaaagtaaaatattactagtggaa

SEQ ID NO: 122550 - DNA, 471 bp, Homo sapiens
  Payload ID: 4002
  Gene Symbol: COX17
  Gene Name: COX17 cytochrome c oxidase copper chaperone
  ENST ID: ENST00000484810
  CDS Start-End: 37-333
ggctgtctccgctcatagctgcttttggcgcgaaagatgccgggtctggttgactcaaaccctgccccgcctgagtctcaggagaagaagccgctgaagccctgctgcgcttgcccggagaccaagaaggcgcgcgatgcgtggtttcgtggtcgggtctctgttgacttatcccgtagcttagtaccgggaaacgatggagagagaggagaacggcaagcttcaaccactcattccttcctacaaattatcatcgagaaaggagaagaacactgtggacatctaattgaggcccacaaggaatgcatgagagccctaggatttaaaatatgaaatggtggtctgctgtgtgaataaataattcctgaagaatgaagaagattaattttgggagttctttgacgaactttgatatgtggaaaaagtatttataatttattgtaagaagaaagtaaaatattactagtggaa

SEQ ID NO: 122551 - DNA, 555 bp, Homo sapiens
  Payload ID: 4002
  Gene Symbol: COX17
  Gene Name: COX17 cytochrome c oxidase copper chaperone
  Uniprot ID: Q14061
  ENST ID: ENST00000468918
  CDS Start-End: 145-336
tttaaattccccacctgtcagagagaagcaggacttcctgtactttttagagcgactgccggaagtgactgcggacgaatcggcgtttgccgaggctggcatagatttggctgtctccgctcatagctgcttttggcgcgaaagatgccgggtctggttgactcaaaccctgccccgcctgagtctcaggagaagaagccgctgaagccctgctgcgcttgcccggagaccaagaaggcgcgcgatgcgtgtatcatcgagaaaggagaagaacactgtggacatctaattgaggcccacaaggaatgcatgagagccctaggatttaaaatatgaaatggtgagtataggtgcttggagaggataaggaaatcaccctgatccaatagctggtaacctgcgaggttacctgtgctgcgtgctgtggggctggttcagtgcctgtggcctggacattgttctttggagcttcctgctggctgtggtctgcctgctccagctggcacacctggtataccgcctgcgtgaggacaccctccctgaggagtttgacct

SEQ ID NO: 122552 - DNA, 660 bp, Homo sapiens
  Payload ID: 4002
  Gene Symbol: COX17
  Gene Name: COX17 cytochrome c oxidase copper chaperone
  Uniprot ID: Q14061
  ENST ID: ENST00000497116
  CDS Start-End: 55-246
cgaggctggcatagatttggctgtctccgctcatagctgcttttggcgcgaaagatgccgggtctggttgactcaaaccctgccccgcctgagtctcaggagaagaagccgctgaagccctgctgcgcttgcccggagaccaagaaggcgcgcgatgcgtgtatcatcgagaaaggagaagaacactgtggacatctaattgaggcccacaaggaatgcatgagagccctaggatttaaaatatgaaatgggtctcactctgttacccaggctggggtgaagtggcccaatcacagctcattgcagcctcaacctgggaggttcaggtgatcctcccctcagcctcctaagtaactgggactacaggtgtgggccaccgtgcctggctaattttttgtgttgttttttagagatggggtttcaccatcttgcccaggctggtctcaacctcttggactcaggcaatcctcctgccttggtctcccaaagtgctgggattaagaggtgtgagccactatgcctggccaagaaatgcttttaagtagggagtgggtatcccacggaagtattgctttctgaaaaatgaaaatggaattgtagcatgctttattcgaataaaactaaagcctcaggccattttttttttaattaaaaagtaaa

SEQ ID NO: 122553 - DNA, 513 bp, Homo sapiens
  Payload ID: 4002
  Gene Symbol: COX17
  Gene Name: COX17 cytochrome c oxidase copper chaperone
  ENST ID: ENST00000490145
  CDS Start-End: 1-137
cgggaaacgatggagagagaggagaacggcaagcttcaaccactcattccttcctacaaatgtgtgttgagtatctgttatgggttaagcactgcgttaggtccgaagatgtagacatggataaagatgcatcttgatataaaggagcttaaagttaatggagacataaaccagtgacttgtatacgacgtgtatcatcgagaaaggagaagaacactgtggacatctaattgaggcccacaaggaatgcatgagagccctaggatttaaaatatgaaatggtgcccctacagacatacaaggagattgttcactgctgcgaggagcaggtcttaactctggccactgaacagacctatgctgtggagggtgagacacccatcaaccgcctgtccctgctgctctctggccgggttcgtgtgagccaggatgggcagtttctgcactacatctttccataccagttcatggactctcctgagtgggaatcactacagccttctgaggaggggg

SEQ ID NO: 122554 - DNA, 6846 bp, Homo sapiens
  Payload ID: 4003
  Gene Symbol: COX18
  Gene Name: COX18 cytochrome c oxidase assembly factor
  Uniprot ID: Q8N8Q8
  ENST ID: ENST00000295890
  CDS Start-End: 93-1094
gttgctggcgcgtgcgcgtatcagccttggctggccggtgtatgtccgctggattgtgaggcccgggatctgggctccgccgtggtgcagaaatgctgtgccggctcggcggtcggtggctgcggccgctccctgccctgcagctttgggctagggacctgccgcttgcgccggttcctacgagcggcgccaagcgccccactctcccagtgtgggcagtggcaccagtctctgcagtacatgcgaacggctggtacgaggccctggccgcgtcttcgccggtgcgggttgcggaggaagtactgctcggcgtgcacgccgccacgggcctgccctggtggggcagcattctgctctccaccgtggccttacggggtgctgtcacgctgcctttggcagcctaccagcactacatcctggccaaggtggaaaatttgcagccagaaataaaaactattgccaggcatcttaaccaagaagttgcagttcgtgcaaatcagttggggtggtccaaaagagatgccaggctcacttatctaaagaatatgaggaggctaatttcagagctatatgtgcgagataactgccaccctttcaaagccactgtgttggtttggattcagcttccaatgtggatcttcatgtcttttgctctccggaatttaagcacgggggcagcacattcagaaggtttttctgttcaggaacagttagctactggtggaattctgtggtttcctgacctcactgcacccgactccacttggattctgcctatctctgttggcgtcatcaatttgttaatagtggagatttgtgctctacaaaaaattggaatgtctcgttttcagacgtatattacgtactttgtccgtgcaatgtcggtgttgatgataccaattgctgcaacggtaccctcatcaattgttctctactggttatgctccagcttcgtgggcctttcacagaatttgctgctgcgttctcctggatttcgccaactttgccgaataccatcgaccaagtcagattcagaaactccttataaagacatatttgctgcctttaataccaagttcatttcaagaaaatgacatattttccaataattttgaaacagttgcaggagtcactatcatctaaatgtatttagacttagaaattcagatgttacttgatttccttttatttaaaatcattaacttcatgaaatattgtaggttaagatgtaatccagaccaggcacagtggctcatgcctgtaatcccagcactttgggaggtcgaggtgggtggatcacctgaggtctggagtttgagaccagcctggccaacatggtgaaaccctgtctgtactaaaataacaaaaaaattagctgggcttagtggcaggtgcctgtaatcccagctacttgggaggctgaggcaggagaatcgcttgaacctggaatacagaggtttcagtgagctgagatcaccccattgcactccagcctggacaacaagagtgaaacgctatcaaagaaaaaaaaaagatgtaatccagatatatttgacagtaattaaaatcttttaaatgttataaatgcagtatgtttgtgaaagtattagaatagaaccaaagtgcctgtctctgtttataaagttacagtttgttagagctaccagaactttggagaatagggttagctactgaatgatggcaagttaaactaaacaatactgcatattactgttttgtaaaataagaggatcagtgagatgattcatgttttttttttttgagatggagtctcactgtgtcacccaggctggagtgcagtggcgcaatctcagctcactgcaacctccatctcccggattccagtgattttcctgcctcagcctccaagtatctgggattgcaggtgcacaccaccacgcccagctaatttttgtatttttagtagagatggggtttcaccatgttggacaggctggtctggaactgctgacctcaactaatccaccctccttggcctcccatagtgctgggattacaggcatgagccacctcacccagcattttttttttttaatttttttaatgagacagagtctctctctgtcacctaggctggagtgcagtggcacgatctcggctcactgcaacctctgcctcccgtgttcaagcaattctcctacctcagcctactgggtagctgggactacaggggtgcaccaccatgcccagctaagttttgtatttttagtagagatgggatttcaccatgttggctaggctggtcttgaactcctggcctcaagtgatctgcccaccttggcctcccaaagtgctgggattacaggcgtgagccactgtgcccagctgagatgtttcttattattttggaggtggagaggattttagacctctttgagcatctgaaaaaaggctatatatgtatggttttctcttcagaaaaatcttaagactcacaatacggggacttccttgttaccaggaagattttctggcaattcctagttaataaatcttattctaatggaacatacattgatcttgagttaatgcgtggttgaaaaaaaaagcgggggcaacttgaaatatatgcagtaaagtagtccatgcatacaagtccctaacatggtagatgatgttgcctcccggccctgctcagaaagaatacaaaaagtgtacattcctttttctataatttaagaagtctggaatacagagtgtaacactgtgtactgctagcacccaaagtggaaaatcttaagcattcagattgtttagtcaaagaagaaaaccagaagggcagttgcctattgaggtgattttaaacctgtttatttgtaaggattaagtaccctaataggcttaaactatgatagaggtttaatacagaaaaaattgacaggtattataaattgtggatccagttacttgcttatttaatttgtaaagaggtaaaattagctctggttgagatatcaagtatggcaggtatttgagaaggctataaatcataattttcatttagttaaaatatggacctgattctgggaaaccctatcattccatctcaatgttttacaataaaataaaaactaaagtgaaattcattagtcatttctttgattgatgtctcttaaattttagttcacctgcttaatgaagttatgacattttttaatagaaaaaatgtacagcatacagaggtaagaattctgcttccctgagaatttattttagacatagatggtggcaattaagactaggttcttttttcatacaagttcctagtcctggtttctgactgtcctattggggcaattgtgctttccaaccacattgaaggaattgaaatatcctcattatttgtggattttatatttgtaaatttgcctccttgctcaaatctatccataaccccagaaccagtacttgcacaagtgcttttgagccatttgtaggcaaaaatgtgagtcacctcccaacagaagtgaaacaaatggtactctgccttctagtttcagctctcataccgtaaacatgtatcctttttgagtctacttagtcccatctcttcctaatttctgttctttttgttggtgattttactgtttaaaatggcctccaaatgccctgctggagtgctttctgatgttcctaagctcaggaaggcttaggagaaaataagtatattagataagcttcattcatgcacaagttataatgctgttggcagagagttcagtgttactgaatcaacaatatgttgcattgttctgttgacaaaaacaaagcttgcagaaacctaaccctgtatgttttctaggagcagtgatttggtattcactacttcagtgtttgtggactttatggaacataagtaccacaaataatgcaaattgactatatttgcagcgtgtacaatcaaggatgcagaggcagaaatgtgtgtgcagcttaggtcatagtaaaaagaggaaagaatttgaggaaaattttgccagttacatattacctctggaataactttgcctttgccgtgtgtgttactgtgtacactcagatatttttctcataatggcctttgccgtgtgtgttactgagtgagtacactcagatatttttctcataatggcatgagggaaatcagtctccttttcccattgtgtttgtcacttttgctgagacgcaaaaaataacgtgctatgatattgtgaaatatgtatttggtctttatccccaatccctgacatccagcggaatctgcagagttaagtgtcttttgtatgctcatgtgatgactggtggctgggggcccctagaaagtttcaggatagggcagatccttgtggccaggagttccagatcagcctgggcaacatagtgagaccttgtctgtacaaaaaagaaagtaggaaaaaacatctttggtttttcctatctccagatacttccttttcaaataaatgaatcttctttcatgtgcataatttaccttgtttactgtgagtccccttgatttcaaaatgtatatttgtatctttacaaatgtatattgtgcttagtttcctgttgctctcccattgtcaaactttcaaacttgaaatttcttttcaaatatatacaggaagtttgagaatacaaggcccttcctccaagatctcaaaataatttctcacaagtgggggttgctgggatcttgggataaacccatgtataaagaaaactggtgtattatgaactgaagtgaatcagttacctgaacttacctgacttcaggatggtaaatactcttgatttttttcttcaggcagattttttttagtaaagagcaaaaaatctgtattgtatttcagaaaattgcaagtctgtggtcttatttctaacagtttgtcatagcctggagcagttccagaacctgaatgaagtcagggctacagaacagggaatatgcatgctcttaagaccccttgatgtcttgctgtctggcttgcctatatcccctcagttgctgaggctctgcgctgggccctgcagagttcaggaaggtttttgtctccttagatgaggactgtaatgtttgtgttacccttccccacaggggtgttacccacccttctcgtccttacaggagatctgtttttcctgtgggtctcatttttgtctctaggccagattcactgtcttaatgaatgcttctcatttcaagagtcaggaagggagactcactcctggatcaatttatagtatttataccattaggatacctgagttcaaaagtatattaatagatagaattggcgtatctgaaatgatcccaaattacttttccctgggaccgttagaagagaaaactgaacaaatcccatcctagtcagatgtcctaagtgggaagatgaggcttacaaaggaaaaccaaaattcttaattgccaccctgacagataacccaggagaaggtgcaaagcctcattaagaacctcgagggaaaagccaaacttggggagaagacttttcaggtacctttaacagcacttaagagctaaagaccatatcttcatctaagaaccacccatttacccgtccaaaccgaaagaacagacttggagacctgaagaacagtggaagcaagacttttaatggcagtcttgcaagattgggtgtctggtgggcaggcacacctggggcagttacagcaggtaatttatctcctagcacacaagtccttcccccagtttctgattggttaagtactatgggattacagtcttcccagacatcgcgtaagtttcattatcccccttgtaaggttatataccccattcccttccccccttaagttttgatttcccaataacgaaactttcttcccttttatgggctgactcctcctctacattctgttcgtttattgtgaccttctaggtgcatgagcagtgcggtttgttacataccaaggctggctgccagtgcttagatttatcatgccttgaaaatggaccatttaaaatgttttcccacagttcacatctcagaggaggtacagaggtcctcctagatgacattgggaaaattgtagttagtgtgaaaaaatgagtgcccaaaaaaaccttggtaccttctgtgttttgttcctattttttttttattggacgcataatctgcttatattttgcacctattcttaaatcacacttataccttcatattttattcttctaagaatcccaggaatcaccttttttttttttttaggagtcacctttaaaattgcctatatgtcagatttaagtcccagaagcagtaggaatgcagaccctagaaaaaaaattaaagaatgtagtttattttttcctctggggtgttaactgcagctactacagaatgcagactttggaatttcaggcataacatctgaaaccatgcaagaatttagatttctgtattaaagctaaatcttcatgtaaatatggtgtaaaacaatgcattatcattataaacactgtgccttacgagctggttcaagcagaacccagataattggaaattatatgaatttatagattttccatttgaaccttattagtgttgtttaaacttgtaataatggatattttctagttatctgttttctttttttcatacactgtgatggtattttatgaaatcatttggttttgggaagttggaatttcctaaagccacagcattaaagtcagataattttatttacccaaaagtttctggaacgctgtggttctgtactgtgtatacaactaaaataagaatataaatttatataaaaataaaaatacaactatataagtaa

SEQ ID NO: 122555 - DNA, 3027 bp, Homo sapiens
  Payload ID: 4003
  Gene Symbol: COX18
  Gene Name: COX18 cytochrome c oxidase assembly factor
  Uniprot ID: Q8N8Q8
  ENST ID: ENST00000449739
  CDS Start-End: 93-482
gttgctggcgcgtgcgcgtatcagccttggctggccggtgtatgtccgctggattgtgaggcccgggatctgggctccgccgtggtgcagaaatgctgtgccggctcggcggtcggtggctgcggccgctccctgccctgcagctttgggctagggacctgccgcttgcgccggttcctacgagcggcgccaagcgccccactctcccagtgtgggcagtggcaccagtctctgcagtacatgcgaacggctggtacgaggccctggccgcgtcttcgccggtgcgggttgcggaggaagtactgctcggcgtgcacgccgccacgggcctgccctggtggggcagcattctgctctccaccgtggccttacggggtgctgtcacgctgcctttggcagcctaccagcactacatcctggccaaggctcacttatctaaagaatatgaggaggctaatttcagagctatatgtgcgagataactgccaccctttcaaagccactgtgttggtttggattcagcttccaatgtggatcttcatgtcttttgctctccggaatttaagcacgggggcagcacattcagaaggtttttctgttcaggaacagttagctactggtggaattctgtggtttcctgacctcactgcacccgactccacttggattctgcctatctctgttggcgtcatcaatttgttaatagtggagatttgtgctctacaaaaaattggaatgtctcgttttcagacgtatattacgtactttgtccgtgcaatgtcggtgttgatgataccaattgctgcaacggtaccctcatcaattgttctctactggttatgctccagcttcgtgggcctttcacagaatttgctgctgcgttctcctggatttcgccaactttgccgaataccatcgaccaagtcagattcagaaactccttataaagacatatttgctgcctttaataccaagttcatttcaagaaaatgacatattttccaataattttgaaacagttgcaggagtcactatcatctaaatgtatttagacttagaaattcagatgttacttgatttccttttatttaaaatcattaacttcatgaaatattgtaggttaagatgtaatccagaccaggcacagtggctcatgcctgtaatcccagcactttgggaggtcgaggtgggtggatcacctgaggtctggagtttgagaccagcctggccaacatggtgaaaccctgtctgtactaaaataacaaaaaaattagctgggcttagtggcaggtgcctgtaatcccagctacttgggaggctgaggcaggagaatcgcttgaacctggaatacagaggtttcagtgagctgagatcaccccattgcactccagcctggacaacaagagtgaaacgctatcaaagaaaaaaaaaagatgtaatccagatatatttgacagtaattaaaatcttttaaatgttataaatgcagtatgtttgtgaaagtattagaatagaaccaaagtgcctgtctctgtttataaagttacagtttgttagagctaccagaactttggagaatagggttagctactgaatgatggcaagttaaactaaacaatactgcatattactgttttgtaaaataagaggatcagtgagatgattcatgttttttttttttgagatggagtctcactgtgtcacccaggctggagtgcagtggcgcaatctcagctcactgcaacctccatctcccggattccagtgattttcctgcctcagcctccaagtatctgggattgcaggtgcacaccaccacgcccagctaatttttgtatttttagtagagatggggtttcaccatgttggacaggctggtctggaactgctgacctcaactaatccaccctccttggcctcccatagtgctgggattacaggcatgagccacctcacccagcattttttttttttaatttttttaatgagacagagtctctctctgtcacctaggctggagtgcagtggcacgatctcggctcactgcaacctctgcctcccgtgttcaagcaattctcctacctcagcctactgggtagctgggactacaggggtgcaccaccatgcccagctaagttttgtatttttagtagagatgggatttcaccatgttggctaggctggtcttgaactcctggcctcaagtgatctgcccaccttggcctcccaaagtgctgggattacaggcgtgagccactgtgcccagctgagatgtttcttattattttggaggtggagaggattttagacctctttgagcatctgaaaaaaggctatatatgtatggttttctcttcagaaaaatcttaagactcacaatacggggacttccttgttaccaggaagattttctggcaattcctagttaataaatcttattctaatggaacatacattgatcttgagttaatgcgtggttgaaaaaaaaagcgggggcaacttgaaatatatgcagtaaagtagtccatgcatacaagtccctaacatggtagatgatgttgcctcccggccctgctcagaaagaatacaaaaagtgtacattcctttttctataatttaagaagtctggaatacagagtgtaacactgtgtactgctagcacccaaagtggaaaatcttaagcattcagattgtttagtcaaagaagaaaaccagaagggcagttgcctattgaggtgattttaaacctgtttatttgtaaggattaagtaccctaataggcttaaactatgatagaggtttaatacagaaaaaattgacaggtattataaattgtggatccagttacttgcttatttaatttgtaaagaggtaaaattagctctggttgagatatcaagtatggcaggtatttgagaaggctataaatcataattttcatttagttaaaatatggacctgattctgggaaaccctatcattccatctcaatgttttacaataaaataaaaactaaagtgaaattca

SEQ ID NO: 122556 - DNA, 1083 bp, Homo sapiens
  Payload ID: 4003
  Gene Symbol: COX18
  Gene Name: COX18 cytochrome c oxidase assembly factor
  Uniprot ID: Q8N8Q8
  ENST ID: ENST00000510031
  CDS Start-End: 78-461
gcgtatcagccttggctggccggtgtatgtccgctggattgtgaggcccgggatctgggctccgccgtggtgcagaaatgctgtgccggctcggcggtcggtggctgcggccgctccctgccctgcagctttgggctagggacctgccgcttgcgccggttcctacgagcggcgccaagcgccccactctcccagtgtgggcagtggcaccagtctctgcagtacatgcgaacggctggtacgaggccctggccgcgtcttcgccggtgcgggttgcggaggaagtactgctcggcgtgcacgccgccacgggcctgccctggtggggcagcattctgctctccaccgtggccttacggggtgctgtcacgctgcctttggcagcctaccagcactacatcctggccaagctaggtggaaaatttgcagccagaaataaaaactattgccaggcatcttaaccaagaagttgcagttcgtgcaaatcagttggggtggtccaaaagagatgccaggctcacttatctaaagaatatgaggaggctaatttcagagctatatgtgcgagataactgccaccctttcaaagccactgtgttggtttggattcagcttccaatgtggatcttcatgtcttttgctctccggaatttaagcacgggggcagcacattcagaaggtttttctgttcaggaacagttagctactggtggaattctgtggtttcctgacctcactgcacccgactccacttggattctgcctatctctgttggcgtcatcaatttgttaatagtggagatttgtgctctacaaaaaattggaatgtctcgttttcagacgtatattacgtactttgtccgtgcaatgtcggtgttgatgataccaattgctgcaacggtaccctcatcaattgttctctactggttatgctccagcttcgtgggcctttcacagaatttgctgctgcgttctcctggatttcgccaactttgccgaataccatcgaccaagtcagattcagaaactccttataaagacatatttgctgcctttaataccaagttcatttcaagaaaatga

SEQ ID NO: 122557 - DNA, 1086 bp, Homo sapiens
  Payload ID: 4003
  Gene Symbol: COX18
  Gene Name: COX18 cytochrome c oxidase assembly factor
  ENST ID: ENST00000507544
  CDS Start-End: 44-1048
tggattgtgaggcccgggatctgggctccgccgtggtgcagaaatgctgtgccggctcggcggtcggtggctgcggccgctccctgccctgcagctttgggctagggacctgccgcttgcgccggttcctacgagcggcgccaagcgccccactctcccagtgtgggcagtggcaccagtctctgcagtacatgcgaacggctggtacgaggccctggccgcgtcttcgccggtgcgggttgcggaggaagtactgctcggcgtgcacgccgccacgggcctgccctggtggggcagcattctgctctccaccgtggccttacggggtgctgtcacgctgcctttggcagcctaccagcactacatcctggccaaggtggaaaatttgcagccagaaataaaaactattgccaggcatcttaaccaagaagttgcagttcgtgcaaatcagttggggtggtccaaaagagatgccaggctcacttatctaaagaatatgaggaggctaatttcagagctatatgtgcgagataactgccaccctttcaaagccactgtgttggtttggattcagcttccaatgtggatcttcatgtcttttgctctccggaatttaagcacgggggcagcacattcagaagcaggtttttctgttcaggaacagttagctactggtggaattctgtggtttcctgacctcactgcacccgactccacttggattctgcctatctctgttggcgtcatcaatttgttaatagtggagatttgtgctctacaaaaaattggaatgtctcgttttcagacgtatattacgtactttgtccgtgcaatgtcggtgttgatgataccaattgctgcaacggtaccctcatcaattgttctctactggttatgctccagcttcgtgggcctttcacagaatttgctgctgcgttctcctggatttcgccaactttgccgaataccatcgaccaagtcagattcagaaactccttataaagacatatttgctgcctttaataccaagttcatttcaagaaaatgacatattttccaataattttgaaacagttgcaggagtca

SEQ ID NO: 122558 - DNA, 3666 bp, Homo sapiens
  Payload ID: 4004
  Gene Symbol: COX19
  Gene Name: COX19 cytochrome c oxidase assembly factor
  Uniprot ID: Q49B96
  ENST ID: ENST00000344111
  CDS Start-End: 91-363
gtgctcggcgctcccggggtgcctgctcggcgctccgccggccgccctgcgtacgctcgcaaggcgctcgcagactccggagtcgccaacatgtcgaccgccatgaatttcgggaccaagagcttccagccgcggcccccggacaagggcagcttcccgctggatcacttaggtgaatgtaaaagctttaaagagaaattcatgaagtgtcttcataacaataattttgaaaatgctttgtgcagaaaggaatcaaaagaatatttagaatgcaggatggagagaaaattgatgctacaagaaccattggagaaactgggatttggagacttgactagtggaaaatcagaggcaaaaaaatgaattttgatgagaagacccctgggccgtgttcagtggtctctcaggacggagggcatcatcctgcctcttaggttggctgaggcctgcgtgtggtgtccttagaaatgggcttcgaatagaagctccagccctgtgggggcgtctcctgggtagggagtggcgtcccgttttcccttaggagggtgtttctgcattgaacccctgagtgggacggcgttcccggcaaagctgggagggaggcgagcgtggggcaagacccttgtcttcgaggccggggccctcttgtatggggcggttttatgttgcagtcctctgatactttctgagttcaaagaggtaaatgtataaatttcagtcccttctgaacacagatatcatcagaaaattaccattccctagcaggatgttttcgtgtttgtattcgtatatgccagttcatttcctttgaaaaaaaaaaaaagtggaacacaaagtaggaagtgagaaccttctggctttggatggattgacttcttgattctttctggttttgcctgaacaccaagtagcttcataatcaaagggtcattttctggtttgtatcagaccgtatttataaagttgggtatttaatttcagtaactcctgtattttaacagaaaaagaacctgagtccatttgcagttaggctcgcaccagctgtcttctgtgccagccagctccgcccgagaccccggcacgtgttcgcagcacagcctggcaggggccctgagcggagttctcagcccgtctgtgccaaagttgcctgtgggtcacggaaacccggcccatgtccacccagtgcgtcaggccagccggggcccaaacctgtggatggaacgcaggtgcctgcacatctggggcctcagccagacctgtctccttcccaggcactgtcggaaaggggctggctcctgtctggtcagtggaggatggtggcaggagacggggtggggaggtccaggtcacgtcctctctggcgaccctggcagtggctgtctccaagccctggcaggtggggccaccaatctggccgacctcaggctctgggaaacaggctgccctcgtccctctgcctgtgggtggctgaggcttctcagcccatctccagttctctgcagcaaaggccctctgtttctgtcctgcagtggtggccctttcgtggttaaacatgtccctcccctcctcacagaactgagtacctattgcggctgggcccgcccaaccctgtgtccctgcacccatgggttctaccacctgattcggctgcagctgtcactgtcccgtgtctgctctctgtcaggcctctgagtgctgcagacgtattaacatatcaccgctagttgatggaaagtcttgtttcttattagaatattttgtgtaggcacagggttgccccagcactgtctatagcaaccccagtgtcctcacagtgcacgtgagccgtgacgcagccaccgtggagtcggcgctgacgcggtgtggccacgtgccatgagctcgccaacgcagtgcggctatatggcgtgagcttactgtgaagtggagacaggcagggacacaggaaactacaaacgagaaatccagaaggaggagctggaactgatgggcatagccggccgcgagcccctccgagcacccctgggggtggagttctggctgtcatggcagagggtttcacatgctcaaaaagtaaatgaaccaggatgtgaggggaacacaacagaccatgccgacggagctcccgggcccaggccggggcctcttcccatcgcactctgacccgccgtcgggagtgcccaggcccgggtcgggcctgcctctccgctcgcaccgcactctgacccatcaggagtgtggggaagaccgtcgaccaaaggtgggaaagacaggaaagatactgtactctaagtagtaaatttgttttttgcgtggacgattctgaagctgtattctgagatggaaaaaactagaaatacatcgtggatgatgagagccaggtgtattgagctcctgcttttctaacgtacaaaggtaactggatagagaaacggagtgatcgccctcacctggccagggtgtgctccgagaccccagcaggtgccgaagccgcggatagtcccgaatcctgtccaggcgctgttttttcctgtacgtacctgtgatcaagtctgagatgtgacagcaaaactgacagaacttcgtgcttccctcttcaaaatgtcacagatgggcactgtgttcttaccggagatcttagcaacctcggcatctggctgtttttcttataggtcaggagtttccaccttttcccttaaaggaagcgcttggcagcttctctggtgtgtctgagtcgccagcatcaccactgtcctgttctggggccattcttaagtaaaataaaagcttcttggacccaagcaccacatcaccgcgatggctggtctgatcaccgagatggctgctgagtgcctggcaggcagggtggcgtggatggcccgaaacgctggacggagggagggttgatgtcccagcaggacggctgctcagaacagcacagaatcaaaaactcatgaatggtttatttctggaattttccacttagtatttttggactgtggctgaccatgggtaactgaaaccgtgtgtaagggggactgttgtgaggggctgtgcacaaatgcttcccagctcttgagggcctggacgcagtgacccgtgcactcagggtcttggccctgataccattctgtaaccaaaaggaaccagggccaggccagagaaggtatcagatgagctagagagtgaagaattgctgggatgaggagacttgttgaaataacacggggggatgggaaggagcatacggtggccagcctggggcagtgtgagcgtgaaaataaacaggctgggcgcagcggctcacgcctgcaatcccagcactttaggaggccaaggtgggaggatcacttgaggctaggagttcaagaccagcctgggcaacatgggtgaaaccctgtctctacaaaacaagaaaagtcagccgtgcgtggtgtcacccgcctgtagtcccagatactcaggaagctgaggcaggaggatcacttgagccagaggttaagtctgcagtgagctgtgattgtaccactgctctccagcctgagcaacagagccggaccctgtctcaccaaaggaaaaaaaaaaaaaaaaaagaaagaaaattaattattgtaatgggctgtagccctcagaataaattgatatccagtagtctatacaacataa

SEQ ID NO: 122559 - DNA, 1420 bp, Homo sapiens
  Payload ID: 4004
  Gene Symbol: COX19
  Gene Name: COX19 cytochrome c oxidase assembly factor
  ENST ID: ENST00000457254
  CDS Start-End: 41-409
gtacgctcgcaaggcgctcgcagactccggagtcgccaacatgtcgaccgccatgaatttcgggaccaagagcttccagccgcggcccccggacaagggcagcttcccgctggatcacttaggtgaatgtaaaagctttaaagagaaattcatgaagtgtcttcataacaataattttgaaaatgctttgtgcagaaaggaatcaaaagaatatttagaatgcaggatggagagatcccgactgggcctcctacactctgggcgtcttcatctgcctgagctgctcgggaatccaccggaatatcccccaggtcagcaaggtgaagtccgtccgcctggacgcctgggaggaggcccaagtggagttcatggcctcccacgggaacgacgccgcgagagccaggtttgagtccaaagtaccctccttctactaccggcccacgccctccgactgccagctccttcgagagcagtggatccgggccaagtacgagcgacaggagttcatctacccggagaagcaggagccctactcggcagggtaccgtgagggttttctctggaagcgtggccgggacaacgggcagtttttgagccggaagtttgtgctgacagaacgagagggtgctctgaagtatttcaacagaaatgatgccaaggagcccaaggccgtgatgaagatcgagcacctgaacgccaccttccagccggccaagatcggccacccccacggcctgcaggtcacctacctgaaggacaacagcacccgtaacatcttcatctaccatgaggacgggaaggagattgtggactggttcaatgcactccgagctgctcgcttccactacctgcaggtggcattcccaggggccggcgacgcagatctggtgccaaagctctccaggaactacctgaaggaaggctacatggagaagacggggcccaagcaaacggaaggcttccggaagcgctggttcaccatggatgaccgcaggctcatgtacttcaaagaccccctggacgccttcgcccgaggggaagtcttcattggcagcaaggagagtggctacacggtgctgcatgggttcccgccgtccacccagggccaccactggccacatggcatcaccatcgtcacgcccgaccgcaagtttctgtttgcctgcgagacggagtccgaccagagggagtgggtggcggccttccagaaggcggtggacaggcccatgctgccccaggagtacgcagtggaggcgcacttcaagcataaaccttagcgagtgcggctggaggaccacggacattggactcactgtggctggacggaggggacccgtggatgggggggctctggcgtcctgaggccacctggccccacctgctcctcagggcagcccggcgcggccaggtagggcccgag

SEQ ID NO: 122560 - DNA, 568 bp, Homo sapiens
  Payload ID: 4005
  Gene Symbol: COX20
  Gene Name: COX20 cytochrome c oxidase assembly factor
  Uniprot ID: Q5RI15
  ENST ID: ENST00000366528
  CDS Start-End: 100-492
gcggcgcgtgggggcgggacggggaggggcgcggccagccgggcttctgcttccgcgaccccggcggtgcagggcgggtggagtcgcggagtagtcctcatggccgccccgccggagcccggtgagcccgaggagaggaaggcatcttgtacgtcgttacatttatcatattggaagtcccttaagctcctaggatttttagatgttgaaaatactccctgcgcccggcattcaatattgtatggttcattaggatctgttgtggctggctttggacattttttgttcactagtagaattagaagatcatgtgatgttggagtaggagggtttatcttggtgactttgggatgctggtttcattgtaggtataattatgcaaagcaaagaatccaggaaagaattgccagagaagaaattaaaaagaagatattatatgaaggtacccacctcgatcctgaaagaaaacacaacggcagcagcagcaattgaacaatcttgagcatagaagtcaatgtaaacgaagttaagatcaaccacataaaacatttcatgtgcaataagctct

SEQ ID NO: 122561 - DNA, 2631 bp, Homo sapiens
  Payload ID: 4005
  Gene Symbol: COX20
  Gene Name: COX20 cytochrome c oxidase assembly factor
  Uniprot ID: Q5RI15
  ENST ID: ENST00000411948
  CDS Start-End: 394-750
gcgccggagacggttagaaatggcggttggggcggagcagggggctggcgcgggaagcggggctgtctggctcggttacgcccccacctcgccaggaatctaggagtcggtttgttttccgaacccatctccttccgctctcccgcccctgcaggctgtgtgccgagcttggaagaaagtgtgacccgttcgacggaacaaaggacatgacagcccggccccgtgcggccactgcggagcgttaggaacattccctaaaatggcggccggcgcgtcggaacagggcgggaggcggcggcgcgtgggggcgggacggggaggggcgcggccagccgggcttctgcttccgcgaccccggcggtgcagggcgggtggagtcgcggagtagtcctcatggccgccccgccggagcccggtgagcccgaggagaggaagtcccttaagctcctaggatttttagatgttgaaaatactccctgcgcccggcattcaatattgtatggttcattaggatctgttgtggctggctttggacattttttgttcactagtagaattagaagatcatgtgatgttggagtaggagggtttatcttggtgactttgggatgctggtttcattgtaggtataattatgcaaagcaaagaatccaggaaagaattgccagagaagaaattaaaaagaagatattatatgaaggtacccacctcgatcctgaaagaaaacacaacggcagcagcagcaattgaacaatcttgagcatagaagtcaatgtaaacgaagttaagatcaaccacataaaacatttcatgtgcaataagctctcaatcaagtaaataaagtttaagttgtagtcatttttttcccacacttgtgtggaatgaaaacttgccagtttattctggccctgtgtctactgccaggatagcattcttacgtgttacatatagtggacttgtcatccttaaaatgtgaacagaatttattggcagtgtggcaaagaattataaaacatagtgtttaatgtacttggagtttccttgtagtagtaagtatagagtttgatgataagtaaacgtcccttaacaaaaacctcaaccttattactatcccattaaaaaacagcaaatacttactgagttcttgtaagagctaatgtcattgtaagatttaaaactaagggcttttatcactttgcaaattattttttaaatgcattcatcatttgacagtgttctctcatttcttaaaatgcgagtcatcttccaaaagagttgtttttaactgccctaaacatttttggggaagtatgcagggtttaaatttttaagtataattagttctgaattaaaatatgcacatggaacttgtctggcagactgatgcaatagtaaaacaactgcagaattactattaatgtaaacaatccatttgaaagtcaatcagctgctcccattaaaatattatttaaaatacaatacccacagcatctaactaaatcctcaggatttattctccgggagaaattatccctttctaggaaaatgaagttatttctggttttaattcatacaatactttaagaaaatctgttaaatataacaaaacacaagctagatgcttaagaaatgcttaaagaaatattggggcgaaggtaacagcagtcaacaggattgtggccattactggtcctattattttgatgtaccatggaaggcacagaaatcgagcaaggaagaaaatattagttattttgatctacatctttttctaaagaaaagtggagcttgcctccagttcaattcacaagagcattttccctcccatgcccaccttttcttgtggctgtcgctaggaaggatgcagaggctgtgtggtttaccaaatgccttaacttagcagtgaatgacaactgtcaaacacatgttgagggaaaatttttactgattcacaaaaaggaagacagtttgcccactcttagtggcacaaatcaaagctgcatgcactacattatccaaattagtcgtaaccaaatagttaaaaaattctgctgggcacggtggctcatacctgtaatcccagcactttgggaggccgaggcagttggatcacctgaggttaggagtttgagaccagcctggccaacagggtgaaaccctgtctcgtctaaaaatacaaaaattagccgggcgtggtggtgcatgcctgtagtcccaggtactcaggaggctgaggcaggagaatcacttgaacccgaggtggggcaggcggaggttgcagtaagccaagatcgcgccattgcactctagcctaggtgacagagtgagactccatctcaaaaaaaaaaaaaaattccataggatgttcaaccatgttttcagaggccgcactgcatgaatgcgggaaaatgttgatgatcactaatcaataatctgatatttaacaaaatatggacaggccacttatgctcagttttaccttagttattccttggtatccacaggcccaagtccctttaaataaaataccctcatatttccatataatctacatacattctcccatatactttaaatcatctctagattacttataatgtctaatacaaaataaatgctatgtaaatgtaa

SEQ ID NO: 122562 - DNA, 6254 bp, Homo sapiens
  Payload ID: 4006
  Gene Symbol: CXADR
  Gene Name: coxsackie virus and adenovirus receptor
  Uniprot ID: P78310
  ENST ID: ENST00000284878
  CDS Start-End: 749-1846
cagggctagaatagcctttctgtgcaagtggaaaaaacctcaggtatttcccaaatcggtagctgcagaggggctctatccctaccagagatggagaaaagccctctcgcgctttttatgtcagccagagcggctcgttaagagagcgaaggccaggggctgcacaggtcgcatcccgtgagcatgaggtcagagaacctgcccctggggcaaaccgcgaggggtgggacgggtgggtgcaggcggggcggagggtaggagccgccctagtggcggcccctgggagtgtcccgtgcctcgccttaaaggagggcgccaacgcaatttcagtatgtgggagacgggctgccccacccccgcgcgcaaaaccctggtttagcttaagggatggaggcggggacccctgcgcaggcttgcggcgtgggaggcggccgcccgcgacctacgacgccgcgcgccgggaggctgagagttcggcgccgggagggtcccggggacagaagagcgcctcgcccggttgccaaggcaaccccacgcggctggagaagccggcgctcgcagcccggcccgggccgctgccggaagtgacgcgagttcacctgccgagcgggggctgggaggaggggcggagggtgcagaggtgccgccgccgccgcgagccagtcgggagcgcgcgaggcgcggggagcctgggaccaggagcgagagccgcctacctgcagccgccgcccacggcacggcagccaccatggcgctcctgctgtgcttcgtgctcctgtgcggagtagtggatttcgccagaagtttgagtatcactactcctgaagagatgattgaaaaagccaaaggggaaactgcctatctgccatgcaaatttacgcttagtcccgaagaccagggaccgctggacatcgagtggctgatatcaccagctgataatcagaaggtggatcaagtgattattttatattctggagacaaaatttatgatgactactatccagatctgaaaggccgagtacattttacgagtaatgatctcaaatctggtgatgcatcaataaatgtaacgaatttacaactgtcagatattggcacatatcagtgcaaagtgaaaaaagctcctggtgttgcaaataagaagattcatctggtagttcttgttaagccttcaggtgcgagatgttacgttgatggatctgaagaaattggaagtgactttaagataaaatgtgaaccaaaagaaggttcacttccattacagtatgagtggcaaaaattgtctgactcacagaaaatgcccacttcatggttagcagaaatgacttcatctgttatatctgtaaaaaatgcctcttctgagtactctgggacatacagctgtacagtcagaaacagagtgggctctgatcagtgcctgttgcgtctaaacgttgtccctccttcaaataaagctggactaattgcaggagccattataggaactttgcttgctctagcgctcattggtcttatcatcttttgctgtcgtaaaaagcgcagagaagaaaaatatgaaaaggaagttcatcacgatatcagggaagatgtgccacctccaaagagccgtacgtccactgccagaagctacatcggcagtaatcattcatccctggggtccatgtctccttccaacatggaaggatattccaagactcagtataaccaagtaccaagtgaagactttgaacgcactcctcagagtccgactctcccacctgctaaggtagctgcccctaatctaagtcgaatgggtgcgattcctgtgatgattccagcacagagcaaggatgggtctatagtatagagcctccatatgtctcatctgtgctctccgtgttcctttcctttttttgatatatgaaaacctattctggtctaaattgtgttactagcctcaaaatacatcaaaaaataagttaatcaggaactgtacggaatatatttttaaaaatttttgtttggttatatcgaaatagttacaggcactaaagttagtaaagaaaagtttaccatctgaaaaagctggattttctttaagaggttgattataaagttttctaaatttatcagtacctaagtaagatgtagcgctttgaatatgaaatcataggtgaagacatgggtgaacttacttgcataccaagttgatacttgaataaccatctgaaagtggtacttgatcatttttaccattatttttaggatgtgtatttcatttatttatggcccaccagtctcccccaaattagtacagaaatatccatgacaaaattacttacgtatgtttgtacttggttttacagctcctttgaaaactctgtgtttggaatatctctaaaaacatagaaaacactacagtggtttagaaattactaattttacttctaagtcattcataaaccttgtctatgaaatgacttcttaaatatttagttgatagactgctacaggtaatagggacttagcaagctcttttatatgctaaaggagcatctatcagattaagttagaacatttgctgtcagccacatattgagatgacactaggtgcaatagcagggatagattttgttggtgagtagtctcatgccttgagatctgtggtggtcttcaaaatggtggccagccagatcaaggatgtagtatctcatagttcccaggtgatatttttcttattagaaaaatattataactcatttgttgtttgacacttatagattgaaatttcctaatttattctaaattttaagtggttctttggttccagtgctttatgttgttgttgtttttggatggtgttacatattatatgttctagaaacatgtaatcctaaatttaccctcttgaatataatccctggatgatattttttatcataaatgcagaataatcaaatacattttaagcaagttaagtgtcctccatcaattctgtattccagacttgggaggatgtacagttgctgttgtgtgatcaaacatgtctctgtgtagttccagcaaatcaagctgagctttgaaaaagtttgtcttagttttgtgaaggtgatttattcttaaaaaaaaaaaagaaagaaaaagaaaaaaagataagaaggaggagtaaagggactactcctccttgccaaatgtgctaaatatcattttaggagaagaaagtgggtttattgtatttcccttaagattgtgagggagtgtggatacagtagaatgagccaacagtttctttataataaatacggtctgcaataaattatttcactagctctaaaacctttccctagattttagtagggagttggtttctgttaatatctttgggtgctgtggtggtaaatgctatattatgaacggtggcatgtatttacagttagagtattgtgtgtacactttttaatggtaaacttaagctgaatgtgtaatggatttgtgtatagttttacatatttggaagcattttaaaaacaggttttaaccttatgtaaaattacttttatactcgtgttaacattttcatctgtgccttttggtaatttaatttctattatgaatttctggtgcctatgagctagctatcacctacctgaaaggtgcttagaggtgaaggtactgtttctaaaaacacatcactgtgatacctttctatcctcacattttcaagcttgcctcttttctgttctttgtggatataacttaagcaattgtgttattcataaaggtttagaaatttcaatattcccaacactctatgtttctgattttataacagtagccatttttgaaagtcagatgtttggcctgttttatatgaataaagtttatttataaaatattataaaaaataagtaaataaacagaacattaataataaagttttggttcttcctattcctgactttcatataatgaaaattatcctattgatctaagtagaagttatcatagaaagtggacacgtataagactttccttcctttttttttttaataacatatgaggaacaagacttctcttcccatatacttcatattttagaggacattgttttaaaggcttatgtctcactgtaaaattctgtcagccaaatagtaccaatacgttttcaagtagttctcactgataatttagttgaaccagagatcaaatatttgctcccgaattactactggtaatcaagtagttgaacaaaaaattactaaagcatttccgttagatcagtcaaggacagtactgcatctttttttttttttttttttttaagacggagtctcggtctgtcacccaggctggagtgcagtggcgggatctcggctcactgcaagctccgcctcccaggttcacgccattctcctgcctcagcctcccgagcagctgggactacaggctcccatcaccacgctcggctaagtttttgtaattttagtagagacagggtttcaccgtgttagccaggatggtctcgatctcctgacctcgtgatctgcctgcctcggcctcccaaagtgctgggattacaggcgtgaaccactgcacccggcccagtactgcatcttaacagcaaagccattttattctactttataactgagagacttgataccatccatctctttaggttacagaggataatttgaagagaaatgttactgtagaatatatagttctgtactttttttttttttttttaagagatagggtttcactattgctcaggctggtctcaaactgctgggctcaggagatcctcctgccttggcctcccaaattgctgggattacaggtgtgagccgcagcatccagccagttctgtactttgaatatggagtagtttacagctatttttttttcttactggtaatcttaactaatatgattcccttgttagagagcctctcactcccccacccccaaaaatgtctactattcatgacagtaaccaattattctggacaaattgcttctttttaatttgagctatctgccatggactttctaaaatggaaacacagcctgagtgtatcttagggagagtttgattgaaaaaatccaaatcactatccatatagatcatggatataaagagatacctgatttttattaaaaagatactttttcaaatttaagagttaatcttggaaatttggaacaagtaaaggggcaagtaaaccttttgatgaaatataaaaggaactcattgcatgaagttgactatcaaattctgtgatgtgtggcttcttaaaaatattctcagtgtcttttgtgtgcgtgcagcatgtacatttgatgttatgtgaatgttgagttttttcttctaattttcacttcagcagtgtttagggctttcagatgccttattccagtgtgaacagaaaaagttcatattttatgtggttaatgctttgatgtgtcacataaagagtagtttgtagaaaatgttggcacaattttaacttcttagtggcttgtgacattatatattatatatatatatgtacatatatctttataacattcctgtgtttagtagtgtaaatgttctgggcaagttttaatattttgaatgcctttggatattccagcaataaaggcatcatgttctgcaataggatttcttactcatttacctattttaacactaaaatagaccacaactgagcacaaattccttttataaatgttatagaagcagggaagaataataaacacatttgtgaattgtggttcagtttatttatctttagggaaggctgatcatttatcttatagcagataaccccagcctcttattcattatggttaacttttataatttatcttattttataatttaagaatatagtacatatcagttgggtttggttttggtcatcgagactaaaagctccatcaaaacagaactttgtgttttctgctaacttatttaatgacacaagttttaagagaaccacaattcattgattcacttattcttttccctaattgtgaattttagtgataaatacacctgtactactgaggaaaatattctgacacttcacgtgtgcaaagtatagaactgacagtgtcagtttcagattttgtatgtacgatttctggcttatatatccaatggtgcagattttgaaatttgtaagaacaaaatttgttaagaaaaacaacttgctctagttttgtgaccttgtgtacttttgaaataaaatcaagaaagcagt

SEQ ID NO: 122563 - DNA, 270 bp, Homo sapiens
  Payload ID: 4006
  Gene Symbol: CXADR
  Gene Name: coxsackie virus and adenovirus receptor
  Uniprot ID: P78310
  ENST ID: ENST00000356275
  CDS Start-End: 1-270
atggcgctcctgctgtgcttcgtgctcctgtgcggagtagtggatttcgccagaagtttgagtatcactactcctgaagagatgattgaaaaagccaaaggggaaactgcctatctgccatgcaaatttacgcttagtcccgaagaccagggaccgctggacatcgagtggctgatatcaccagctgataatcagaaggtggatcaagtgggaagatgtgccacctccaaagagccgtacgtccactgccagaagctacatcggcagtaa

SEQ ID NO: 122564 - DNA, 603 bp, Homo sapiens
  Payload ID: 4006
  Gene Symbol: CXADR
  Gene Name: coxsackie virus and adenovirus receptor
  Uniprot ID: P78310
  ENST ID: ENST00000400165
  CDS Start-End: 1-603
atggcgctcctgctgtgcttcgtgctcctgtgcggagtagtggatttcgccagaagtttgagtatcactactcctgaagagatgattgaaaaagccaaaggggaaactgcctatctgccatgcaaatttacgcttagtcccgaagaccagggaccgctggacatcgagtggctgatatcaccagctgataatcagaaggtggatcaagtgattattttatattctggagacaaaatttatgatgactactatccagatctgaaaggccgagtacattttacgagtaatgatctcaaatctggtgatgcatcaataaatgtaacgaatttacaactgtcagatattggcacatatcagtgcaaagtgaaaaaagctcctggtgttgcaaataagaagattcatctggtagttcttgggaagatgtgccacctccaaagagccgtacgtccactgccagaagctacatcggcagtaatcattcatccctggggtccatgtctccttccaacatggaaggatattccaagactcagtataaccaagtaccaagtgaagactttgaacgcactcctcagagtccgactctcccacctgctaaggtag

SEQ ID NO: 122565 - DNA, 1080 bp, Homo sapiens
  Payload ID: 4006
  Gene Symbol: CXADR
  Gene Name: coxsackie virus and adenovirus receptor
  Uniprot ID: P78310
  ENST ID: ENST00000400166
  CDS Start-End: 85-843
cgggagcgcgcgaggcgcggggagcctgggaccaggagcgagagccgcctacctgcagccgccgcccacggcacggcagccaccatggcgctcctgctgtgcttcgtgctcctgtgcggagtagtggatttcgccagaagtttgagtatcactactcctgaagagatgattgaaaaagccaaaggggaaactgcctatctgccatgcaaatttacgcttagtcccgaagaccagggaccgctggacatcgagtggctgatatcaccagctgataatcagaaggtggatcaagtgattattttatattctggagacaaaatttatgatgactactatccagatctgaaaggccgagtacattttacgagtaatgatctcaaatctggtgatgcatcaataaatgtaacgaatttacaactgtcagatattggcacatatcagtgcaaagtgaaaaaagctcctggtgttgcaaataagaagattcatctggtagttcttgttaagccttcaggtgcgagatgttacgttgatggatctgaagaaattggaagtgactttaagataaaatgtgaaccaaaagaaggttcacttccattacagtatgagtggcaaaaattgtctgactcacagaaaatgcccacttcatggttagcagggaagatgtgccacctccaaagagccgtacgtccactgccagaagctacatcggcagtaatcattcatccctggggtccatgtctccttccaacatggaaggatattccaagactcagtataaccaagtaccaagtgaagactttgaacgcactcctcagagtccgactctcccacctgctaaggtagctgcccctaatctaagtcgaatgggtgcgattcctgtgatgattccagcacagagcaaggatgggtctatagtatagagcctccatatgtctcatctgtgctctccgtgttcctttcctttttttgatatatgaaaacctattctggtctaaattgtgttactagcctcaaaatacatcaaaaaataagttaatcaggaactgtacggaatatatttttaaaaatttttgtttggtt

SEQ ID NO: 122566 - DNA, 1445 bp, Homo sapiens
  Payload ID: 4006
  Gene Symbol: CXADR
  Gene Name: coxsackie virus and adenovirus receptor
  Uniprot ID: P78310
  ENST ID: ENST00000400169
  CDS Start-End: 1-1059
atggcgctcctgctgtgcttcgtgctcctgtgcggagtagtggatttcgccagaagtttgagtatcactactcctgaagagatgattgaaaaagccaaaggggaaactgcctatctgccatgcaaatttacgcttagtcccgaagaccagggaccgctggacatcgagtggctgatatcaccagctgataatcagaaggtggatcaagtgattattttatattctggagacaaaatttatgatgactactatccagatctgaaaggccgagtacattttacgagtaatgatctcaaatctggtgatgcatcaataaatgtaacgaatttacaactgtcagatattggcacatatcagtgcaaagtgaaaaaagctcctggtgttgcaaataagaagattcatctggtagttcttgttaagccttcaggtgcgagatgttacgttgatggatctgaagaaattggaagtgactttaagataaaatgtgaaccaaaagaaggttcacttccattacagtatgagtggcaaaaattgtctgactcacagaaaatgcccacttcatggttagcagaaatgacttcatctgttatatctgtaaaaaatgcctcttctgagtactctgggacatacagctgtacagtcagaaacagagtgggctctgatcagtgcctgttgcgtctaaacgttgtccctccttcaaataaagctggactaattgcaggagccattataggaactttgcttgctctagcgctcattggtcttatcatcttttgctgtcgtaaaaagcgcagagaagaaaaatatgaaaaggaagttcatcacgatatcagggaagatgtgccacctccaaagagccgtacgtccactgccagaagctacatcggcagtaatcattcatccctggggtccatgtctccttccaacatggaaggatattccaagactcagtataaccaagtaccaagtgaagactttgaacgcactcctcagagtccgactctcccacctgctaagttcaagtacccttacaagactgatggaattacagttgtataaatatggactactgaagaatctgaagtattgtattatttgactttattttaggcctctagtaaagacttaaatgttttttaaaaaaagcacaaggcacagagattagagcagctgtaagaacacatctactttatgcaatggcattagacatgtaagtcagatgtcatgtcaaaattagtacgagccaaattctttgttaaaaaaccctatgtatagtgacactgatagttaaaagatgttttattatattttcaataactaccactaacaaatttttaacttttcatatgcatattctgatatgtggtcttttaggaaaagtatggttaatagttgatttttcaaaggaaattttaaaattcttacgttctgtttaatgtttttgc

SEQ ID NO: 122567 - DNA, 2103 bp, Homo sapiens
  Payload ID: 4007
  Gene Symbol:
  Gene Name: CPEB2
  ENST ID: ENST00000634696
  CDS Start-End: 88-1857
ccccagcagccgccccagccgcagccgcagccgcccggctcgtctgccaccaccccgggcggcggcagcggcggctcgctcagcgccatgccgccgcccagccccgactcagagaacggcttctaccccgggctgccgtcgtccatgaacccggccttcttccctagcttctcgcccgtgtcgccgcacggctgcactgggctcagcgttccgacgagcggcggcggcggcggcggcttcggcggccccttctcggctaccgctgtgccccctccgccgccgcccgccatgaatatacctcaacagcagcccccgccgcccgcggcgccgcagcagccgcagagccggaggtcgcccgtcagcccgcagctccagcagcagcaccaggcggcggccgccgccttcctgcagcagaggaactcctataaccaccaccagcctcttctgaaacagtctccctggagcaaccatcagagcagtggctggggcactggaagtatgtcctggggagcaatgcatggcagagatcatcgtagaaccggaaacatgggaatcccaggaactatgaatcagatatctccattgaagaaaccgttttctggtaatgtcatagcaccaccgaaatttactcgctcaactccatcactgactccaaaatcttggattgaagataatgtgttcagaacagacaacaatagtaatacactcttacccttacaggtgagatctagtttgcagttgccagcttggggctcagattcactccaagatagttggtgcactgcagccggaacatccagaatagaccaggatcgaagtagaatgtatgacagtttgaatatgcactctttggaaaattcccttatcgatattatgagagcagagcatgatcctcttaagggtcgattgagctatccacatccaggaactgacaatctgttgatgttaaatggtcgttcttccctctttccaatagatgatggcttgcttgatgatggtcacagtgatcaagttggagttttaaattcacccacctgttattcagctcaccaaaatggagagcgaatagaacgcttctctcgaaaagtttttgttggtggtcttcctccagatattgatgaagatgaaataactgctagcttcagaagatttgggcctttggtagtagattggcctcataaagcagaaagcaagtcctattttccaccaaaaggctatgcatttcttctctttcaagaagagagctcagttcaggcactcattgatgcttgtattgaagaagatggaaaactctatctgtgtgtttctagccctactatcaaggacaaaccagttcaaatacgtccttggaatttaagtgatagtgattttgtaatggatggttctcagcctttggatccccgaaaaacaatttttgttggaggtgttcctaggccattaagggctgtggaacttgctatgatcatggaccggctgtatggtggagtttgttatgcaggaattgatacagatcctgagctaaaatacccaaaaggtgctgggcgagttgctttctccaatcagcagagctatattgctgccattagtgctcggtttgttcagcttcagcatggtgatattgataaacgtgtggaggtaaagccatatgtgctagatgaccagatgtgtgatgaatgccagggcgcacgctgtggtggaaaatttgctccctttttttgtgccaatgtcacttgcctgcagtattactgtgagttttgttgggcaaatatccactctcgtgctggacgtgagttccataagccattggtaaaggaaggtgctgatcgcccacgtcagatccacttccgctggaactaagaatagcaaactggcctctgtttaacaaggaaagaaagggtgcatgtggcttactgtgtctgaagatactgacatgcagaagaaataagtgcattcttctgcttttcaccccagctatcaatacatgcatctttatcagcagccaaaacactacaagcctcttgtttttcaccaaaaccctacatctcaggcttactaatttttgtgatattttcatgttcaaataaaatgtttttttgtattttc

SEQ ID NO: 122568 - DNA, 635 bp, Homo sapiens
  Payload ID: 4007
  Gene Symbol:
  Gene Name: CPEB2
  ENST ID: ENST00000634493
  CDS Start-End: 1-504
ataactgctagcttcagaagatttgggcctttggtagtagattggcctcataaagcagaaagcaagtcctattttccaccaaaaggctatgcatttcttctctttcaagaagagagctcagttcaggcactcattgatgcttgtattgaagaagatggaaaactctatctgtgtgtttctagccctactatcaaggacaaaccagttcaaatacgtccttggaatttaagtgatagtgattttgtaatggatggttctcagcctttggatccccgaaaaacaatttttgttggaggtgttcctaggccattaagggctgtggaacttgctatgatcatggaccggctgtatggtggagtttgttatgcaggaattgatacagatcctgagctaaaatacccaaaaggtgctgggcgagttgctttctccaatcagcagagctatattgctgccattagtgctcggtttgttcagcttcagcatggtgatattgataaacgttgaaggaccgattatttggagcagagtactgactcttaaagagcaactcagttgcagagcagatgaattgagatacatgtgccttcttaaaaaggcattgaaatacctgagggaaaagcttattttctaagata

SEQ ID NO: 122569 - DNA, 2013 bp, Homo sapiens
  Payload ID: 4007
  Gene Symbol:
  Gene Name: CPEB2
  ENST ID: ENST00000634867
  CDS Start-End: 88-1767
ccccagcagccgccccagccgcagccgcagccgcccggctcgtctgccaccaccccgggcggcggcagcggcggctcgctcagcgccatgccgccgcccagccccgactcagagaacggcttctaccccgggctgccgtcgtccatgaacccggccttcttccctagcttctcgcccgtgtcgccgcacggctgcactgggctcagcgttccgacgagcggcggcggcggcggcggcttcggcggccccttctcggctaccgctgtgccccctccgccgccgcccgccatgaatatacctcaacagcagcccccgccgcccgcggcgccgcagcagccgcagagccggaggtcgcccgtcagcccgcagctccagcagcagcaccaggcggcggccgccgccttcctgcagcagaggaactcctataaccaccaccagcctcttctgaaacagtctccctggagcaaccatcagagcagtggctggggcactggaagtatgtcctggggagcaatgcatggcagagatcatcgtagaaccggaaacatgggaatcccaggaactatgaatcagatatctccattgaagaaaccgttttctggtaatgtcatagcaccaccgaaatttactcgctcaactccatcactgactccaaaatcttggattgaagataatgtgttcagaacagacaacaatagtaatacactcttacccttacaggatcgaagtagaatgtatgacagtttgaatatgcactctttggaaaattcccttatcgatattatgagagcagagcatgatcctcttaagggtcgattgagctatccacatccaggaactgacaatctgttgatgttaaatggtcgttcttccctctttccaatagatgatggcttgcttgatgatggtcacagtgatcaagttggagttttaaattcacccacctgttattcagctcaccaaaatggagagcgaatagaacgcttctctcgaaaagtttttgttggtggtcttcctccagatattgatgaagatgaaataactgctagcttcagaagatttgggcctttggtagtagattggcctcataaagcagaaagcaagtcctattttccaccaaaaggctatgcatttcttctctttcaagaagagagctcagttcaggcactcattgatgcttgtattgaagaagatggaaaactctatctgtgtgtttctagccctactatcaaggacaaaccagttcaaatacgtccttggaatttaagtgatagtgattttgtaatggatggttctcagcctttggatccccgaaaaacaatttttgttggaggtgttcctaggccattaagggctgtggaacttgctatgatcatggaccggctgtatggtggagtttgttatgcaggaattgatacagatcctgagctaaaatacccaaaaggtgctgggcgagttgctttctccaatcagcagagctatattgctgccattagtgctcggtttgttcagcttcagcatggtgatattgataaacgtgtggaggtaaagccatatgtgctagatgaccagatgtgtgatgaatgccagggcgcacgctgtggtggaaaatttgctccctttttttgtgccaatgtcacttgcctgcagtattactgtgagttttgttgggcaaatatccactctcgtgctggacgtgagttccataagccattggtaaaggaaggtgctgatcgcccacgtcagatccacttccgctggaactaagaatagcaaactggcctctgtttaacaaggaaagaaagggtgcatgtggcttactgtgtctgaagatactgacatgcagaagaaataagtgcattcttctgcttttcaccccagctatcaatacatgcatctttatcagcagccaaaacactacaagcctcttgtttttcaccaaaaccctacatctcaggcttactaatttttgtgatattttcatgttcaaataaaatgtttttttgtattttc

SEQ ID NO: 122570 - DNA, 6797 bp, Homo sapiens
  Payload ID: 4007
  Gene Symbol:
  Gene Name: CPEB2
  ENST ID: ENST00000635362
  CDS Start-End: 1-3024
atgagggatttcgggtttggggtgctgcagaccgccccgctccgaagtagcagtcctgggcccctgttctgcggcgaggcgtatggtccttacgccgtggggtccgtcaacccgctgccctccgccacgcccttcggcccactgtcgccaccaccgttgcctgtcaccggcttcttagaggccgcctcccccttctccgtccccctcggcggcggcgcgggcagcccggccgccgccgcttcctcttcctccccgttcctggcgcatcagcagaccatgcaggatgagctgcttctggggctgacacagcagccggcgcggccgctttcgggggcggcggccacggagaaactccccgaccaccaccccggcggcggcacgatcgcgggtgtgacccacctcctcccctcccaggacttcaaaccgagtctgcaccacccctcctcctcctccgcctcctcctgctgctgctgccgcacctcctccccgcaggacttcagtaagcggcagcagcagcagctgagcagccagaagaggaaagagttcagccctccccaccttccccaccctccggactcgaagccgccgccgccgcctccgccgctccactgccccggtcggttcagcccgccgccgccgccagccggcccgctcctccagccggcgcagctcgctcagcgccagcagcaacagccgccgcagcagttcagcctcctgcatcagcagcacctctcgccgcaggacttcgccccgcggcagcgtccggcagacctgcccccgctcccgcagctccctccctcgccgcctgcagccccgcggcgccgccacggaggcgcgggcagccctcgcaagaccccagccgcgggcgagggcagcgccgccgagtcccccaatgcgggcttggcctcctcgacgccggtgaaccccgcgccgggctccatggagtcccccaaccaccctctgctcaacagtcccagtaacctcctgcccggaggtgcgcttggcgcgggcgccttcagcagcctgcagagcccggaccttccacacccgggcggcggcggcggcggcgggggcggggggcccccaggaggcggagggggaggcggctccgcgtcgccgccgccgctgcccggcttcggcaccccctggtcggtgcagaccgcgtcgccgccaccccagccccagcagccgccgccgacccagccgcagcagcagccgccgccaccccagcagccgccccagccgcagccgcagccgcccggctcgtctgccaccaccccgggcggcggcagcggcggctcgctcagcgccatgccgccgcccagccccgactcagagaacggcttctaccccgggctgccgtcgtccatgaacccggccttcttccctagcttctcgcccgtgtcgccgcacggctgcactgggctcagcgttccgacgagcggcggcggcggcggcggcttcggcggccccttctcggctaccgctgtgccccctccgccgccgcccgccatgaatatacctcaacagcagcccccgccgcccgcggcgccgcagcagccgcagagccggaggtcgcccgtcagcccgcagctccagcagcagcaccaggcggcggccgccgccttcctgcagcagaggaactcctataaccaccaccagcctcttctgaaacagtctccctggagcaaccatcagagcagtggctggggcactggaagtatgtcctggggagcaatgcatggcagagatcatcgtagaaccggaaacatgggaatcccaggaactatgaatcagatatctccattgaagaaaccgttttctggtaatgtcatagcaccaccgaaatttactcgctcaactccatcactgactccaaaatcttggattgaagataatgtgttcagaacagacaacaatagtaatacactcttacccttacaggtaagaatggatcgaagtagaatgtatgacagtttgaatatgcactctttggaaaattcccttatcgatattatgagagcagagcatgatcctcttaagggtcgattgagctatccacatccaggaactgacaatctgttgatgttaaatgcaaggagttatgggcgaagacgaggtcgttcttccctctttccaatagatgatggcttgcttgatgatggtcacagtgatcaagttggagttttaaattcacccacctgttattcagctcaccaaaatggagagcgaatagaacgcttctctcgaaaagtttttgttggtggtcttcctccagatattgatgaagatgaaataactgctagcttcagaagatttgggcctttggtagtagattggcctcataaagcagaaagcaagtcctattttccaccaaaaggctatgcatttcttctctttcaagaagagagctcagttcaggcactcattgatgcttgtattgaagaagatggaaaactctatctgtgtgtttctagccctactatcaaggacaaaccagttcaaatacgtccttggaatttaagtgatagtgattttgtaatggatggttctcagcctttggatccccgaaaaacaatttttgttggaggtgttcctaggccattaagggctgtggaacttgctatgatcatggaccggctgtatggtggagtttgttatgcaggaattgatacagatcctgagctaaaatacccaaaaggtgctgggcgagttgctttctccaatcagcagagctatattgctgccattagtgctcggtttgttcagcttcagcatggtgatattgataaacgtgtggaggtaaagccatatgtgctagatgaccagatgtgtgatgaatgccagggcgcacgctgtggtggaaaatttgctccctttttttgtgccaatgtcacttgcctgcagtattactgtgagttttgttgggcaaatatccactctcgtgctggacgtgagttccataagccattggtaaaggaaggtgctgatcgcccacgtcagatccacttccgctggaactaagaatagcaaactggcctctgtttaacaaggaaagaaagggtgcatgtggcttactgtgtctgaagatactgacatgcagaagaaataagtgcattcttctgcttttcaccccagctatcaatacatgcatctttatcagcagccaaaacactacaagcctcttgtttttcaccaaaaccctacatctcaggcttactaatttttgtgatattttcatgttcaaataaaatgtttttttgtattttctccaagttatttttatatgtaaagttaaaattagatatgagaatgttttgcgtaggggcaacacagtctgctgctatatagtgggggaagcgtgcacttatttctaaacatgggtttttaacttcaagatctgccccagtaatttaccaaaggtagcaaaataatagtgaagatggaatatgtctgctacaaatgcttatttttattgttgctattttcagtgtatacataaactaaaaattagggttgatttttttgctctccattttgacttgcaagaaataatacctcaagataatctgatttattagctatttttaaacatttttaatcacaagctgtattagctttgctgctatataggtgttatgtgtaaatgccacctattaatacgggactgaaaacgttagagacacactgcattgcagataaaatgcaggcagcacaatatggcctaaactgccatagttttagaatgtgaaaaaaatgcatgtttacttacctgtatacaccatatgcatgcactagaattattaactaacgaggtgaggtattgcaaatgttcaaaaaagctctcttgaatctaggtagcatgaacaaattataaaatttgtttaaaaaagcaaacttgcatgcattattgtgacttcaagtttaaaaaatcgtcttacatgtgtacaatatgcaaattagttttagattagagagtgcagccattttgtgatctggtcagtagtggaattcgattttatgcagactggatgtaatatttgtaatccctgtgcaattttgtgacgtgcggttctaattcatgtgcagtgatatagtatagataaaagaatgagtaaaagaaaatacaagaattctaaagaaagttggttttagcccctttgatagtccatggttaagacatcctttataaaccaaagatggccagcacactgctaaccagtcaccaaatgtaagacccataagaaacccatatttaaaaatctgaattttttagaagaatgcaaaactttagtaaaccctaagtaaagtcaaaatggagaaggggaaatatacagatggctagttgcataaaattaaattttacctttataagacaatggtgaaatctggcttgaacttgcttatgtgtttaacctataaatattggggtcttctgtctaaactggggtcactgttgcatggaacattgttcttaatagttgagaattgcttttttgaaaattttcatgaaggaattttggtaatgactttgcttgcaggttttttggggtgttttgagaaagtggcatggaaacatgcagtagttaatgagtttctcttggtactgaacactattagaatatcattagtgatattttttctctttagagcatttttaatgcaactagcccctatattttaatgtaagagttactctgcaatctaagcaaagcacccaacaatggtaaatgttttttaaaaatgcagaactaagatttttgactctaaagagagaaaattacaagggtgttgccttatagcaaacccttgggacaatccttcatgtgagcaaagtgttgatcttaatattggttgtctgtggtgtgcttttttgtactgtaaaaatatgtggttcatgtctaactctgctgttttattgtggttgtggttcaagtttttaatgtttaaagttgatgctgttttcagaagagctttttactaatttatttgtcagtgttccctatttgttacttaaccatgatcctccagattttttggagtattcttttctaaccttaaccctgccaaaccttgatccattttgacatttgttatgcactatttttatatctctgtgagagatttttccaacagtcagctattttatggcacactttttttgactgatgacatctcctttgctatacctcaatttttggaatttagagaagaaatcagtagttttgcaatgttaattatttagatatttaatttcgcagatttttaaactttattttcataatttctgcttaatgtttaaaattgaagagccttttcatgtattaaataatgaacacaaattatataattaaaataattggagatgttgaaaatcattttcccttcttaaacagaaataaatatttggaatgaaggggaatgtactagaacaccctttttgccacgggtaaaaataacagaaatgtatggtttgttttaccttcatttctgtacaagtaaagcttattagtctaatgttttgttcctttcccacctcacccctacctcttttgttttgttttgtttttgccctttatgtactacattcttattttctaacttttaaacactgtattggaggtttttttttaatttacagatcatatttattttactatttttgtagaaaattattaattttgattgtatttttgtattttaaaagcttcttcacttgtgttccctaaatattcatattgctgcccaaaagtatgactgtggaggaaaaaaaaatactttaaaaatccacactttttgttaagaaggaaacatttagcatttatatatttgtgtatggaaaacacttgatattttatccctgttgcatctggctgcacagagcctctcctcaaagatgctacaaaacttgaatataacacattttggaaggctgactaacctcgattctgtgttgtgatgtgcaatactgtttctaatgtttgtataaaaaaaaacagtgtaaacctttttaatgcaaatttatttttttcattgcatattttgcagattttatccacagtgtcattttttactgtcagaaaagataccccttttgtcattgcaactattttttaaatccagaaatctttgtactgatgtaaatgattgtagttattttggatagtgttttgctaacaaaaggagagacttttttcatgcatatttctattttgtttttttgggttttattttattttaatagtagtaaaatacttggaataatttttcatattcttgtcattaatattattttgtatttttatgtggaaatatataattttatgacactaattgctaaagtttattttatgttgaattatttttggagctgaaatctttgtaatattaaagcaactagtttctaattcccagtttctgtatagaatcgcacaagtggtttatggagtgtttggattgtaattataaatggttctttgatatgcaaattaatattttcagttgattttattttatattcctaatggggtgttaaagccgttttttatttttttctaaataaaaagagaacccatgcttttatggacactaggtaaacaccttcagcttaaatttttcgttaaatattttagtttattttattgttatcttccaggtgtctaaatctccagtctgtctgttgtactggtaatttaactctgtaatggaatagtttgctgccaactatttatattaagtaatttttaaatatttgtaatattgttgactgactaataaactattaagttattggcata

SEQ ID NO: 122571 - DNA, 5509 bp, Homo sapiens
  Payload ID: 4007
  Gene Symbol:
  Gene Name: CPEB2
  ENST ID: ENST00000635651
  CDS Start-End: 50-1738
ctcgtctgccaccaccccgggcggcggcagcggcggctcgctcagcgccatgccgccgcccagccccgactcagagaacggcttctaccccgggctgccgtcgtccatgaacccggccttcttccctagcttctcgcccgtgtcgccgcacggctgcactgggctcagcgttccgacgagcggcggcggcggcggcggcttcggcggccccttctcggctaccgctgtgccccctccgccgccgcccgccatgaatatacctcaacagcagcccccgccgcccgcggcgccgcagcagccgcagagccggaggtcgcccgtcagcccgcagctccagcagcagcaccaggcggcggccgccgccttcctgcagcagaggaactcctataaccaccaccagcctcttctgaaacagtctccctggagcaaccatcagagcagtggctggggcactggaagtatgtcctggggagcaatgcatggcagagatcatcgtagaaccggaaacatgggaatcccaggaactatgaatcagatatctccattgaagaaaccgttttctggtaatgtcatagcaccaccgaaatttactcgctcaactccatcactgactccaaaatcttggattgaagataatgtgttcagaacagacaacaatagtaatacactcttacccttacaggtaagaatggatcgaagtagaatgtatgacagtttgaatatgcactctttggaaaattcccttatcgatattatgagagcagagcatgatcctcttaagggtcgattgagctatccacatccaggaactgacaatctgttgatgttaaatggtcgttcttccctctttccaatagatgatggcttgcttgatgatggtcacagtgatcaagttggagttttaaattcacccacctgttattcagctcaccaaaatggagagcgaatagaacgcttctctcgaaaagtttttgttggtggtcttcctccagatattgatgaagatgaaataactgctagcttcagaagatttgggcctttggtagtagattggcctcataaagcagaaagcaagtcctattttccaccaaaaggctatgcatttcttctctttcaagaagagagctcagttcaggcactcattgatgcttgtattgaagaagatggaaaactctatctgtgtgtttctagccctactatcaaggacaaaccagttcaaatacgtccttggaatttaagtgatagtgattttgtaatggatggttctcagcctttggatccccgaaaaacaatttttgttggaggtgttcctaggccattaagggctgtggaacttgctatgatcatggaccggctgtatggtggagtttgttatgcaggaattgatacagatcctgagctaaaatacccaaaaggtgctgggcgagttgctttctccaatcagcagagctatattgctgccattagtgctcggtttgttcagcttcagcatggtgatattgataaacgtgtggaggtaaagccatatgtgctagatgaccagatgtgtgatgaatgccagggcgcacgctgtggtggaaaatttgctccctttttttgtgccaatgtcacttgcctgcagtattactgtgagttttgttgggcaaatatccactctcgtgctggacgtgagttccataagccattggtaaaggaaggtgctgatcgcccacgtcagatccacttccgctggaactaagaatagcaaactggcctctgtttaacaaggaaagaaagggtgcatgtggcttactgtgtctgaagatactgacatgcagaagaaataagtgcattcttctgcttttcaccccagctatcaatacatgcatctttatcagcagccaaaacactacaagcctcttgtttttcaccaaaaccctacatctcaggcttactaatttttgtgatattttcatgttcaaataaaatgtttttttgtattttctccaagttatttttatatgtaaagttaaaattagatatgagaatgttttgcgtaggggcaacacagtctgctgctatatagtgggggaagcgtgcacttatttctaaacatgggtttttaacttcaagatctgccccagtaatttaccaaaggtagcaaaataatagtgaagatggaatatgtctgctacaaatgcttatttttattgttgctattttcagtgtatacataaactaaaaattagggttgatttttttgctctccattttgacttgcaagaaataatacctcaagataatctgatttattagctatttttaaacatttttaatcacaagctgtattagctttgctgctatataggtgttatgtgtaaatgccacctattaatacgggactgaaaacgttagagacacactgcattgcagataaaatgcaggcagcacaatatggcctaaactgccatagttttagaatgtgaaaaaaatgcatgtttacttacctgtatacaccatatgcatgcactagaattattaactaacgaggtgaggtattgcaaatgttcaaaaaagctctcttgaatctaggtagcatgaacaaattataaaatttgtttaaaaaagcaaacttgcatgcattattgtgacttcaagtttaaaaaatcgtcttacatgtgtacaatatgcaaattagttttagattagagagtgcagccattttgtgatctggtcagtagtggaattcgattttatgcagactggatgtaatatttgtaatccctgtgcaattttgtgacgtgcggttctaattcatgtgcagtgatatagtatagataaaagaatgagtaaaagaaaatacaagaattctaaagaaagttggttttagcccctttgatagtccatggttaagacatcctttataaaccaaagatggccagcacactgctaaccagtcaccaaatgtaagacccataagaaacccatatttaaaaatctgaattttttagaagaatgcaaaactttagtaaaccctaagtaaagtcaaaatggagaaggggaaatatacagatggctagttgcataaaattaaattttacctttataagacaatggtgaaatctggcttgaacttgcttatgtgtttaacctataaatattggggtcttctgtctaaactggggtcactgttgcatggaacattgttcttaatagttgagaattgcttttttgaaaattttcatgaaggaattttggtaatgactttgcttgcaggttttttggggtgttttgagaaagtggcatggaaacatgcagtagttaatgagtttctcttggtactgaacactattagaatatcattagtgatattttttctctttagagcatttttaatgcaactagcccctatattttaatgtaagagttactctgcaatctaagcaaagcacccaacaatggtaaatgttttttaaaaatgcagaactaagatttttgactctaaagagagaaaattacaagggtgttgccttatagcaaacccttgggacaatccttcatgtgagcaaagtgttgatcttaatattggttgtctgtggtgtgcttttttgtactgtaaaaatatgtggttcatgtctaactctgctgttttattgtggttgtggttcaagtttttaatgtttaaagttgatgctgttttcagaagagctttttactaatttatttgtcagtgttccctatttgttacttaaccatgatcctccagattttttggagtattcttttctaaccttaaccctgccaaaccttgatccattttgacatttgttatgcactatttttatatctctgtgagagatttttccaacagtcagctattttatggcacactttttttgactgatgacatctcctttgctatacctcaatttttggaatttagagaagaaatcagtagttttgcaatgttaattatttagatatttaatttcgcagatttttaaactttattttcataatttctgcttaatgtttaaaattgaagagccttttcatgtattaaataatgaacacaaattatataattaaaataattggagatgttgaaaatcattttcccttcttaaacagaaataaatatttggaatgaaggggaatgtactagaacaccctttttgccacgggtaaaaataacagaaatgtatggtttgttttaccttcatttctgtacaagtaaagcttattagtctaatgttttgttcctttcccacctcacccctacctcttttgttttgttttgtttttgccctttatgtactacattcttattttctaacttttaaacactgtattggaggtttttttttaatttacagatcatatttattttactatttttgtagaaaattattaattttgattgtatttttgtattttaaaagcttcttcacttgtgttccctaaatattcatattgctgcccaaaagtatgactgtggaggaaaaaaaaatactttaaaaatccacactttttgttaagaaggaaacatttagcatttatatatttgtgtatggaaaacacttgatattttatccctgttgcatctggctgcacagagcctctcctcaaagatgctacaaaacttgaatataacacattttggaaggctgactaacctcgattctgtgttgtgatgtgcaatactgtttctaatgtttgtataaaaaaaaacagtgtaaacctttttaatgcaaatttatttttttcattgcatattttgcagattttatccacagtgtcattttttactgtcagaaaagataccccttttgtcattgcaactattttttaaatccagaaatctttgtactgatgtaaatgattgtagttattttggatagtgttttgctaacaaaaggagagacttttttcatgcatatttctattttgtttttttgggttttattttattttaatagtagtaaaatacttggaataatttttcatattcttgtcattaatattattttgtatttttatgtggaaatatataattttatgacactaattgctaaagtttattttatgttgaattatttttggagctgaaatctttgtaatattaaagcaactagtttctaattcccagtttctgtatagaatcgcacaagtggtttatggagtgtttggattgtaattataaatggttctttgatatgcaaattaatattttcagttgattttattttatattcctaatggggtgttaaagccgttttttatttttttctaaataaaaagagaacccatgcttttatggacactaggtaaacaccttcagcttaaatttttcgttaaatattttagtttattttattgttatcttccaggtgtctaaatctccagtctgtctgttgtactggtaatttaactctgtaatggaatagtttgctgccaactatttatattaagtaatttttaaatatttgtaatattgttgactgactaataaactattaagttattggca

SEQ ID NO: 122572 - DNA, 5524 bp, Homo sapiens
  Payload ID: 4007
  Gene Symbol:
  Gene Name: CPEB2
  ENST ID: ENST00000635093
  CDS Start-End: 50-1753
ctcgtctgccaccaccccgggcggcggcagcggcggctcgctcagcgccatgccgccgcccagccccgactcagagaacggcttctaccccgggctgccgtcgtccatgaacccggccttcttccctagcttctcgcccgtgtcgccgcacggctgcactgggctcagcgttccgacgagcggcggcggcggcggcggcttcggcggccccttctcggctaccgctgtgccccctccgccgccgcccgccatgaatatacctcaacagcagcccccgccgcccgcggcgccgcagcagccgcagagccggaggtcgcccgtcagcccgcagctccagcagcagcaccaggcggcggccgccgccttcctgcagcagaggaactcctataaccaccaccagcctcttctgaaacagtctccctggagcaaccatcagagcagtggctggggcactggaagtatgtcctggggagcaatgcatggcagagatcatcgtagaaccggaaacatgggaatcccaggaactatgaatcagatatctccattgaagaaaccgttttctggtaatgtcatagcaccaccgaaatttactcgctcaactccatcactgactccaaaatcttggattgaagataatgtgttcagaacagacaacaatagtaatacactcttacccttacaggatcgaagtagaatgtatgacagtttgaatatgcactctttggaaaattcccttatcgatattatgagagcagagcatgatcctcttaagggtcgattgagctatccacatccaggaactgacaatctgttgatgttaaatgcaaggagttatgggcgaagacgaggtcgttcttccctctttccaatagatgatggcttgcttgatgatggtcacagtgatcaagttggagttttaaattcacccacctgttattcagctcaccaaaatggagagcgaatagaacgcttctctcgaaaagtttttgttggtggtcttcctccagatattgatgaagatgaaataactgctagcttcagaagatttgggcctttggtagtagattggcctcataaagcagaaagcaagtcctattttccaccaaaaggctatgcatttcttctctttcaagaagagagctcagttcaggcactcattgatgcttgtattgaagaagatggaaaactctatctgtgtgtttctagccctactatcaaggacaaaccagttcaaatacgtccttggaatttaagtgatagtgattttgtaatggatggttctcagcctttggatccccgaaaaacaatttttgttggaggtgttcctaggccattaagggctgtggaacttgctatgatcatggaccggctgtatggtggagtttgttatgcaggaattgatacagatcctgagctaaaatacccaaaaggtgctgggcgagttgctttctccaatcagcagagctatattgctgccattagtgctcggtttgttcagcttcagcatggtgatattgataaacgtgtggaggtaaagccatatgtgctagatgaccagatgtgtgatgaatgccagggcgcacgctgtggtggaaaatttgctccctttttttgtgccaatgtcacttgcctgcagtattactgtgagttttgttgggcaaatatccactctcgtgctggacgtgagttccataagccattggtaaaggaaggtgctgatcgcccacgtcagatccacttccgctggaactaagaatagcaaactggcctctgtttaacaaggaaagaaagggtgcatgtggcttactgtgtctgaagatactgacatgcagaagaaataagtgcattcttctgcttttcaccccagctatcaatacatgcatctttatcagcagccaaaacactacaagcctcttgtttttcaccaaaaccctacatctcaggcttactaatttttgtgatattttcatgttcaaataaaatgtttttttgtattttctccaagttatttttatatgtaaagttaaaattagatatgagaatgttttgcgtaggggcaacacagtctgctgctatatagtgggggaagcgtgcacttatttctaaacatgggtttttaacttcaagatctgccccagtaatttaccaaaggtagcaaaataatagtgaagatggaatatgtctgctacaaatgcttatttttattgttgctattttcagtgtatacataaactaaaaattagggttgatttttttgctctccattttgacttgcaagaaataatacctcaagataatctgatttattagctatttttaaacatttttaatcacaagctgtattagctttgctgctatataggtgttatgtgtaaatgccacctattaatacgggactgaaaacgttagagacacactgcattgcagataaaatgcaggcagcacaatatggcctaaactgccatagttttagaatgtgaaaaaaatgcatgtttacttacctgtatacaccatatgcatgcactagaattattaactaacgaggtgaggtattgcaaatgttcaaaaaagctctcttgaatctaggtagcatgaacaaattataaaatttgtttaaaaaagcaaacttgcatgcattattgtgacttcaagtttaaaaaatcgtcttacatgtgtacaatatgcaaattagttttagattagagagtgcagccattttgtgatctggtcagtagtggaattcgattttatgcagactggatgtaatatttgtaatccctgtgcaattttgtgacgtgcggttctaattcatgtgcagtgatatagtatagataaaagaatgagtaaaagaaaatacaagaattctaaagaaagttggttttagcccctttgatagtccatggttaagacatcctttataaaccaaagatggccagcacactgctaaccagtcaccaaatgtaagacccataagaaacccatatttaaaaatctgaattttttagaagaatgcaaaactttagtaaaccctaagtaaagtcaaaatggagaaggggaaatatacagatggctagttgcataaaattaaattttacctttataagacaatggtgaaatctggcttgaacttgcttatgtgtttaacctataaatattggggtcttctgtctaaactggggtcactgttgcatggaacattgttcttaatagttgagaattgcttttttgaaaattttcatgaaggaattttggtaatgactttgcttgcaggttttttggggtgttttgagaaagtggcatggaaacatgcagtagttaatgagtttctcttggtactgaacactattagaatatcattagtgatattttttctctttagagcatttttaatgcaactagcccctatattttaatgtaagagttactctgcaatctaagcaaagcacccaacaatggtaaatgttttttaaaaatgcagaactaagatttttgactctaaagagagaaaattacaagggtgttgccttatagcaaacccttgggacaatccttcatgtgagcaaagtgttgatcttaatattggttgtctgtggtgtgcttttttgtactgtaaaaatatgtggttcatgtctaactctgctgttttattgtggttgtggttcaagtttttaatgtttaaagttgatgctgttttcagaagagctttttactaatttatttgtcagtgttccctatttgttacttaaccatgatcctccagattttttggagtattcttttctaaccttaaccctgccaaaccttgatccattttgacatttgttatgcactatttttatatctctgtgagagatttttccaacagtcagctattttatggcacactttttttgactgatgacatctcctttgctatacctcaatttttggaatttagagaagaaatcagtagttttgcaatgttaattatttagatatttaatttcgcagatttttaaactttattttcataatttctgcttaatgtttaaaattgaagagccttttcatgtattaaataatgaacacaaattatataattaaaataattggagatgttgaaaatcattttcccttcttaaacagaaataaatatttggaatgaaggggaatgtactagaacaccctttttgccacgggtaaaaataacagaaatgtatggtttgttttaccttcatttctgtacaagtaaagcttattagtctaatgttttgttcctttcccacctcacccctacctcttttgttttgttttgtttttgccctttatgtactacattcttattttctaacttttaaacactgtattggaggtttttttttaatttacagatcatatttattttactatttttgtagaaaattattaattttgattgtatttttgtattttaaaagcttcttcacttgtgttccctaaatattcatattgctgcccaaaagtatgactgtggaggaaaaaaaaatactttaaaaatccacactttttgttaagaaggaaacatttagcatttatatatttgtgtatggaaaacacttgatattttatccctgttgcatctggctgcacagagcctctcctcaaagatgctacaaaacttgaatataacacattttggaaggctgactaacctcgattctgtgttgtgatgtgcaatactgtttctaatgtttgtataaaaaaaaacagtgtaaacctttttaatgcaaatttatttttttcattgcatattttgcagattttatccacagtgtcattttttactgtcagaaaagataccccttttgtcattgcaactattttttaaatccagaaatctttgtactgatgtaaatgattgtagttattttggatagtgttttgctaacaaaaggagagacttttttcatgcatatttctattttgtttttttgggttttattttattttaatagtagtaaaatacttggaataatttttcatattcttgtcattaatattattttgtatttttatgtggaaatatataattttatgacactaattgctaaagtttattttatgttgaattatttttggagctgaaatctttgtaatattaaagcaactagtttctaattcccagtttctgtatagaatcgcacaagtggtttatggagtgtttggattgtaattataaatggttctttgatatgcaaattaatattttcagttgattttattttatattcctaatggggtgttaaagccgttttttatttttttctaaataaaaagagaacccatgcttttatggacactaggtaaacaccttcagcttaaatttttcgttaaatattttagtttattttattgttatcttccaggtgtctaaatctccagtctgtctgttgtactggtaatttaactctgtaatggaatagtttgctgccaactatttatattaagtaatttttaaatatttgtaatattgttgactgactaataaactattaagttattggca

SEQ ID NO: 122573 - DNA, 6878 bp, Homo sapiens
  Payload ID: 4007
  Gene Symbol:
  Gene Name: CPEB2
  ENST ID: ENST00000635061
  CDS Start-End: 1-3105
atgagggatttcgggtttggggtgctgcagaccgccccgctccgaagtagcagtcctgggcccctgttctgcggcgaggcgtatggtccttacgccgtggggtccgtcaacccgctgccctccgccacgcccttcggcccactgtcgccaccaccgttgcctgtcaccggcttcttagaggccgcctcccccttctccgtccccctcggcggcggcgcgggcagcccggccgccgccgcttcctcttcctccccgttcctggcgcatcagcagaccatgcaggatgagctgcttctggggctgacacagcagccggcgcggccgctttcgggggcggcggccacggagaaactccccgaccaccaccccggcggcggcacgatcgcgggtgtgacccacctcctcccctcccaggacttcaaaccgagtctgcaccacccctcctcctcctccgcctcctcctgctgctgctgccgcacctcctccccgcaggacttcagtaagcggcagcagcagcagctgagcagccagaagaggaaagagttcagccctccccaccttccccaccctccggactcgaagccgccgccgccgcctccgccgctccactgccccggtcggttcagcccgccgccgccgccagccggcccgctcctccagccggcgcagctcgctcagcgccagcagcaacagccgccgcagcagttcagcctcctgcatcagcagcacctctcgccgcaggacttcgccccgcggcagcgtccggcagacctgcccccgctcccgcagctccctccctcgccgcctgcagccccgcggcgccgccacggaggcgcgggcagccctcgcaagaccccagccgcgggcgagggcagcgccgccgagtcccccaatgcgggcttggcctcctcgacgccggtgaaccccgcgccgggctccatggagtcccccaaccaccctctgctcaacagtcccagtaacctcctgcccggaggtgcgcttggcgcgggcgccttcagcagcctgcagagcccggaccttccacacccgggcggcggcggcggcggcgggggcggggggcccccaggaggcggagggggaggcggctccgcgtcgccgccgccgctgcccggcttcggcaccccctggtcggtgcagaccgcgtcgccgccaccccagccccagcagccgccgccgacccagccgcagcagcagccgccgccaccccagcagccgccccagccgcagccgcagccgcccggctcgtctgccaccaccccgggcggcggcagcggcggctcgctcagcgccatgccgccgcccagccccgactcagagaacggcttctaccccgggctgccgtcgtccatgaacccggccttcttccctagcttctcgcccgtgtcgccgcacggctgcactgggctcagcgttccgacgagcggcggcggcggcggcggcttcggcggccccttctcggctaccgctgtgccccctccgccgccgcccgccatgaatatacctcaacagcagcccccgccgcccgcggcgccgcagcagccgcagagccggaggtcgcccgtcagcccgcagctccagcagcagcaccaggcggcggccgccgccttcctgcagcagaggaactcctataaccaccaccagcctcttctgaaacagtctccctggagcaaccatcagagcagtggctggggcactggaagtatgtcctggggagcaatgcatggcagagatcatcgtagaaccggaaacatgggaatcccaggaactatgaatcagatatctccattgaagaaaccgttttctggtaatgtcatagcaccaccgaaatttactcgctcaactccatcactgactccaaaatcttggattgaagataatgtgttcagaacagacaacaatagtaatacactcttacccttacaggtgagatctagtttgcagttgccagcttggggctcagattcactccaagatagttggtgcactgcagccggaacatccagaatagaccaggatcgaagtagaatgtatgacagtttgaatatgcactctttggaaaattcccttatcgatattatgagagcagagcatgatcctcttaagggtcgattgagctatccacatccaggaactgacaatctgttgatgttaaatgcaaggagttatgggcgaagacgaggtcgttcttccctctttccaatagatgatggcttgcttgatgatggtcacagtgatcaagttggagttttaaattcacccacctgttattcagctcaccaaaatggagagcgaatagaacgcttctctcgaaaagtttttgttggtggtcttcctccagatattgatgaagatgaaataactgctagcttcagaagatttgggcctttggtagtagattggcctcataaagcagaaagcaagtcctattttccaccaaaaggctatgcatttcttctctttcaagaagagagctcagttcaggcactcattgatgcttgtattgaagaagatggaaaactctatctgtgtgtttctagccctactatcaaggacaaaccagttcaaatacgtccttggaatttaagtgatagtgattttgtaatggatggttctcagcctttggatccccgaaaaacaatttttgttggaggtgttcctaggccattaagggctgtggaacttgctatgatcatggaccggctgtatggtggagtttgttatgcaggaattgatacagatcctgagctaaaatacccaaaaggtgctgggcgagttgctttctccaatcagcagagctatattgctgccattagtgctcggtttgttcagcttcagcatggtgatattgataaacgtgtggaggtaaagccatatgtgctagatgaccagatgtgtgatgaatgccagggcgcacgctgtggtggaaaatttgctccctttttttgtgccaatgtcacttgcctgcagtattactgtgagttttgttgggcaaatatccactctcgtgctggacgtgagttccataagccattggtaaaggaaggtgctgatcgcccacgtcagatccacttccgctggaactaagaatagcaaactggcctctgtttaacaaggaaagaaagggtgcatgtggcttactgtgtctgaagatactgacatgcagaagaaataagtgcattcttctgcttttcaccccagctatcaatacatgcatctttatcagcagccaaaacactacaagcctcttgtttttcaccaaaaccctacatctcaggcttactaatttttgtgatattttcatgttcaaataaaatgtttttttgtattttctccaagttatttttatatgtaaagttaaaattagatatgagaatgttttgcgtaggggcaacacagtctgctgctatatagtgggggaagcgtgcacttatttctaaacatgggtttttaacttcaagatctgccccagtaatttaccaaaggtagcaaaataatagtgaagatggaatatgtctgctacaaatgcttatttttattgttgctattttcagtgtatacataaactaaaaattagggttgatttttttgctctccattttgacttgcaagaaataatacctcaagataatctgatttattagctatttttaaacatttttaatcacaagctgtattagctttgctgctatataggtgttatgtgtaaatgccacctattaatacgggactgaaaacgttagagacacactgcattgcagataaaatgcaggcagcacaatatggcctaaactgccatagttttagaatgtgaaaaaaatgcatgtttacttacctgtatacaccatatgcatgcactagaattattaactaacgaggtgaggtattgcaaatgttcaaaaaagctctcttgaatctaggtagcatgaacaaattataaaatttgtttaaaaaagcaaacttgcatgcattattgtgacttcaagtttaaaaaatcgtcttacatgtgtacaatatgcaaattagttttagattagagagtgcagccattttgtgatctggtcagtagtggaattcgattttatgcagactggatgtaatatttgtaatccctgtgcaattttgtgacgtgcggttctaattcatgtgcagtgatatagtatagataaaagaatgagtaaaagaaaatacaagaattctaaagaaagttggttttagcccctttgatagtccatggttaagacatcctttataaaccaaagatggccagcacactgctaaccagtcaccaaatgtaagacccataagaaacccatatttaaaaatctgaattttttagaagaatgcaaaactttagtaaaccctaagtaaagtcaaaatggagaaggggaaatatacagatggctagttgcataaaattaaattttacctttataagacaatggtgaaatctggcttgaacttgcttatgtgtttaacctataaatattggggtcttctgtctaaactggggtcactgttgcatggaacattgttcttaatagttgagaattgcttttttgaaaattttcatgaaggaattttggtaatgactttgcttgcaggttttttggggtgttttgagaaagtggcatggaaacatgcagtagttaatgagtttctcttggtactgaacactattagaatatcattagtgatattttttctctttagagcatttttaatgcaactagcccctatattttaatgtaagagttactctgcaatctaagcaaagcacccaacaatggtaaatgttttttaaaaatgcagaactaagatttttgactctaaagagagaaaattacaagggtgttgccttatagcaaacccttgggacaatccttcatgtgagcaaagtgttgatcttaatattggttgtctgtggtgtgcttttttgtactgtaaaaatatgtggttcatgtctaactctgctgttttattgtggttgtggttcaagtttttaatgtttaaagttgatgctgttttcagaagagctttttactaatttatttgtcagtgttccctatttgttacttaaccatgatcctccagattttttggagtattcttttctaaccttaaccctgccaaaccttgatccattttgacatttgttatgcactatttttatatctctgtgagagatttttccaacagtcagctattttatggcacactttttttgactgatgacatctcctttgctatacctcaatttttggaatttagagaagaaatcagtagttttgcaatgttaattatttagatatttaatttcgcagatttttaaactttattttcataatttctgcttaatgtttaaaattgaagagccttttcatgtattaaataatgaacacaaattatataattaaaataattggagatgttgaaaatcattttcccttcttaaacagaaataaatatttggaatgaaggggaatgtactagaacaccctttttgccacgggtaaaaataacagaaatgtatggtttgttttaccttcatttctgtacaagtaaagcttattagtctaatgttttgttcctttcccacctcacccctacctcttttgttttgttttgtttttgccctttatgtactacattcttattttctaacttttaaacactgtattggaggtttttttttaatttacagatcatatttattttactatttttgtagaaaattattaattttgattgtatttttgtattttaaaagcttcttcacttgtgttccctaaatattcatattgctgcccaaaagtatgactgtggaggaaaaaaaaatactttaaaaatccacactttttgttaagaaggaaacatttagcatttatatatttgtgtatggaaaacacttgatattttatccctgttgcatctggctgcacagagcctctcctcaaagatgctacaaaacttgaatataacacattttggaaggctgactaacctcgattctgtgttgtgatgtgcaatactgtttctaatgtttgtataaaaaaaaacagtgtaaacctttttaatgcaaatttatttttttcattgcatattttgcagattttatccacagtgtcattttttactgtcagaaaagataccccttttgtcattgcaactattttttaaatccagaaatctttgtactgatgtaaatgattgtagttattttggatagtgttttgctaacaaaaggagagacttttttcatgcatatttctattttgtttttttgggttttattttattttaatagtagtaaaatacttggaataatttttcatattcttgtcattaatattattttgtatttttatgtggaaatatataattttatgacactaattgctaaagtttattttatgttgaattatttttggagctgaaatctttgtaatattaaagcaactagtttctaattcccagtttctgtatagaatcgcacaagtggtttatggagtgtttggattgtaattataaatggttctttgatatgcaaattaatattttcagttgattttattttatattcctaatggggtgttaaagccgttttttatttttttctaaataaaaagagaacccatgcttttatggacactaggtaaacaccttcagcttaaatttttcgttaaatattttagtttattttattgttatcttccaggtgtctaaatctccagtctgtctgttgtactggtaatttaactctgtaatggaatagtttgctgccaactatttatattaagtaatttttaaatatttgtaatattgttgactgactaataaactattaagttattggcata

SEQ ID NO: 122574 - DNA, 5612 bp, Homo sapiens
  Payload ID: 4007
  Gene Symbol:
  Gene Name: CPEB2
  ENST ID: ENST00000634532
  CDS Start-End: 50-1843
ctcgtctgccaccaccccgggcggcggcagcggcggctcgctcagcgccatgccgccgcccagccccgactcagagaacggcttctaccccgggctgccgtcgtccatgaacccggccttcttccctagcttctcgcccgtgtcgccgcacggctgcactgggctcagcgttccgacgagcggcggcggcggcggcggcttcggcggccccttctcggctaccgctgtgccccctccgccgccgcccgccatgaatatacctcaacagcagcccccgccgcccgcggcgccgcagcagccgcagagccggaggtcgcccgtcagcccgcagctccagcagcagcaccaggcggcggccgccgccttcctgcagcagaggaactcctataaccaccaccagcctcttctgaaacagtctccctggagcaaccatcagagcagtggctggggcactggaagtatgtcctggggagcaatgcatggcagagatcatcgtagaaccggaaacatgggaatcccaggaactatgaatcagatatctccattgaagaaaccgttttctggtaatgtcatagcaccaccgaaatttactcgctcaactccatcactgactccaaaatcttggattgaagataatgtgttcagaacagacaacaatagtaatacactcttacccttacaggtgagatctagtttgcagttgccagcttggggctcagattcactccaagatagttggtgcactgcagccggaacatccagaatagaccaggatcgaagtagaatgtatgacagtttgaatatgcactctttggaaaattcccttatcgatattatgagagcagagcatgatcctcttaagggtcgattgagctatccacatccaggaactgacaatctgttgatgttaaatgcaaggagttatgggcgaagacgaggtcgttcttccctctttccaatagatgatggcttgcttgatgatggtcacagtgatcaagttggagttttaaattcacccacctgttattcagctcaccaaaatggagagcgaatagaacgcttctctcgaaaagtttttgttggtggtcttcctccagatattgatgaagatgaaataactgctagcttcagaagatttgggcctttggtagtagattggcctcataaagcagaaagcaagtcctattttccaccaaaaggctatgcatttcttctctttcaagaagagagctcagttcaggcactcattgatgcttgtattgaagaagatggaaaactctatctgtgtgtttctagccctactatcaaggacaaaccagttcaaatacgtccttggaatttaagtgatagtgattttgtaatggatggttctcagcctttggatccccgaaaaacaatttttgttggaggtgttcctaggccattaagggctgtggaacttgctatgatcatggaccggctgtatggtggagtttgttatgcaggaattgatacagatcctgagctaaaatacccaaaaggtgctgggcgagttgctttctccaatcagcagagctatattgctgccattagtgctcggtttgttcagcttcagcatggtgatattgataaacgtgtggaggtaaagccatatgtgctagatgaccagatgtgtgatgaatgccagggcgcacgctgtggtggaaaatttgctccctttttttgtgccaatgtcacttgcctgcagtattactgtgagttttgttgggcaaatatccactctcgtgctggacgtgagttccataagccattggtaaaggaaggtgctgatcgcccacgtcagatccacttccgctggaactaagaatagcaaactggcctctgtttaacaaggaaagaaagggtgcatgtggcttactgtgtctgaagatactgacatgcagaagaaataagtgcattcttctgcttttcaccccagctatcaatacatgcatctttatcagcagccaaaacactacaagcctcttgtttttcaccaaaaccctacatctcaggcttactaatttttgtgatattttcatgttcaaataaaatgtttttttgtattttctccaagttatttttatatgtaaagttaaaattagatatgagaatgttttgcgtaggggcaacacagtctgctgctatatagtgggggaagcgtgcacttatttctaaacatgggtttttaacttcaagatctgccccagtaatttaccaaaggtagcaaaataatagtgaagatggaatatgtctgctacaaatgcttatttttattgttgctattttcagtgtatacataaactaaaaattagggttgatttttttgctctccattttgacttgcaagaaataatacctcaagataatctgatttattagctatttttaaacatttttaatcacaagctgtattagctttgctgctatataggtgttatgtgtaaatgccacctattaatacgggactgaaaacgttagagacacactgcattgcagataaaatgcaggcagcacaatatggcctaaactgccatagttttagaatgtgaaaaaaatgcatgtttacttacctgtatacaccatatgcatgcactagaattattaactaacgaggtgaggtattgcaaatgttcaaaaaagctctcttgaatctaggtagcatgaacaaattataaaatttgtttaaaaaagcaaacttgcatgcattattgtgacttcaagtttaaaaaatcgtcttacatgtgtacaatatgcaaattagttttagattagagagtgcagccattttgtgatctggtcagtagtggaattcgattttatgcagactggatgtaatatttgtaatccctgtgcaattttgtgacgtgcggttctaattcatgtgcagtgatatagtatagataaaagaatgagtaaaagaaaatacaagaattctaaagaaagttggttttagcccctttgatagtccatggttaagacatcctttataaaccaaagatggccagcacactgctaaccagtcaccaaatgtaagacccataagaaacccatatttaaaaatctgaattttttagaagaatgcaaaactttagtaaaccctaagtaaagtcaaaatggagaaggggaaatatacagatggctagttgcataaaattaaattttacctttataagacaatggtgaaatctggcttgaacttgcttatgtgtttaacctataaatattggggtcttctgtctaaactggggtcactgttgcatggaacattgttcttaatagttgagaattgcttttttgaaaattttcatgaaggaattttggtaatgactttgcttgcaggttttttggggtgttttgagaaagtggcatggaaacatgcagtagttaatgagtttctcttggtactgaacactattagaatatcattagtgatattttttctctttagagcatttttaatgcaactagcccctatattttaatgtaagagttactctgcaatctaagcaaagcacccaacaatggtaaatgttttttaaaaatgcagaactaagatttttgactctaaagagagaaaattacaagggtgttgccttatagcaaacccttgggacaatccttcatgtgagcaaagtgttgatcttaatattggttgtctgtggtgtgcttttttgtactgtaaaaatatgtggttcatgtctaactctgctgttttattgtggttgtggttcaagtttttaatgtttaaagttgatgctgttttcagaagagctttttactaatttatttgtcagtgttccctatttgttacttaaccatgatcctccagattttttggagtattcttttctaaccttaaccctgccaaaccttgatccattttgacatttgttatgcactatttttatatctctgtgagagatttttccaacagtcagctattttatggcacactttttttgactgatgacatctcctttgctatacctcaatttttggaatttagagaagaaatcagtagttttgcaatgttaattatttagatatttaatttcgcagatttttaaactttattttcataatttctgcttaatgtttaaaattgaagagccttttcatgtattaaataatgaacacaaattatataattaaaataattggagatgttgaaaatcattttcccttcttaaacagaaataaatatttggaatgaaggggaatgtactagaacaccctttttgccacgggtaaaaataacagaaatgtatggtttgttttaccttcatttctgtacaagtaaagcttattagtctaatgttttgttcctttcccacctcacccctacctcttttgttttgttttgtttttgccctttatgtactacattcttattttctaacttttaaacactgtattggaggtttttttttaatttacagatcatatttattttactatttttgtagaaaattattaattttgattgtatttttgtattttaaaagcttcttcacttgtgttccctaaatattcatattgctgcccaaaagtatgactgtggaggaaaaaaaaatactttaaaaatccacactttttgttaagaaggaaacatttagcatttatatatttgtgtatggaaaacacttgatattttatccctgttgcatctggctgcacagagcctctcctcaaagatgctacaaaacttgaatataacacattttggaaggctgactaacctcgattctgtgttgtgatgtgcaatactgtttctaatgtttgtataaaaaaaaacagtgtaaacctttttaatgcaaatttatttttttcattgcatattttgcagattttatccacagtgtcattttttactgtcagaaaagataccccttttgtcattgcaactattttttaaatccagaaatctttgtactgatgtaaatgattgtagttattttggatagtgttttgctaacaaaaggagagacttttttcatgcatatttctattttgtttttttgggttttattttattttaatagtagtaaaatacttggaataatttttcatattcttgtcattaatattattttgtatttttatgtggaaatatataattttatgacactaattgctaaagtttattttatgttgaattatttttggagctgaaatctttgtaatattaaagcaactagtttctaattcccagtttctgtatagaatcgcacaagtggtttatggagtgtttggattgtaattataaatggttctttgatatgcaaattaatattttcagttgattttattttatattcctaatggggtgttaaagccgttttttatttttttctaaataaaaagagaacccatgcttttatggacactaggtaaacaccttcagcttaaatttttcgttaaatattttagtttattttattgttatcttccaggtgtctaaatctccagtctgtctgttgtactggtaatttaactctgtaatggaatagtttgctgccaactatttatattaagtaatttttaaatatttgtaatattgttgactgactaataaactattaagttattgg

SEQ ID NO: 122575 - DNA, 1630 bp, Homo sapiens
  Payload ID: 4008
  Gene Symbol: CPXCR1
  Gene Name: CPX chromosome region, candidate 1
  Uniprot ID: Q8N123
  ENST ID: ENST00000276127
  CDS Start-End: 260-1165
aggagtaagtggagaggtagagggcagaagaaaaggggtcaagaaggcaggaccccgtgaagcacacctttcctaaggattttgacgaatgagaatgaagataaactgtgagttgaaagtgaaagagaaagcataagggatcttaggtgcatctgacaagccttagatgacctccagcaacttcagttctcaccgaattactgcatttcagccttactgagaagcagccagtcatactatcctcaaattttaacccaggatgagttatcctactaaagaaggaagtgatacagctggaaatgctcacaaaaattctgaaaatgagcctcctaatgactgtagtacagacatagagtctccatctgctgatcccaatatgatctatcaggtagaaaccaacccaataaacagggagccaggcacagcaacctcccaggaagatgttgttcctcaagcagcagaaaacagcgagctcgaaacagagatccaaaaagatcaacgagaagaagatctaaaagaagagcttcttctacttcagacccccattcccagaaaattggtctctcacaagcccttaaatgatagatcaagatcccactcagggaaagttgagatgaaagcaaacaatttccccataaatcacaaaactcgttttcgactttcaacttcatggagagtcccatttattaacagtcatgagataagaagtatgattctccatctgctatgtgatagatatttctctcaggctgcagggtgtcagaataccatgtgggtaaagcgaaaatatatagcatgtctttaccatccaaatagtttcacccatcacgagagagccataacatttagaaggccttcgagggtgcactactaccgtcccctcactgagagaatgacatcaggaaaattttgcaaatcaactgacactaaagggaaatgtagattccgtgctattgtgaggtctgtgctctttgtgtcacagatacaaattgaaagtatttttaatataaaaggttttgtggatatattgacatatatccataccatgaatgttatgatcacaaacaccaataatggttggaaatacttttgtcccatctgtggaaggctttttaacacttactctgaattaagacaacattcatgcagctcttctgggaattaaattaaattggggtaaattcattttaaaatataacttctaaaattcataatttgactactaaagtaagacaaaattgcatgaacataaattttagtattattagagggagtagcagaaaggaacacaaactaatagtacctctcagtaagaaatacctatggggagtgaggaaacatctgtttatactttgcttttacaagtacatcattgaaatatcagacctgtcatctatattgagtcagcatttgaaccaagtaaatgttttcactgtcttaacatctatttctgtagatgtaaatattgttaacataaaagaatccaagttaacaggatcctgactaagatagcaaacatatattggaaggccagacaaagttctaccaagtgtttccagagattctgctacatgtattatctgaaatgttctccatatattcaataaaaaccaatttgaagacatagaaa

SEQ ID NO: 122576 - DNA, 1577 bp, Homo sapiens
  Payload ID: 4008
  Gene Symbol: CPXCR1
  Gene Name: CPX chromosome region, candidate 1
  Uniprot ID: Q8N123
  ENST ID: ENST00000373111
  CDS Start-End: 212-1117
ggagaggtagagggcagaagaaaaggggtcaagaaggcaggaccccgtgaagcacacctttcctaaggattttgacgaatgagaatgaagataaactggtgcatctgacaagccttagatgacctccagcaacttcagttctcaccgaattactgcatttcagccttactgagaagcagccagtcatactatcctcaaattttaacccaggatgagttatcctactaaagaaggaagtgatacagctggaaatgctcacaaaaattctgaaaatgagcctcctaatgactgtagtacagacatagagtctccatctgctgatcccaatatgatctatcaggtagaaaccaacccaataaacagggagccaggcacagcaacctcccaggaagatgttgttcctcaagcagcagaaaacagcgagctcgaaacagagatccaaaaagatcaacgagaagaagatctaaaagaagagcttcttctacttcagacccccattcccagaaaattggtctctcacaagcccttaaatgatagatcaagatcccactcagggaaagttgagatgaaagcaaacaatttccccataaatcacaaaactcgttttcgactttcaacttcatggagagtcccatttattaacagtcatgagataagaagtatgattctccatctgctatgtgatagatatttctctcaggctgcagggtgtcagaataccatgtgggtaaagcgaaaatatatagcatgtctttaccatccaaatagtttcacccatcacgagagagccataacatttagaaggccttcgagggtgcactactaccgtcccctcactgagagaatgacatcaggaaaattttgcaaatcaactgacactaaagggaaatgtagattccgtgctattgtgaggtctgtgctctttgtgtcacagatacaaattgaaagtatttttaatataaaaggttttgtggatatattgacatatatccataccatgaatgttatgatcacaaacaccaataatggttggaaatacttttgtcccatctgtggaaggctttttaacacttactctgaattaagacaacattcatgcagctcttctgggaattaaattaaattggggtaaattcattttaaaatataacttctaaaattcataatttgactactaaagtaagacaaaattgcatgaacataaattttagtattattagagggagtagcagaaaggaacacaaactaatagtacctctcagtaagaaatacctatggggagtgaggaaacatctgtttatactttgcttttacaagtacatcattgaaatatcagacctgtcatctatattgagtcagcatttgaaccaagtaaatgttttcactgtcttaacatctatttctgtagatgtaaatattgttaacataaaagaatccaagttaacaggatcctgactaagatagcaaacatatattggaaggccagacaaagttctaccaagtgtttccagagattctgctacatgtattatctgaaatgttctccatatattcaataaaaaccaatttgaagacat

SEQ ID NO: 122577 - DNA, 1485 bp, Homo sapiens
  Payload ID: 4008
  Gene Symbol: CPXCR1
  Gene Name: CPX chromosome region, candidate 1
  Uniprot ID: Q8N123
  ENST ID: ENST00000614120
  CDS Start-End: 115-1020
ggtgcatctgacaagccttagatgacctccagcaacttcagttctcaccgaattactgcatttcagccttactgagaagcagccagtcatactatcctcaaattttaacccaggatgagttatcctactaaagaaggaagtgatacagctggaaatgctcacaaaaattctgaaaatgagcctcctaatgactgtagtacagacatagagtctccatctgctgatcccaatatgatctatcaggtagaaaccaacccaataaacagggagccaggcacagcaacctcccaggaagatgttgttcctcaagcagcagaaaacagcgagctcgaaacagagatccaaaaagatcaacgagaagaagatctaaaagaagagcttcttctacttcagacccccattcccagaaaattggtctctcacaagcccttaaatgatagatcaagatcccactcagggaaagttgagatgaaagcaaacaatttccccataaatcacaaaactcgttttcgactttcaacttcatggagagtcccatttattaacagtcatgagataagaagtatgattctccatctgctatgtgatagatatttctctcaggctgcagggtgtcagaataccatgtgggtaaagcgaaaatatatagcatgtctttaccatccaaatagtttcacccatcacgagagagccataacatttagaaggccttcgagggtgcactactaccgtcccctcactgagagaatgacatcaggaaaattttgcaaatcaactgacactaaagggaaatgtagattccgtgctattgtgaggtctgtgctctttgtgtcacagatacaaattgaaagtatttttaatataaaaggttttgtggatatattgacatatatccataccatgaatgttatgatcacaaacaccaataatggttggaaatacttttgtcccatctgtggaaggctttttaacacttactctgaattaagacaacattcatgcagctcttctgggaattaaattaaattggggtaaattcattttaaaatataacttctaaaattcataatttgactactaaagtaagacaaaattgcatgaacataaattttagtattattagagggagtagcagaaaggaacacaaactaatagtacctctcagtaagaaatacctatggggagtgaggaaacatctgtttatactttgcttttacaagtacatcattgaaatatcagacctgtcatctatattgagtcagcatttgaaccaagtaaatgttttcactgtcttaacatctatttctgtagatgtaaatattgttaacataaaagaatccaagttaacaggatcctgactaagatagcaaacatatattggaaggccagacaaagttctaccaagtgtttccagagattctgctacatgtattatctgaaatgttctccatatattcaataaaaaccaatttgaagacatagaaa

SEQ ID NO: 122578 - DNA, 414 bp, Homo sapiens; identical to SEQ ID NO: 106200
  Payload ID: 4009
  Gene Symbol:
  Gene Name: CR388407.1
  ENST ID: ENST00000622450
  CDS Start-End: 1-414

SEQ ID NO: 122579 - DNA, 1228 bp, Homo sapiens
  Payload ID: 4010
  Gene Symbol:
  Gene Name: CR392000.1
  ENST ID: ENST00000624770
  CDS Start-End: 669-1172
gctggtatcaagatttattggcccaagcggtgacgacagatcagagcccaggcaaatacagcaggagaccttgaaggggaggaaccttggattaccatcttgcccggtcaatatatctgaatgccaaagccctccgctctgtatatgtcctgttgggagattaaatgcgtttacacctctgctgaagcggctttttctccggtgctcagagtaacctgacggctccggccccctccagggccgctgtccttggaagccctggcccgggttttccttcgttcctcacgaccagcccccttcaagggcaccctaccacctgccagcgacgcgaggcacctgctgggctcccagggaaagtcacgctggttccagctgtgactgcagccgccaccgcattgcgccgcacgtcagcaccaaccacgtggcagcgagcctgggagccatcagattcgctgcaaatctgcggggcttcagtggtggagatttatcgtcatgccagatgcgtgtgtgtgagatacataattcctctcacacggcctcataaatccaaaagggtcagcaataaatggaaaaaaataaaaaatcacagactaatttgttcagaagactagaaggggatcaatgagaaagctgtagctcagctcaaagtttgttctgaaattgggagcatggagcaggaacacattccccactggatccaaacatctgcattctcaggtgggctgggcaggagctggtgcaaaatcagatgcatggcccgagctgggcttcctgtgcacatggtgaatggggaccctgacacaggccggccattgttaacggcacctggggctaagcagccgccccggggctggagaaggcaggctgggtccagctgctcccgggcgaggggtgtctggagaggggctcttgcctcacggcagggggcccaaagaggttctaaggggcctggggtctctcaccagagctatggggtagagggccttggcagctccgtgtgtcctgtgacctggcatcttagggctttgccacgccagctttgtgatgcctcccaccagactgcatgcataaagtctggagtatgctcctctctgaagtggaggaggcctgaggccctggacaggagaagccacatcctggaaggatcagtgctgggacacagatgtccctaaggccaacacgctgctcatcaactccgcattcaagaagagaccctcagattcaaaag

SEQ ID NO: 122580 - DNA, 414 bp, Homo sapiens; identical to SEQ ID NO: 106200
  Payload ID: 4011
  Gene Symbol:
  Gene Name: CR547123.1
  ENST ID: ENST00000618974
  CDS Start-End: 1-414

SEQ ID NO: 122581 - DNA, 69 bp, Homo sapiens; identical to SEQ ID NO: 106199
  Payload ID: 4012
  Gene Symbol:
  Gene Name: CR753845.1
  ENST ID: ENST00000593842
  CDS Start-End: 1-69

SEQ ID NO: 122582 - DNA, 108 bp, Homo sapiens
  Payload ID: 4013
  Gene Symbol:
  Gene Name: CR759815.1
  ENST ID: ENST00000548618
  CDS Start-End: 1-108
tcacctccaccacctggagggggcgagaagcctctggccccgccccctggatgggtggagcctcctaagtggctgggactacagggacctagtggagggcctggggta

SEQ ID NO: 122583 - DNA, 108 bp, Homo sapiens; identical to SEQ ID NO: 122582
  Payload ID: 4014
  Gene Symbol:
  Gene Name: CR847794.1
  ENST ID: ENST00000552607
  CDS Start-End: 1-108

SEQ ID NO: 122584 - DNA, 414 bp, Homo sapiens; identical to SEQ ID NO: 106200
  Payload ID: 4015
  Gene Symbol:
  Gene Name: CR933783.1
  ENST ID: ENST00000616996
  CDS Start-End: 1-414

SEQ ID NO: 122585 - DNA, 7671 bp, Homo sapiens
  Payload ID: 4016
  Gene Symbol: CRAMP1
  Gene Name: cramped chromatin regulator homolog 1
  Uniprot ID: Q96RY5
  ENST ID: ENST00000293925
  CDS Start-End: 1-3810
atgacagtgaagttgggcgacggcggcagcggggaggacgggctcaagaagctgggcaagcgggcggccgatgaggagtccctggaaggagaaggggccggcggcgcagacgcggccgaggagagcagcggcacaaagagggacgagaagaccccccgggccggcgccgacggcccccccgcgccccccggcgcgccgcaggcgccgtccccgccgcagggcagcccccaggaccagcaccacttcctccggtccagcgtgcggccgcagagcaagaggcccaggaaggatcctccgagcgctgtggggagcggcaacgccggtggctcggggccccgcggaaaaggagctgaaggtggtggatcatcgtctggaaatgtgtctggggttgcccctgctgcccctgcagggggctcgcgctcctcctcccggaacttagggtcttctggtggcgagaaggaagaaggcaaaaaggtccggcggcagtgggagtcgtggagcacagaggacaagaacaccttcttcgaggggctgtacgagcatgggaaagactttgaagcgattcagaacaacattgcgctgaagtacaagaagaaaggcaagccagcaagcatggtgaagaacaaggagcaggtccgccacttctactaccgcacctggcacaagatcaccaagtacatcgactttgatcatgtgttctctcgaggcctgaagaagtcatcccaggaactgtatggcctgatctgctatggcgagctgcgcaagaagattgggggctgtatggatgacaagaatgcaacaaagctgaatgaactcattcaggttggggccaccactgtacgttacaaagggcggaacctgcggatcaaagcgcccatgtgccgggccctgaagaagctgtgcgatccagatggcttgagtgatgaagaggaccagaagccagtgcgcctgcctctgaaagtccctatagagctacagccgcggaacaaccacgcctgggcccgtgtgcagagccttgcccagaacccacgcctcaggatgatcgtggagctacatcgaaaggtctccagcctcatcgaattcttgaagcagaagtgggcgctccatgaggtgcgagttcggaagacactcgaggagcggcagctgcaggactcatgctccgcaccgatgcaggagaaggtgacactgcacttgttcccaggcgagaactgtacactgacaccgctgccgggcgtggctcgcgtggtgcactccaaggccttctgcacagtgcactggcaggagggcggccggtgcaagcagagtgccaaggacgcccacgtgctgcccccagcccagatcctgggcatccagagtgggcagggcacggcccggggccaggtgaaatgcccgcggagcggagctgagggcaagggtgtggggcggccccctcctgcggctgacgccttgcagagctccggagagagttcccccgaaagcgcccccggggagggggctgccctaagcttgagcagcccggacgctcctgacaggcctcctcccaggcaccaggacactgggccatgtcttgagaagacccctgcagaaggcagggacagtcccacccgggagccaggggccttgccgtgtgcctgtggccagctcccagacctggaggacgagctctcgcttctagaccccttgccccgctacctaaagtcctgtcaggacctcattgtccccgagcagtgccgctgtgcggacacacggcctgggagcgagcagccccctctgggcggggcggcctccccagaggtgctggctcctgtcagcaaggaggctgctgaccttgctcccactggcccatccccgaggcccggccccgggctcctgctggatgtttgcactaaagacttggcagatgcacctgcggaggagctccaggagaaggggagccccgcggggcctccgccgtctcagggacagcctgccgccaggcccccgaaggaggtccccgccagccggctggctcagcagctccgtgaggagggctggaacctgcagacctccgaaagcctcacgctggccgaagtctacctcatgatgggcaagcccagcaagctgcagctggagtacgactggctggggcccggccgccaggacccccgccccggctccctacccaccgccctccacaagcagcgcctcctcagctgcctcctgaagctcatttccaccgaggtcaaccccaagctggctctggaagcaaacaccatctctacagcctcagtaaggcccgcccaggaggagcagtcgatgacgcccccagggaaggtggtgaccgtcagctctcgcagcccccgctgccctcggaaccaggcctccctccgcagcagcaagaccttcccgcccagctctgcaccctgctcctcaggtttgagaaaccctccaagacccctcttggtgcctggtccctccagcacaggaagcaatgactcagatggaggcctttttgctgtcccgacaaccttgccacccaacagccgacacgggaagctcttctctcccagtaaagaagcagagctgactttccgccagcatctgaactccatcagtatgcagtcggatttcttcctgccaaagccccggaagctgcggaaccggcacctgcggaagccactggtggtccagagaacactgctccctagaccatcggaaaaccagtcccacaacgtttgttccttctccatcctgtctaactcttccgtaactgggagaggttcgttccggcccatccagtcttctctgaccaaagcagctctgtctcggccgatcgtgcccaaggtccttccaccccaggccacgagtcacctggccagtgctatcgacttagcagctacaagtgccggcatcctttccgggaaccccctccctgccttggacaccgagggcttgtctggcatctctccactgtcttcagacgaggtgacgggtgccatctcggggcaggactctactggaactcaccaggatggagacaccctccccaccgtggggggctccgacccatttgtcagcatcccttcgaggcctgagcaggagccagtggcagacagtttccagggctcatctgttctctccttatctgagctgcccaaggcccctctccagaatggcctctccataccgctgtcctcgtcagagagctccagcacccggctgtctccaccagacgtctctgctctgctcgacatctccctgcccggcccacctgaggatgcgctgtcacagggcgagcctgccacacacattagcgactccatcattgagatcgccatcagctccggtcagtacggtgaaggagtccctctttctccagcaaaactgaatggcagtgacagttccaagagccttccctccccgtccagcagcccccagccacactggatcgcctctcccacccacgacccccagtggtaccccagtgactccaccgactcctcgctcagcagcctgtttgcaagcttcatctccccagagaagagccggaagatgttgccgactcccattgggaccaacagtggcacttccttgcttggccccagcttgttggatggaaactcgcgggactcatttgtgtccaggtccctggctgacgttgcagaggttgtggattcccagctggtgtgcatgatgaacgaaaacagcattgattacatttctcggttcaatgacctggcccaagagctgtccatcgctgagcctggccgccgagaagctctgtttgatggtggtggaggcggccccgctgtcagtgacctgtcccagtgaccacacgtcctggtggcggatgaagccctcttcgagctagagaaaaatagataagcccagcagccccagaagatggtctgaacagaggcatctccgcacccaagactgtgcaacgggcaggaacgtggtcacagagctgcttccccacgagcagcaggcaacggcgtccaaggagactaggatgagttcttggcaagggccagcgttagaaatcactgtggtactagagccgttcttcaccacgcctgggcccatgttagggtctgcataatgatcccatttcagcctgtgctctgcctcgattgttgtgttggacattccggtggcatttccttctgagacaagggagtatgtgtgccttggtgtagttgctgtgcactaggagctgtgatctccctctctgcagggaggccccagcccctgctgcttgctttctgccaaacctgtgctatgcatcagctgtgccctctgtggactgtaacgggcaggacagttgggtgtggcctgggctcatgcctggtggtgtcacatcccaaggcagcaagagcatggataccgatcacagggctgctgcggagtcgtggggccctgggctggtgcctcccctccctagaggttttgttcgtactcttaacagggagtgggggcaggaagagtcctgtactatgcaggttgtgtggactttacatgggaccctgctaagctggttgaaaatgtttttcttgtgttttaagaattaggagacatggaagaggaagaacaaagtcccctctgtagttggtttccttcctgtgtccctttgcaagcttccaggcgatctaaggtgtcatttctccctcctggggtgacccttaggcgctaatatgattacagcgaagactttcctgataagttctcaaactcgatgtgtgactgtttggcacttgagacaaacctgcctttgcagggaaagtgtctctcacgggcattggtgtgggcgtgcctgacatacgtgttcagtcccttgcatacctttgccttgagacttctgtgtctccttcccatttgggacacccaggtgagggcccagacatctggatgtggtcagacctcaccaaatatatgccttcgtggtggtctccctccttgcgccctcttgggtggccagcgttcctactgcagacggcccaacatccagtctttccccaggacagagctaacaagggcccctttgccttctcatcctcaggagttccaggcacatgagtcaccgtccatccacatccagtgtggcctggagctgctacagaggtgttgggcaggccatgcctgtgccgccatctctcccttcctgcctcatttcatcccccgcagcagccgggattgattgtgctttcctaacccccttggacctactctccctcctccccaccattcctcttcccccacatgtgtggcacgctgcagccctcaaggccagccctggcccctccactgcttctctccccatccacaatggagaaggtgaaaagaggagggaaaggcctttggtgtggacaagcatgtggacgccctccgtcctgcagtcttgccagcccaccacagccactgtagaccacaggcaggccgtgtactgcaccactgggaggacgtggagaggacagtgaacttccaggcaagagcttccttcttttgtctcacgagtttttcttagagctcttgcctgagctggcttccctccttcagacattgacatgagatcttaagcaaacagtcccaaacctcttaggggtgaaaaaagaaacatgccacttgattaggagagagacagcagtgtttgaactacagcatctttacactagcttgtgttttgtgctacgtataccagcttccaaaattagcatctcattgagccagagaagacaaggagatctccctctgggcatctggctttgctgcgtctctagagggttaggataccaggccgagttcaggccactgctagctttctcatactcccacaggctagaccagagatgccaagtcccaacagcactgagctgtgtgcactgtgccagggacaggagggtttgtgaactgcctgtcagggtacctgttagcccctgacaactcagtggggtgaagttttggaggtcagagtctgctttcgtaggctctttagacagcacctaccacttggttctccagcgtagactcctgggagcagccaactgcagccattgccatccagtggggagatgggttagggaggaggacgggctgactcctctcctgtaataaagctgacaagagttctagaggattctgcttctctagtaactagacaggtgatacgcatttgcttgccacattaagggaaaatggtgtcatttgttgcagaaaaacaatggatacattttcttctggcctaaatgaatatttatgtgcaaacataggcaactgttaaaggctggaattttcaaaagatccaaacagagacttcctgcatcttctgcctttccaacagaagcggtgatcgtctaagtatgagcctgtggcttcctttgtgcatttgagcatgctgtaattaagatgagatcagtttcttagaaaaagctttcctgaatccctctgacgttgcctgggatctttctgttgattcgtcttttctggagattgggacagagcatctgtggtccagggaagttagtcctctggcctcaattctgttgtggatgtgcagtgataagcgggcattgcgtgcctcgggggatgcctagttcgtggcttcctggctgttttgtccttctgtgtcttgtagctgtagggtgccagctcagggagtggggtgttggcggcgtttccgcggttggcctccttgctttgccgcacctccaggttctgggcatgagaggccgtggcctcatttctggtggataacctttttagtttaatagcatctttaattagatcacagcattgaattcaaaatttcttctgcaaagaaagttgtggggcataagacaccgggaatgagggaggaggaagacagttgtgttttctctttaaaccttgagctctagccgatgcatttgtcaggaaatacagcactttgtcttaagaaaacaaggaaggaggccgggcgcagtggctcacgcctgtaatcccagcactttgggaggccgaggcgggcggatcacctgaggtggggagtatgagaccaccctgactaacatggagagaccctgtctctactaaaagtacagaattagccgggcgtggtggcgcatgcccataatcccagctactgaggagacttgaggtaggagaatcacttgaacctcagcggcggaggttgcagtgagtcgagatcgcgccagtgcactccagcctgggcaagaagagcgaaactgggtctcaagttaaaaaaagaaagcaaggaaagagtaatttacaacgaaggaaaaaaacccacagcacacccttcgcggctgtcagcgctctcctgatgtcacagtggctgcgtgtccttggggtgggtgaggtgtggggagcccagcccctggccctgcctcccgcgccccgctccccttctctctcttactcggttaagccatagcgaggcctccgctcgtttcagatatgaatttgttttatagattataaatatgcatatacagtgtatgtataaagcagaatgcctgcctttcctggttattttttgtaccatattgtaaattatattatttattctttaccaattttgggaataaaaggtgttttggttatttaatataataagagctgttaaacttctgtttaaatttccagttcaacttgtaaatgtttttattgtgcataaatacatactaatgttgatct

SEQ ID NO: 122586 - DNA, 7772 bp, Homo sapiens
  Payload ID: 4016
  Gene Symbol: CRAMP1
  Gene Name: cramped chromatin regulator homolog 1
  Uniprot ID: Q96RY5
  ENST ID: ENST00000397412
  CDS Start-End: 100-3909
cgcgcaccccggccccgcccccgcgcgccgtccgtgaggtccccaccggccgccgtagccggaactgctgctgagggcggcgggccggcttcgctagggatgacagtgaagttgggcgacggcggcagcggggaggacgggctcaagaagctgggcaagcgggcggccgatgaggagtccctggaaggagaaggggccggcggcgcagacgcggccgaggagagcagcggcacaaagagggacgagaagaccccccgggccggcgccgacggcccccccgcgccccccggcgcgccgcaggcgccgtccccgccgcagggcagcccccaggaccagcaccacttcctccggtccagcgtgcggccgcagagcaagaggcccaggaaggatcctccgagcgctgtggggagcggcaacgccggtggctcggggccccgcggaaaaggagctgaaggtggtggatcatcgtctggaaatgtgtctggggttgcccctgctgcccctgcagggggctcgcgctcctcctcccggaacttagggtcttctggtggcgagaaggaagaaggcaaaaaggtccggcggcagtgggagtcgtggagcacagaggacaagaacaccttcttcgaggggctgtacgagcatgggaaagactttgaagcgattcagaacaacattgcgctgaagtacaagaagaaaggcaagccagcaagcatggtgaagaacaaggagcaggtccgccacttctactaccgcacctggcacaagatcaccaagtacatcgactttgatcatgtgttctctcgaggcctgaagaagtcatcccaggaactgtatggcctgatctgctatggcgagctgcgcaagaagattgggggctgtatggatgacaagaatgcaacaaagctgaatgaactcattcaggttggggccaccactgtacgttacaaagggcggaacctgcggatcaaagcgcccatgtgccgggccctgaagaagctgtgcgatccagatggcttgagtgatgaagaggaccagaagccagtgcgcctgcctctgaaagtccctatagagctacagccgcggaacaaccacgcctgggcccgtgtgcagagccttgcccagaacccacgcctcaggatgatcgtggagctacatcgaaaggtctccagcctcatcgaattcttgaagcagaagtgggcgctccatgaggtgcgagttcggaagacactcgaggagcggcagctgcaggactcatgctccgcaccgatgcaggagaaggtgacactgcacttgttcccaggcgagaactgtacactgacaccgctgccgggcgtggctcgcgtggtgcactccaaggccttctgcacagtgcactggcaggagggcggccggtgcaagcagagtgccaaggacgcccacgtgctgcccccagcccagatcctgggcatccagagtgggcagggcacggcccggggccaggtgaaatgcccgcggagcggagctgagggcaagggtgtggggcggccccctcctgcggctgacgccttgcagagctccggagagagttcccccgaaagcgcccccggggagggggctgccctaagcttgagcagcccggacgctcctgacaggcctcctcccaggcaccaggacactgggccatgtcttgagaagacccctgcagaaggcagggacagtcccacccgggagccaggggccttgccgtgtgcctgtggccagctcccagacctggaggacgagctctcgcttctagaccccttgccccgctacctaaagtcctgtcaggacctcattgtccccgagcagtgccgctgtgcggacacacggcctgggagcgagcagccccctctgggcggggcggcctccccagaggtgctggctcctgtcagcaaggaggctgctgaccttgctcccactggcccatccccgaggcccggccccgggctcctgctggatgtttgcactaaagacttggcagatgcacctgcggaggagctccaggagaaggggagccccgcggggcctccgccgtctcagggacagcctgccgccaggcccccgaaggaggtccccgccagccggctggctcagcagctccgtgaggagggctggaacctgcagacctccgaaagcctcacgctggccgaagtctacctcatgatgggcaagcccagcaagctgcagctggagtacgactggctggggcccggccgccaggacccccgccccggctccctacccaccgccctccacaagcagcgcctcctcagctgcctcctgaagctcatttccaccgaggtcaaccccaagctggctctggaagcaaacaccatctctacagcctcagtaaggcccgcccaggaggagcagtcgatgacgcccccagggaaggtggtgaccgtcagctctcgcagcccccgctgccctcggaaccaggcctccctccgcagcagcaagaccttcccgcccagctctgcaccctgctcctcaggtttgagaaaccctccaagacccctcttggtgcctggtccctccagcacaggaagcaatgactcagatggaggcctttttgctgtcccgacaaccttgccacccaacagccgacacgggaagctcttctctcccagtaaagaagcagagctgactttccgccagcatctgaactccatcagtatgcagtcggatttcttcctgccaaagccccggaagctgcggaaccggcacctgcggaagccactggtggtccagagaacactgctccctagaccatcggaaaaccagtcccacaacgtttgttccttctccatcctgtctaactcttccgtaactgggagaggttcgttccggcccatccagtcttctctgaccaaagcagctctgtctcggccgatcgtgcccaaggtccttccaccccaggccacgagtcacctggccagtgctatcgacttagcagctacaagtgccggcatcctttccgggaaccccctccctgccttggacaccgagggcttgtctggcatctctccactgtcttcagacgaggtgacgggtgccatctcggggcaggactctactggaactcaccaggatggagacaccctccccaccgtggggggctccgacccatttgtcagcatcccttcgaggcctgagcaggagccagtggcagacagtttccagggctcatctgttctctccttatctgagctgcccaaggcccctctccagaatggcctctccataccgctgtcctcgtcagagagctccagcacccggctgtctccaccagacgtctctgctctgctcgacatctccctgcccggcccacctgaggatgcgctgtcacagggcgagcctgccacacacattagcgactccatcattgagatcgccatcagctccggtcagtacggtgaaggagtccctctttctccagcaaaactgaatggcagtgacagttccaagagccttccctccccgtccagcagcccccagccacactggatcgcctctcccacccacgacccccagtggtaccccagtgactccaccgactcctcgctcagcagcctgtttgcaagcttcatctccccagagaagagccggaagatgttgccgactcccattgggaccaacagtggcacttccttgcttggccccagcttgttggatggaaactcgcgggactcatttgtgtccaggtccctggctgacgttgcagaggttgtggattcccagctggtgtgcatgatgaacgaaaacagcattgattacatttctcggttcaatgacctggcccaagagctgtccatcgctgagcctggccgccgagaagctctgtttgatggtggtggaggcggccccgctgtcagtgacctgtcccagtgaccacacgtcctggtggcggatgaagccctcttcgagctagagaaaaatagataagcccagcagccccagaagatggtctgaacagaggcatctccgcacccaagactgtgcaacgggcaggaacgtggtcacagagctgcttccccacgagcagcaggcaacggcgtccaaggagactaggatgagttcttggcaagggccagcgttagaaatcactgtggtactagagccgttcttcaccacgcctgggcccatgttagggtctgcataatgatcccatttcagcctgtgctctgcctcgattgttgtgttggacattccggtggcatttccttctgagacaagggagtatgtgtgccttggtgtagttgctgtgcactaggagctgtgatctccctctctgcagggaggccccagcccctgctgcttgctttctgccaaacctgtgctatgcatcagctgtgccctctgtggactgtaacgggcaggacagttgggtgtggcctgggctcatgcctggtggtgtcacatcccaaggcagcaagagcatggataccgatcacagggctgctgcggagtcgtggggccctgggctggtgcctcccctccctagaggttttgttcgtactcttaacagggagtgggggcaggaagagtcctgtactatgcaggttgtgtggactttacatgggaccctgctaagctggttgaaaatgtttttcttgtgttttaagaattaggagacatggaagaggaagaacaaagtcccctctgtagttggtttccttcctgtgtccctttgcaagcttccaggcgatctaaggtgtcatttctccctcctggggtgacccttaggcgctaatatgattacagcgaagactttcctgataagttctcaaactcgatgtgtgactgtttggcacttgagacaaacctgcctttgcagggaaagtgtctctcacgggcattggtgtgggcgtgcctgacatacgtgttcagtcccttgcatacctttgccttgagacttctgtgtctccttcccatttgggacacccaggtgagggcccagacatctggatgtggtcagacctcaccaaatatatgccttcgtggtggtctccctccttgcgccctcttgggtggccagcgttcctactgcagacggcccaacatccagtctttccccaggacagagctaacaagggcccctttgccttctcatcctcaggagttccaggcacatgagtcaccgtccatccacatccagtgtggcctggagctgctacagaggtgttgggcaggccatgcctgtgccgccatctctcccttcctgcctcatttcatcccccgcagcagccgggattgattgtgctttcctaacccccttggacctactctccctcctccccaccattcctcttcccccacatgtgtggcacgctgcagccctcaaggccagccctggcccctccactgcttctctccccatccacaatggagaaggtgaaaagaggagggaaaggcctttggtgtggacaagcatgtggacgccctccgtcctgcagtcttgccagcccaccacagccactgtagaccacaggcaggccgtgtactgcaccactgggaggacgtggagaggacagtgaacttccaggcaagagcttccttcttttgtctcacgagtttttcttagagctcttgcctgagctggcttccctccttcagacattgacatgagatcttaagcaaacagtcccaaacctcttaggggtgaaaaaagaaacatgccacttgattaggagagagacagcagtgtttgaactacagcatctttacactagcttgtgttttgtgctacgtataccagcttccaaaattagcatctcattgagccagagaagacaaggagatctccctctgggcatctggctttgctgcgtctctagagggttaggataccaggccgagttcaggccactgctagctttctcatactcccacaggctagaccagagatgccaagtcccaacagcactgagctgtgtgcactgtgccagggacaggagggtttgtgaactgcctgtcagggtacctgttagcccctgacaactcagtggggtgaagttttggaggtcagagtctgctttcgtaggctctttagacagcacctaccacttggttctccagcgtagactcctgggagcagccaactgcagccattgccatccagtggggagatgggttagggaggaggacgggctgactcctctcctgtaataaagctgacaagagttctagaggattctgcttctctagtaactagacaggtgatacgcatttgcttgccacattaagggaaaatggtgtcatttgttgcagaaaaacaatggatacattttcttctggcctaaatgaatatttatgtgcaaacataggcaactgttaaaggctggaattttcaaaagatccaaacagagacttcctgcatcttctgcctttccaacagaagcggtgatcgtctaagtatgagcctgtggcttcctttgtgcatttgagcatgctgtaattaagatgagatcagtttcttagaaaaagctttcctgaatccctctgacgttgcctgggatctttctgttgattcgtcttttctggagattgggacagagcatctgtggtccagggaagttagtcctctggcctcaattctgttgtggatgtgcagtgataagcgggcattgcgtgcctcgggggatgcctagttcgtggcttcctggctgttttgtccttctgtgtcttgtagctgtagggtgccagctcagggagtggggtgttggcggcgtttccgcggttggcctccttgctttgccgcacctccaggttctgggcatgagaggccgtggcctcatttctggtggataacctttttagtttaatagcatctttaattagatcacagcattgaattcaaaatttcttctgcaaagaaagttgtggggcataagacaccgggaatgagggaggaggaagacagttgtgttttctctttaaaccttgagctctagccgatgcatttgtcaggaaatacagcactttgtcttaagaaaacaaggaaggaggccgggcgcagtggctcacgcctgtaatcccagcactttgggaggccgaggcgggcggatcacctgaggtggggagtatgagaccaccctgactaacatggagagaccctgtctctactaaaagtacagaattagccgggcgtggtggcgcatgcccataatcccagctactgaggagacttgaggtaggagaatcacttgaacctcagcggcggaggttgcagtgagtcgagatcgcgccagtgcactccagcctgggcaagaagagcgaaactgggtctcaagttaaaaaaagaaagcaaggaaagagtaatttacaacgaaggaaaaaaacccacagcacacccttcgcggctgtcagcgctctcctgatgtcacagtggctgcgtgtccttggggtgggtgaggtgtggggagcccagcccctggccctgcctcccgcgccccgctccccttctctctcttactcggttaagccatagcgaggcctccgctcgtttcagatatgaatttgttttatagattataaatatgcatatacagtgtatgtataaagcagaatgcctgcctttcctggttattttttgtaccatattgtaaattatattatttattctttaccaattttgggaataaaaggtgttttggttatttaatataataagagctgttaaacttctgtttaaatttccagttcaacttgtaaatgtttttattgtgcataaatacatactaatgttgatctaa

SEQ ID NO: 122587 - DNA, 550 bp, Homo sapiens
  Payload ID: 4016
  Gene Symbol: CRAMP1
  Gene Name: cramped chromatin regulator homolog 1
  ENST ID: ENST00000415022
  CDS Start-End: 1-550
cgggaagctcttctctcccagtaaagaagcagagctgactttccgccagcatctgaactccatcagtatgcagtcggatttcttcctgccaaagccccggaagctgcggaaccggcacctgcggaagccactggtggtccagagaacactgctccctagaccatcggaaaaccagtcccacaacgtttgttccttctccatcctgtctaactcttccgtaactggtgctatcgacttagcagctacaagtgccggcatcctttccgggaaccccctccctgccttggacaccgagggcttgtctggcatctctccactgtcttcagacgaggtgacgggtgccatctcggggcaggactctactggaactcaccaggatggagacaccctccccaccgtggggggctcatctgttctctccttatctgagctgcccaaggcccctctccagaatggcctctccataccgctgtcctcgtcagagagctccagcacccggctgtctccaccagacgtctctgctctgctcgacatctccctgcccggccca

SEQ ID NO: 122588 - DNA, 1275 bp, Homo sapiens
  Payload ID: 4017
  Gene Symbol: CFDP1
  Gene Name: craniofacial development protein 1
  Uniprot ID: Q9UEE9
  ENST ID: ENST00000283882
  CDS Start-End: 134-1033
gtgcaaagcgctgtcgggggccgccctagctgccgtcgccgccgccggggctctatggtctctccctagagctttgccgttggaggcggctgctgcggtcttgtgagtttgaccagcgtcgagcggcagcaacatggaggaattcgactccgaagacttctctacgtcggaggaggacgaggactacgtgccgtcgggtggagagtatagtgaagatgatgtaaatgaattagtgaaggaagatgaagtggatggtgaagagcagacacagaaaacccaagggaaaaaaagaaaggcccagagcattccagccaggaagagaagacaaggtggcctctcattagaagaagaggaagaggaggatgccaattcagaatctgagggaagcagtagtgaggaggaagatgacgctgcagagcaggaaaaaggcattggatcagaggatgccaggaaaaagaaggaggacgaactctgggccagcttcctcaatgatgtgggaccaaaatcaaaagtgcccccaagtacacaagttaagaaaggagaggagactgaagagacaagttcaagtaaattgttggtaaaagcagaagagctagagaaacctaaagaaacagaaaaagttaaaatcaccaaggtgtttgattttgctggtgaagaagtaagggtaactaaggaagtggatgctacatctaaagaggccaaatccttcttcaagcagaatgagaaagaaaaaccacaggctaatgttccttcagctctgccatcactccctgccgggtcagggttaaaaagatcaagtggcatgagcagccttttggggaaaattggtgccaagaagcagaaaatgagcacccttgagaagtccaaactggactgggagagcttcaaggaggaagaggggattggtgaagaactggccatccataatcgagggaaagaggggtacattgaacggaaagccttccttgaccgagtggatcacaggcagtttgaaattgagcgagatctcaggctgagcaaaatgaaaccttgatgttacgggctaaatcaagagcagcttaatcctgtttacaatgtgagctttttgtgcgtctgtgaaatgttttacagtgtttctcatcatctgtttcccagcaaggtcttttttttttctacattgaagttctgtctatgtatcttaatcacaaatggtttcattcactttacttttaaaaatttgtccttaaatgaataaataaaataaaagttggtcctgtgagaggataatgaagatga

SEQ ID NO: 122589 - DNA, 342 bp, Homo sapiens
  Payload ID: 4017
  Gene Symbol: CFDP1
  Gene Name: craniofacial development protein 1
  ENST ID: ENST00000566254
  CDS Start-End: 192-342
gcggtcttgtgagtttgaccagcgtcgagcggcagcaacatggaggaattcgactccgaagacttctctacgtcggaggaggacgaggactacgtgccgtcgggtcttcactgctttggccagtaggagctctttcaggctggatcttgtatccttttaatttgatctttttttattattatttattttttatgagtcggcgtcctgcttactgtagccttcaattcctgggctcaagtgatcctcctgcctcagcctccccagtagatggaactacaggtggagagtatagtgaagatgatgtaaatgaattagtgaaggaagatgaagtggatggtgaag

SEQ ID NO: 122590 - DNA, 454 bp, Homo sapiens
  Payload ID: 4017
  Gene Symbol: CFDP1
  Gene Name: craniofacial development protein 1
  ENST ID: ENST00000569341
  CDS Start-End: 1-60
caggctaatgttccttcagctctgccatcactccctgccgggtcaggatgtgtcatttaaaaaactgttatgacctgctgaattgatttcacaatcaactgcaacctgaatttgacaaaatactgctctagacaacgtatggaattagccttcagcaggtgattaagagttgccaggaagaagaaatttgatgcctagagattgatctgctttttgtttttaagttctagttctggttcgatttcagaaccagtctgcaggcaactctgcattgtctccttagagaactggacaattccactgatctggatcctttggcagcaagctgacattttattgaggctggtcagcactcctggccagagtcttgaaattgtgggtgtgtttttgctgcccattgttgagttattcatgaacagatatgaaaaccatatatatccgaattttgttacca

SEQ ID NO: 122591 - DNA, 395 bp, Homo sapiens
  Payload ID: 4017
  Gene Symbol: CFDP1
  Gene Name: craniofacial development protein 1
  ENST ID: ENST00000612761
  CDS Start-End: 1-52
agctctgccatcactccctgccgggtcagggaagaagaaatttgatgcctagagattgatctgctttttgtttttaagttctagttctggttcgatttcagaaccagtctgcaggcaactctgcattgtctccttagagaactggacaattccactgatctggatcctttggcagcaagctgacattttattgaggctggtcagcactcctggccagagtcttgaaattgtgggtgtgtttttgctgcccattgttgagttattcatgaacagatatgaaaaccatatatatccgaattttgttaccactagatgtgatgagtttttctttttgattatttggggattcttagttctctgtcaaactcttcagattaaaacccttcttatagcta

SEQ ID NO: 122592 - DNA, 2015 bp, Homo sapiens
  Payload ID: 4018
  Gene Symbol: CRP
  Gene Name: C-reactive protein, pentraxin-related
  Uniprot ID: P02741
  ENST ID: ENST00000255030
  CDS Start-End: 105-779
aaggcaagagatctaggacttctagcccctgaactttcagccgaatacatcttttccaaaggagtgaattcaggcccttgtatcactggcagcaggacgtgaccatggagaagctgttgtgtttcttggtcttgaccagcctctctcatgcttttggccagacagacatgtcgaggaaggcttttgtgtttcccaaagagtcggatacttcctatgtatccctcaaagcaccgttaacgaagcctctcaaagccttcactgtgtgcctccacttctacacggaactgtcctcgacccgtgggtacagtattttctcgtatgccaccaagagacaagacaatgagattctcatattttggtctaaggatataggatacagttttacagtgggtgggtctgaaatattattcgaggttcctgaagtcacagtagctccagtacacatttgtacaagctgggagtccgcctcagggatcgtggagttctgggtagatgggaagcccagggtgaggaagagtctgaagaagggatacactgtgggggcagaagcaagcatcatcttggggcaggagcaggattccttcggtgggaactttgaaggaagccagtccctggtgggagacattggaaatgtgaacatgtgggactttgtgctgtcaccagatgagattaacaccatctatcttggcgggcccttcagtcctaatgtcctgaactggcgggcactgaagtatgaagtgcaaggcgaagtgttcaccaaaccccagctgtggccctgaggcccagctgtgggtcctgaaggtacctcccggttttttacaccgcatgggccccacgtctctgtctctggtacctcccgcttttttacactgcatggttcccacgtctctgtctctgggcctttgttcccctatatgcattgcaggcctgctccaccctcctcagcgcctgagaatggaggtaaagtgtctggtctgggagctcgttaactatgctgggaaacggtccaaaagaatcagaatttgaggtgttttgttttcatttttatttcaagttggacagatcttggagataatttcttacctcacatagatgagaaaactaacacccagaaaggagaaatgatgttataaaaaactcataaggcaagagctgagaaggaagcgctgatcttctatttaattccccacccatgacccccagaaagcaggagggcattgcccacattcacagggctcttcagtctcagaatcaggacactggccaggtgtctggtttgggtccagagtgctcatcatcatgtcatagaactgctgggcccaggtctcctgaaatgggaagcccagcaataccacgcagtccctccactttctcaaagcacactggaaaggccattagaattgccccagcagagcagatctgctttttttccagagcaaaatgaagcactaggtataaatatgttgttactgccaagaacttaaatgactggtttttgtttgcttgcagtgctttcttaattttatggctcttctgggaaactcctccccttttccacacgaaccttgtggggctgtgaattctttcttcatccccgcattcccaatatacccaggccacaagagtggacgtgaaccacagggtgtcctgtcagaggagcccatctcccatctccccagctccctatctggaggatagttggatagttacgtgttcctagcaggaccaactacagtcttcccaaggattgagttatggactttgggagtgagacatcttcttgctgctggatttccaagctgagaggacgtgaacctgggaccaccagtagccatcttgtttgccacatggagagagactgtgaggacagaagccaaactggaagtggaggagccaagggattgacaaacaacagagccttgaccacgtggagtctctgaatcagccttgtctggaaccagatctacacctggactgcccaggtctataagccaataaagcccctgtttacttga

SEQ ID NO: 122593 - DNA, 667 bp, Homo sapiens
  Payload ID: 4018
  Gene Symbol: CRP
  Gene Name: C-reactive protein, pentraxin-related
  ENST ID: ENST00000368110
  CDS Start-End: 105-413
aaggcaagagatctaggacttctagcccctgaactttcagccgaatacatcttttccaaaggagtgaattcaggcccttgtatcactggcagcaggacgtgaccatggagaagctgttgtgtttcttggtcttgaccagcctctctcatgcttttggccagacagacatgtcgaggaaggcttttgtgtttcccaaagagtcggatacttcctatgtatccctcaaagcaccgttaacgaagcctctcaaagccttcactgtgtgcctccacttctacacggaactgtcctcgacccatgagattaacaccatctatcttggcgggcccttcagtcctaatgtcctgaactggcgggcactgaagtatgaagtgcaaggcgaagtgttcaccaaaccccagctgtggccctgaggcccagctgtgggtcctgaagtgctttcttaattttatggctcttctgggaaactcctccccttttccacacgaaccttgtggggctgtgaattctttcttcatccccgcattcccaatatacccaggccacaagagtggacgtgaaccacagggtgtcctgtcagaggagcccatctcccatctccccagctccctatctggaggatagttggatagttacgtgttcctagcaggaccaactacagtcttcc

SEQ ID NO: 122594 - DNA, 512 bp, Homo sapiens
  Payload ID: 4018
  Gene Symbol: CRP
  Gene Name: C-reactive protein, pentraxin-related
  ENST ID: ENST00000368111
  CDS Start-End: 105-413
aaggcaagagatctaggacttctagcccctgaactttcagccgaatacatcttttccaaaggagtgaattcaggcccttgtatcactggcagcaggacgtgaccatggagaagctgttgtgtttcttggtcttgaccagcctctctcatgcttttggccagacagacatgtcgaggaaggcttttgtgtttcccaaagagtcggatacttcctatgtatccctcaaagcaccgttaacgaagcctctcaaagccttcactgtgtgcctccacttctacacggaactgtcctcgacccatgagattaacaccatctatcttggcgggcccttcagtcctaatgtcctgaactggcgggcactgaagtatgaagtgcaaggcgaagtgttcaccaaaccccagctgtggccctgaggcccagctgtgggtcctgaaggaccaactacagtcttcccaaggattgagttatggactttgggagtgagacatcttcttgctgctggatttccaagc

SEQ ID NO: 122595 - DNA, 787 bp, Homo sapiens
  Payload ID: 4018
  Gene Symbol: CRP
  Gene Name: C-reactive protein, pentraxin-related
  Uniprot ID: P02741
  ENST ID: ENST00000368112
  CDS Start-End: 105-380
aaggcaagagatctaggacttctagcccctgaactttcagccgaatacatcttttccaaaggagtgaattcaggcccttgtatcactggcagcaggacgtgaccatggagaagctgttgtgtttcttggtcttgaccagcctctctcatgcttttggccagacagacatgtcgaggaaggcttttgtgtttcccaaagagtcggatacttcctatgtatccctcaaagcaccgttaacgaagcctctcaaagccttcactgtgtgcctccacttctacacggaactgtcctcgacccgtggtcctaatgtcctgaactggcgggcactgaagtatgaagtgcaaggcgaagtgttcaccaaaccccagctgtggccctgaggcccagctgtgggtcctgaagtgctttcttaattttatggctcttctgggaaactcctccccttttccacacgaaccttgtggggctgtgaattctttcttcatccccgcattcccaatatacccaggccacaagagtggacgtgaaccacagggtgtcctgtcagaggagcccatctcccatctccccagctccctatctggaggatagttggatagttacgtgttcctagcaggaccaactacagtcttcccaaggattgagttatggactttgggagtgagacatcttcttgctgctggatttccaagctgagaggacgtgaacctgggaccaccagtagccatcttgtttgccacatggagagagactgtgaggacagaagccaaactggaagtggaggagc

SEQ ID NO: 122596 - DNA, 1063 bp, Homo sapiens
  Payload ID: 4018
  Gene Symbol: CRP
  Gene Name: C-reactive protein, pentraxin-related
  ENST ID: ENST00000437342
  CDS Start-End: 399-539
aaggcaagagatctaggacttctagcccctgaactttcagccgaatacatcttttccaaaggagtgaattcaggcccttgtatcactggcaacaagacaatgagattctcatattttggtctaaggatataggatacagttttacagtgggtgggtctgaaatattattcgaggttcctgaagtcacagtagctccagtacacatttgtacaagctgggagtccgcctcagggatcgtggagttctgggtagatgggaagcccagggtgaggaagagtctgaagaagggatacactgtgggggcagaagcaagcatcatcttggggcaggagcaggattccttcggtgggaactttgaaggaagccagtccctggtgggagacattggaaatgtgaacatgtgggactttgtgctgtcaccagatgagattaacaccatctatcttggcgggcccttcagtcctaatgtcctgaactggcgggcactgaagtatgaagtgcaaggcgaagtgttcaccaaaccccagctgtggccctgaggcccagctgtgggtcctgaagtgctttcttaattttatggctcttctgggaaactcctccccttttccacacgaaccttgtggggctgtgaattctttcttcatccccgcattcccaatatacccaggccacaagagtggacgtgaaccacagggtgtcctgtcagaggagcccatctcccatctccccagctccctatctggaggatagttggatagttacgtgttcctagcaggaccaactacagtcttcccaaggattgagttatggactttgggagtgagacatcttcttgctgctggatttccaagctgagaggacgtgaacctgggaccaccagtagccatcttgtttgccacatggagagagactgtgaggacagaagccaaactggaagtggaggagccaagggattgacaaacaacagagccttgaccacgtggagtctctgaatcagccttgtctggaaccagatctacacctggactgcccaggtctataagccaataaagcccctgtttac

SEQ ID NO: 122597 - DNA, 1709 bp, Homo sapiens
  Payload ID: 4019
  Gene Symbol: CKB
  Gene Name: creatine kinase, brain
  Uniprot ID: P12277
  ENST ID: ENST00000348956
  CDS Start-End: 359-1504
agtttcccgcccagaggcaagggcgtgcgaggggatccagatatccaaggacctgaggtttcggcctcgaggtcttgggcgggggactgggcaggctgcgcggggtcccagcgaggggacagctcgggtgggcggccagggtgttgggggctgcgggcggcggacaaagcggcggcaccaccccgcggcgcgggccaatggaatgaatgggctataaatagccgccaatgggcggcccgcgttgtgccccttaagagccgcgggagcgcggagcggccgctgttcgcctgcgtcgctccgggagctgccgacggacggagcgcccccgcccccgcccggccgcccgcccgccgccgccatgcccttctccaacagccacaacgcactgaagctgcgcttcccggccgaggacgagttccccgacctgagcgcccacaacaaccacatggccaaggtgctgacccccgagctgtacgcggagctgcgcgccaagagcacgccgagcggcttcacgctggacgacgtcatccagacaggcgtggacaacccgggccacccgtacatcatgaccgtgggctgcgtggcgggcgacgaggagtcctacgaagtgttcaaggatctcttcgaccccatcatcgaggaccggcacggcggctacaagcccagcgatgagcacaagaccgacctcaaccccgacaacctgcagggcggcgacgacctggaccccaactacgtgctgagctcgcgggtgcgcacgggccgcagcatccgtggcttctgcctccccccgcactgcagccgcggggagcgccgcgccatcgagaagctcgcggtggaagccctgtccagcctggacggcgacctggcgggccgatactacgcgctcaagagcatgacggaggcggagcagcagcagctcatcgacgaccacttcctcttcgacaagcccgtgtcgcccctgctgctggcctcgggcatggcccgcgactggcccgacgcccgcggtatctggcacaatgacaataagaccttcctggtgtgggtcaacgaggaggaccacctgcgggtcatctccatgcagaaggggggcaacatgaaggaggtgttcacccgcttctgcaccggcctcacccagattgaaactctcttcaagtctaaggactatgagttcatgtggaaccctcacctgggctacatcctcacctgcccatccaacctgggcaccgggctgcgggcaggtgtgcatatcaagctgcccaacctgggcaagcatgagaagttctcggaggtgcttaagcggctgcgacttcagaagcgaggcacaggcggtgtggacacggctgcggtgggcggggtcttcgacgtctccaacgctgaccgcctgggcttctcagaggtggagctggtgcagatggtggtggacggagtgaagctgctcatcgagatggagcagcggctggagcagggccaggccatcgacgacctcatgcctgcccagaaatgaagcccggcccacacccgacaccagccctgctgcttcctaacttattgcctgggcagtgcccaccatgcacccctgatgttcgccgtctggcgagcccttagccttgctgtagagacttccgtcacccttggtagagtttatttttttgatggctaagatactgctgatgctgaaataaactagggttttggcctgcctgcgtctg

SEQ ID NO: 122598 - DNA, 1239 bp, Homo sapiens
  Payload ID: 4019
  Gene Symbol: CKB
  Gene Name: creatine kinase, brain
  ENST ID: ENST00000553652
  CDS Start-End: 69-245
cgtcgctccgggagctgccgacggacggagcgcccccgcccccgcccggccgcccgcccgccgccgccatgcccttctccaacagccacaacgcactgaagctgcgcttcccggccgaggacgagccacccgtacatcatgaccgtgggctgcgtggcgggcgacgaggagtcctacgaagtgttcaaggatctcttcgaccccatcatcgaggaccggcacggcggctacaagcccagcgatgagcacaagaccgacctcaaccccgacaacctgcagggcggcgacgacctggaccccaactacgtgctgagctcgcgggtgcgcacgggccgcagcatccgtggcttctgcctccccccgcactgcagccgcggggagcgccgcgccatcgagaagctcgcggtggaagccctgtccagcctggacggcgacctggcgggccgatactacgcgctcaagagcatgacggaggcggagcagcagcagctcatcgacgaccacttcctcttcgacaagcccgtgtcgcccctgctgctggcctcgggcatggcccgcgactggcccgacgcccgcggtatctggcacaatgacaataagaccttcctggtgtgggtcaacgaggaggaccacctgcgggtcatctccatgcagaaggggggcaacatgaaggaggtgttcacccgcttctgcaccggcctcacccagattgaaactctcttcaagtctaaggactatgagttcatgtggaaccctcacctgggctacatcctcacctgcccatccaacctgggcaccgggctgcgggcaggtgtgcatatcaagctgcccaacctgggcaagcatgagaagttctcggaggtgcttaagcggctgcgacttcagaagcgaggcacaggcggtgtggacacggctgcggtgggcggggtcttcgacgtctccaacgctgaccgcctgggcttctcagaggtggagctggtgcagatggtggtggacggagtgaagctgctcatcgagatggagcagcggctggagcagggccaggccatcgacgacctcatgcctgcccagaaatgaagcccggcccacacccgacaccagccctgctgcttcctaacttattgcctgggcagtgcccaccatgcacccctgatgttcgccgtctggcgagcccttagccttgctgtagagacttccgtcacccttggtagagtttatttttttgatggctaagatact

SEQ ID NO: 122599 - DNA, 542 bp, Homo sapiens
  Payload ID: 4019
  Gene Symbol: CKB
  Gene Name: creatine kinase, brain
  ENST ID: ENST00000553610
  CDS Start-End: 1-540
ttcctcttcgacaagcccgtgtcgcccctgctgctggcctcgggcatggcccgcgactggcccgacgcccgcggtatctggcacaatgacaataagaccttcctggtgtgggtcaacgaggaggaccacctgcgggtcatctccatgcagaaggggggcaacatgaaggagattgaaactctcttcaagtctaaggactatgagttcatgtggaaccctcacctgggctacatcctcacctgcccatccaacctgggcaccgggctgcgggcaggtgtgcatatcaagctgcccaacctgggcaagcatgagaagttctcggaggtgcttaagcggctgcgacttcagaagcgaggcacaggcggtgtggacacggctgcggtgggcggggtcttcgacgtctccaacgctgaccgcctgggcttctcagaggtggagctggtgcagatggtggtggacggagtgaagctgctcatcgagatggagcagcggctggagcagggccaggccatcgacgacctcatgcctgcccagaaatgaag

SEQ ID NO: 122600 - DNA, 523 bp, Homo sapiens
  Payload ID: 4019
  Gene Symbol: CKB
  Gene Name: creatine kinase, brain
  ENST ID: ENST00000557530
  CDS Start-End: 139-523
gctgttcgcctgcgtcgctccgggagctgccgacggacggagcgcccccgcccccgcccggccgcccgccacaacgcactgaagctgcgcttcccggccgaggacgagttccccgacctgagcgcccacaacaaccacatggccaaggtgctgacccccgagctgtacgcggagctgcgcgccaagagcacgccgagcggcttcacgctggacgacgtcatccagacaggcgtggacaacccgggccacccgtacatcatgaccgtgggctgcgtggcgggcgacgaggagtcctacgaagtgttcaaggatctcttcgaccccatcatcgaggaccggcacggcggctacaagcccagcgatgagcacaagaccgacctcaaccccgacaacctgcagggcggcgacgacctggaccccaactacgtgctgagctcgcgggtgcgcacgggccgcagcatccgtggcttctgcctccccccgcactgcagccgcggggagcgccgcgccatcgagaagctcg

SEQ ID NO: 122601 - DNA, 625 bp, Homo sapiens
  Payload ID: 4019
  Gene Symbol: CKB
  Gene Name: creatine kinase, brain
  ENST ID: ENST00000554989
  CDS Start-End: 1-61
gtcgcccctgctgctggcctcgggcatggcccgcgactggcccgacgcccgcggtatctgattgaaactctcttcaagtctaaggactatgagttcatgtggaaccctcacctgggctacatcctcacctgcccatccaacctgggcaccgggctgcgggcaggtgtgcatatcaagctgcccaacctgggcaagcatgagaagttctcggaggtgcttaagcggctgcgacttcagaagcgaggcacaggcggtgtggacacggctgcggtgggcggggtcttcgacgtctccaacgctgaccgcctgggcttctcagaggtggagctggtgcagatggtggtggacggagtgaagctgctcatcgagatggagcagcggctggagcagggccaggccatcgacgacctcatgcctgcccagaaatgaagcccggcccacacccgacaccagccctgctgcttcctaacttattgcctgggcagtgcccaccatgcacccctgatgttcgccgtctggcgagcccttagccttgctgtagagacttccgtcacccttggtagagtttatttttttgatggctaagatactgctgatgctgaaataaactagggttttggcctgc

SEQ ID NO: 122602 - DNA, 270 bp, Homo sapiens
  Payload ID: 4019
  Gene Symbol: CKB
  Gene Name: creatine kinase, brain
  ENST ID: ENST00000555039
  CDS Start-End: 1-270
ctcctgcgccggtgaccttggccgagcagattgaaactctcttcaagtctaaggactatgagttcatgtggaaccctcacctgggctacatcctcacctgcccatccaacctgggcaccgggctgcgggcaggtgtgcatatcaagctgcccaacctgggcaagcatgagaagttctcggaggtgcttaagcggctgcgacttcagaagcgaggcacaggcggtgtggacacggctgcggtgggcggggtcttcgacgtctccaacgctg

SEQ ID NO: 122603 - DNA, 856 bp, Homo sapiens
  Payload ID: 4019
  Gene Symbol: CKB
  Gene Name: creatine kinase, brain
  ENST ID: ENST00000553878
  CDS Start-End: 204-856
gcctggagcgcgcgccggaccggccgggggtccccggcgatgatggcgctccccgcgcgcgctgcggaccccgctgaccttggccgcgtcccggggggcgccggggggcccggcggcgggggcctgagtggtacgcgggagcccgggaaccccggcgtgccggtcccctctgaccccgcgtctccccgcagcccgccgccgccatgcccttctccaacagccacaacgcactgaagctgcgcttcccggccgaggacgagttccccgacctgagcgcccacaacaaccacatggccaaggtgctgacccccgagctgtacgcggagctgcgcgccaagagcacgccgagcggcttcacgctggacgacgtcatccagacaggcgtggacaacccgggccacccgtacatcatgaccgtgggctgcgtggcgggcgacgaggagtcctacgaagtgttcaaggatctcttcgaccccatcatcgaggaccggcacggcggctacaagcccagcgatgagcacaagaccgacctcaaccccgacaacctgcagggcggcgacgacctggaccccaactacgtgctgagctcgcgggtgcgcacgggccgcagcatccgtggcttctgcctccccccgcactgcagccgcggggagcgccgcgccatcgagaagctcgcggtggaagccctgtccagcctggacggcgacctggcgggccgatactacgcgctcaagagcatgacggaggcggagcagcagcagctcatcgacgaccacttcctcttcgacaagcccgtgtcgcccctgctgctggcctcgggcatggcccgcgactggcccgacgcccgcggtatctg

SEQ ID NO: 122604 - DNA, 938 bp, Homo sapiens
  Payload ID: 4020
  Gene Symbol: CKMT1A
  Gene Name: creatine kinase, mitochondrial 1A
  ENST ID: ENST00000457648
  CDS Start-End: 239-448
ggcatcctgtgagcagcaaacacatctgagcctggaaaagacgcagagaagtaaaagatcaaagtctgattggcaccggctcccattccggctccagcctccaatccgacccccatttcggctgcagcctcggacctagctccggccctcggtctatccggttgcatcctccctccctgttccggatcttatcttgcgccagcgcctactccaggatcccgtagccagacctcaagccatggctggtcccttctcccgtctgctgtccgcccgcccgggactcaggctcctggctttggccggagcggggtctctagccgctgggtttctgctccgaccggaacctgtacgagctgccagtgaacgacggaggctgtatcccccgaggcttttcccctcctccatccgtagtgttgtgtcatgggaggaaagaactgagcagatctgaagaaactgagctggccagccagaggcaactagaactattaggaaagcatagactctgaaagtccctaaagagattaccaaggtttaccctctttctaattccccctcctcccgcggagcaaagccagacatggccaactggacagctcccaggtaactgcactaggtctaggcgtctgtgccctccctccatggttactgggtaccccctccccagcgctgagtacccagacctccgaaagcacaacaactgcatggccagtcacctgaccccagcagtctatgcacggctctgcgacaagaccacacccactggttggacgctagatcagtgtatccagactggcgtggacaaccctggccaccccttcatcaagactgtgggcatggtggctggagatgaggagacctatgaggtatttgctgacctgtttgaccctgtgatccaagagcgacacaatggatatgacccccggacaatgaagcacacc

SEQ ID NO: 122605 - DNA, 759 bp, Homo sapiens
  Payload ID: 4020
  Gene Symbol: CKMT1A
  Gene Name: creatine kinase, mitochondrial 1A
  ENST ID: ENST00000411750
  CDS Start-End: 316-759
accttctcctccagcacaggaactaggaactacggagagagaagccaagggagaggaggaggaggaaactaacgattccctgcccacccccacacccagcaccaccaacaggtgggcaagcttgccgagaaaacgcagagggcatcctgtgagcagcaaacacatctgagcctggaaaagacgcagagaagtaaaagatcaaagcctcggacctagctccggccctcggtctatccggttgcatcctccctccctgttccggatcttatcttgcgccagcgcctactccaggatcccgtagccagacctcaagccatggctggtcccttctcccgtctgctgtccgcccgcccgggactcaggctcctggctttggccggagcggggtctctagccgctgggtttctgctccgaccggaacctgtacgagctgccagtgaacgacggaggctgtatcccccgagcgctgagtacccagacctccgaaagcacaacaactgcatggccagtcacctgaccccagcagtctatgcacggctctgcgacaagaccacacccactggttggacgctagatcagtgtatccagactggcgtggacaaccctggccaccccttcatcaagactgtgggcatggtggctggagatgaggagacctatgaggtatttgctgacctgtttgaccctgtgatccaagagcgacacaatggatatgacccccggacaatgaagcacaccacggatctagatgccagtaaa

SEQ ID NO: 122606 - DNA, 845 bp, Homo sapiens
  Payload ID: 4020
  Gene Symbol: CKMT1A
  Gene Name: creatine kinase, mitochondrial 1A
  ENST ID: ENST00000415044
  CDS Start-End: 181-845
ctgcagtctgattggcaccggctcccattccggctccagcctccaatccgacccccatttcggctgcagcctcggacctagctccggccctcggtctatccggttgcatcctccctccctgttccggatcttatcttgcgccagcgcctactccaggatcccgtagccagacctcaagccatggctggtcccttctcccgtctgctgtccgcccgcccgggactcaggctcctggctttggccggagcggggtctctagccgctgggtttctgctccgaccggaacctgtacgagctgccagtgaacgacggaggctgtatcccccgagccagacatggccaactggacagctcccaggtaactgcactaggtctaggcgtctgtgccctccctccatggttactgggtaccccctccccagcgctgagtacccagacctccgaaagcacaacaactgcatggccagtcacctgaccccagcagtctatgcacggctctgcgacaagaccacacccactggttggacgctagatcagtgtatccagactggcgtggacaaccctggccaccccttcatcaagactgtgggcatggtggctggagatgaggagacctatgaggtatttgctgacctgtttgaccctgtgatccaagagcgacacaatggatatgacccccggacaatgaagcacaccacggatctagatgccagtaaaatccgttctggctactttgatgagaggtatgtattgtcctctagagtcagaactggccgaagcatccgaggactcagtctgcctccagcttgcactcgagcagagcgacgagaggtggaacgtgttgt

SEQ ID NO: 122607 - DNA, 1911 bp, Homo sapiens
  Payload ID: 4020
  Gene Symbol: CKMT1A
  Gene Name: creatine kinase, mitochondrial 1A
  Uniprot ID: P12532
  ENST ID: ENST00000413453
  CDS Start-End: 525-1778
ccttgcacacccacagggtagacggatcgagtttcagcttaaaccgaggggtgtgggggaagggtgttgggttcagctagtccacgtgggtgctgtcctccacttggtgctgaaatctgggcggccacatccccggggcgggagggggctacatccccggctttagacgcgcgagtctcaggtcccgctaattacctggcgggtgctgcccacccctgccctcgcgcacctagcgcggtggcaggcgggaaggcggggcctgggggagccccacccctggagactgcggctggggcctccctctcctccgcccgcccgcctgccactagctcattgcgcctctcctgcagtctgattggcaccggctcccattccggctccagcctccaatccgacccccatttcggctgcagcctcggacctagctccggccctcggtctatccggttgcatcctccctccctgttccggatcttatcttgcgccagcgcctactccaggatcccgtagccagacctcaagccatggctggtcccttctcccgtctgctgtccgcccgcccgggactcaggctcctggctttggccggagcggggtctctagccgctgggtttctgctccgaccggaacctgtacgagctgccagtgaacgacggaggctgtatcccccgagcgctgagtacccagacctccgaaagcacaacaactgcatggccagtcacctgaccccagcagtctatgcacggctctgcgacaagaccacacccactggttggacgctagatcagtgtatccagactggcgtggacaaccctggccaccccttcatcaagactgtgggcatggtggctggagatgaggagacctatgaggtatttgctgacctgtttgaccctgtgatccaagagcgacacaatggatatgacccccggacaatgaagcacaccacggatctagatgccagtaaaatccgttctggctactttgatgagaggtatgtattgtcctctagagtcagaactggccgaagcatccgaggactcagtctgcctccagcttgcactcgagcagagcgacgagaggtggaacgtgttgtggtggatgcactgagtggcctgaagggtgacctggctggacgttactataggctcagtgagatgacagaggctgaacagcagcagcttattgatgaccactttctgtttgataagcctgtgtccccgttgctgactgcagcaggaatggctcgagactggccagatgctcgtggaatttggcacaacaatgagaagagcttcctgatctgggtgaatgaggaggatcatacacgggtgatctccatggagaagggtggtaacatgaagagagtgtttgaaagattctgccgaggcctcaaagaggtggagagacttatccaagaacgtggctgggagttcatgtggaatgagcgtttgggatacatcttgacctgtccatctaacctgggcactggacttcgggcaggagtgcacatcaaactgcccctgctaagcaaagatagccgcttcccaaagatcctggagaacctaagactccaaaagcgtggtactggaggagtggacactgctgccacaggcggtgtctttgatatttctaatttggaccgactaggcaaatcagaggtggagctggtgcaactggtcatcgatggagtaaactatttgattgattgtgaacggcgtctggagagaggccaggatatccgcatccccacacctgtcatccacaccaagcattaactccccatcgccagctgatgactcaagattccaaggagttctgctcattctaatgatggcccattctacttgctctggacctgccctcgcatcccctgcctccatcctagtaaagactccttgctatgctgca

SEQ ID NO: 122608 - DNA, 1779 bp, Homo sapiens
  Payload ID: 4020
  Gene Symbol: CKMT1A
  Gene Name: creatine kinase, mitochondrial 1A
  Uniprot ID: P12532
  ENST ID: ENST00000434505
  CDS Start-End: 393-1646
cttcacctcactttaccttctcctccagcacaggaactaggaactacggagagagaagccaagggagaggaggaggaggaaactaacgattccctgcccacccccacacccagcaccaccaacaggtgggcaagcttgccgagaaaacgcagagggcatcctgtgagcagcaaacacatctgagcctggaaaagacgcagagaagtaaaagatcaaagtctgattggcaccggctcccattccggctccagcctccaatccgacccccatttcggctgcagcctcggacctagctccggccctcggtctatccggttgcatcctccctccctgttccggatcttatcttgcgccagcgcctactccaggatcccgtagccagacctcaagccatggctggtcccttctcccgtctgctgtccgcccgcccgggactcaggctcctggctttggccggagcggggtctctagccgctgggtttctgctccgaccggaacctgtacgagctgccagtgaacgacggaggctgtatcccccgagcgctgagtacccagacctccgaaagcacaacaactgcatggccagtcacctgaccccagcagtctatgcacggctctgcgacaagaccacacccactggttggacgctagatcagtgtatccagactggcgtggacaaccctggccaccccttcatcaagactgtgggcatggtggctggagatgaggagacctatgaggtatttgctgacctgtttgaccctgtgatccaagagcgacacaatggatatgacccccggacaatgaagcacaccacggatctagatgccagtaaaatccgttctggctactttgatgagaggtatgtattgtcctctagagtcagaactggccgaagcatccgaggactcagtctgcctccagcttgcactcgagcagagcgacgagaggtggaacgtgttgtggtggatgcactgagtggcctgaagggtgacctggctggacgttactataggctcagtgagatgacagaggctgaacagcagcagcttattgatgaccactttctgtttgataagcctgtgtccccgttgctgactgcagcaggaatggctcgagactggccagatgctcgtggaatttggcacaacaatgagaagagcttcctgatctgggtgaatgaggaggatcatacacgggtgatctccatggagaagggtggtaacatgaagagagtgtttgaaagattctgccgaggcctcaaagaggtggagagacttatccaagaacgtggctgggagttcatgtggaatgagcgtttgggatacatcttgacctgtccatctaacctgggcactggacttcgggcaggagtgcacatcaaactgcccctgctaagcaaagatagccgcttcccaaagatcctggagaacctaagactccaaaagcgtggtactggaggagtggacactgctgccacaggcggtgtctttgatatttctaatttggaccgactaggcaaatcagaggtggagctggtgcaactggtcatcgatggagtaaactatttgattgattgtgaacggcgtctggagagaggccaggatatccgcatccccacacctgtcatccacaccaagcattaactccccatcgccagctgatgactcaagattccaaggagttctgctcattctaatgatggcccattctacttgctctggacctgccctcgcatcccctgcctccatcctagtaaagactccttgctatgctgca

SEQ ID NO: 122609 - DNA, 1073 bp, Homo sapiens
  Payload ID: 4020
  Gene Symbol: CKMT1A
  Gene Name: creatine kinase, mitochondrial 1A
  ENST ID: ENST00000626814
  CDS Start-End: 177-1073
agtctgattggcaccggctcccattccggctccagcctccaatccgacccccatttcggctgcagcctcggacctagctccggccctcggtctatccggttgcatcctccctccctgttccggatcttatcttgcgccagcgcctactccaggatcccgtagccagacctcaagccatggctggtcccttctcccgtctgctgtccgcccgcccgggactcaggctcctggctttggccggagcggggtctctagccgctgggtttctgctccgaccggaacctgtacgagctgccagtgaacgacggaggctgtatcccccgagcgctgagtacccagacctccgaaagcacaacaactgcatggccagtcacctgaccccagcagtctatgcacggctctgcgacaagaccacacccactggttggacgctagatcagtgtatccagactggcgtggacaaccctggccaccccttcatcaagactgtgggcatggtggctggagatgaggagacctatgaggtatttgctgacctgtttgaccctgtgatccaagagcgacacaatggatatgacccccggacaatgaagcacaccacggatctagatgccagtaaaatccgttctggctactttgatgagaggtatgtattgtcctctagagtcagaactggccgaagcatccgaggactcagtctgcctccagcttgcactcgagcagagcgacgagaggtggaacgtgttgtggtggatgcactgagtggcctgaagggtgacctggctggacgttactataggctcagtgagatgacagaggctgaacagcagcagcttattgatgaccactttctgtttgataagcctgtgtccccgttgctgactgcagcaggaatggctcgagactggccagatgctcgtggaatttggcacaacaatgagaagagcttcctgatctgggtgaatgaggaggatcatacacgggtgatctccatggagaagggtggtaacatgaagagagtgtttgaaagattctgccgaggcctcaaagaggttgttgtggggattaagtga

SEQ ID NO: 122610 - DNA, 1779 bp, Homo sapiens
  Payload ID: 4021
  Gene Symbol: CKMT1B
  Gene Name: creatine kinase, mitochondrial 1B
  Uniprot ID: P12532
  ENST ID: ENST00000300283
  CDS Start-End: 393-1646
cttcacctcactttaccttctcctccagcacaggaactaggaactacggagagagaagccaagggagaggaggaggaggaaactaacgattccctgcccacccccacacccagcaccaccaacaggtgggcaagcttgccgagaaaacgcagagggcatcctgtgagcagcaaacacatctgagcctggaaaagacgcagagaagtaaaagatcaaagtctgattggcaccggctcccattccggctccagcctccaatccgacccccatttcggctgcagcctcggacctagctccggccctcggtctatccggttgcatcctccctccctgttccggatcttatcttgcgccagcgcctactccaggatcccgtagccagacctcaagccatggctggtcccttctcccgtctgctgtccgcccgcccgggactcaggctcctggctttggccggagcggggtctctagccgctgggtttctgctccgaccggaacctgtacgagctgccagtgaacgacggaggctgtatcccccgagcgctgagtacccagacctccgaaagcacaacaactgcatggccagtcacctgaccccagcagtctatgcacggctctgcgacaagaccacacccactggttggacgctagatcagtgtatccagactggcgtggacaaccctggccaccccttcatcaagactgtgggcatggtggctggagatgaggagacctatgaggtatttgctgacctgtttgaccctgtgatccaagagcgacacaatggatatgacccccggacaatgaagcacaccacggatctagatgccagtaaaatccgttctggctactttgatgagaggtatgtattgtcctctagagtcagaactggccgaagcatccgaggactcagtctgcctccagcttgcactcgagcagagcgacgagaggtggaacgtgttgtggtggatgcactgagtggcctgaagggtgacctggctggacgttactataggctcagtgagatgacagaggctgaacagcagcagcttattgatgaccactttctgtttgataagcctgtgtccccgttgctgactgcagcaggaatggctcgagactggccagatgctcgtggaatttggcacaacaatgagaagagcttcctgatctgggtgaatgaggaggatcatacacgggtgatctccatggagaagggtggtaacatgaagagagtgtttgaaagattctgccgaggcctcaaagaggtggagagacttatccaagaacgtggctgggagttcatgtggaatgagcgtttgggatacatcttgacctgtccatctaacctgggcactggacttcgggcaggagtgcacatcaaactgcccctgctaagcaaagatagccgcttcccaaagatcctggagaacctaagactccaaaaacgtggtactggaggagtggacactgctgctacaggcggtgtctttgatatttctaatttggaccgactaggcaaatcagaggtggagctggtgcaactggtcatcgatggagtaaactatttgattgattgtgaacggcgtctggagagaggccaggatatccgcatccccacacctgtcatccacaccaagcattaactccccatcgccagctgatgactcaagattcccaggagttctgctcattctaatgatggcccattctacttgctctggacctgcccccgcatcccctgcctccatcctagtaaagactccttgctatgctgca

SEQ ID NO: 122611 - DNA, 632 bp, Homo sapiens
  Payload ID: 4021
  Gene Symbol: CKMT1B
  Gene Name: creatine kinase, mitochondrial 1B
  ENST ID: ENST00000437924
  CDS Start-End: 246-632
actttaccttctcctccagcacaggaactaggaactacggagagagaagccaagggagaggaggaggaggaaactaacgattccctgcccacccccacacccagcaccaccaacaggtgggcaagcttgccgagaaaacgcagagggcatcctgtgagcagcaaacacatctgagcctggaaaagacgcagagaagtaaaagatcaaagcgcctactccaggatcccgtagccagacctcaagccatggctggtcccttctcccgtctgctgtccgcccgcccgggactcaggctcctggctttggccggagcggggtctctagccgctgggtttctgctccgaccggaacctgtacgagctgccagtgaacgacggaggctgtatcccccgagcgctgagtacccagacctccgaaagcacaacaactgcatggccagtcacctgaccccagcagtctatgcacggctctgcgacaagaccacacccactggttggacgctagatcagtgtatccagactggcgtggacaaccctggccaccccttcatcaagactgtgggcatggtggctggagatgaggagacctatgaggtatttgctgacctgtttgaccctgtgatccaagagcga

SEQ ID NO: 122612 - DNA, 593 bp, Homo sapiens
  Payload ID: 4021
  Gene Symbol: CKMT1B
  Gene Name: creatine kinase, mitochondrial 1B
  ENST ID: ENST00000417289
  CDS Start-End: 284-593
gtttattccgcggtttccccgcggctgcccccgggagaccgaagaggtggctggggcaggccgaaagcagaggaaaggttgggcagtgtcacccttgcacacccacaggtctgattggcaccggctcccattccggctccagcctccaatccgacccccatttcggctgcagcctcggacctagctccggccctcggtctatccggttgcatcctccctccctgttccggatcttatcttgcgccagcgcctactccaggatcccgtagccagacctcaagccatggctggtcccttctcccgtctgctgtccgcccgcccgggactcaggctcctggctttggccggagcggggtctctagccgctgggtttctgctccgaccggaacctgtacgagctgccagtgaacgacggaggctgtatcccccgagcgctgagtacccagacctccgaaagcacaacaactgcatggccagtcacctgaccccagcagtctatgcacggctctgcgacaagaccacacccactggttggacgctagatcagtgtatccagactggcgtggacaaccctggccaccccttcatcaaga

SEQ ID NO: 122613 - DNA, 545 bp, Homo sapiens
  Payload ID: 4021
  Gene Symbol: CKMT1B
  Gene Name: creatine kinase, mitochondrial 1B
  ENST ID: ENST00000428981
  CDS Start-End: 192-368
ttgcgcctctcctgcagtctgattggcaccggctcccattccggctccagcctccaatccgacccccatttcggctgcagcctcggacctagctccggccctcggtctatccggttgcatcctccctccctgttccggatcttatcttgcgccagcgcctactccaggatcccgtagccagacctcaagccatggctggtcccttctcccgtctgctgtccgcccgcccgggactcaggctcctggctttggccggagcggggtctctagccgctgggtttctgctccgaccggaacctgtacgagctgccagtgaacgacggaggctgtatcccccgaggtatttgctgacctgtttgaccctgtgatccaagagcgacacaatggatatgacccccggacaatgaagcacaccacggatctagatgccagtaaaagtcagaactggccgaagcatccgaggactcagtctgcctccagcttgcactcgagcagagcgacgagaggtggaacgtgttgtggtggatgcactgagtggcctgaag

SEQ ID NO: 122614 - DNA, 801 bp, Homo sapiens
  Payload ID: 4021
  Gene Symbol: CKMT1B
  Gene Name: creatine kinase, mitochondrial 1B
  ENST ID: ENST00000453733
  CDS Start-End: 193-801
attgcgcctctcctgcagtctgattggcaccggctcccattccggctccagcctccaatccgacccccatttcggctgcagcctcggacctagctccggccctcggtctatccggttgcatcctccctccctgttccggatcttatcttgcgccagcgcctactccaggatcccgtagccagacctcaagccatggctggtcccttctcccgtctgctgtccgcccgcccgggactcaggctcctggctttggccggagcggggtctctagccgctgggtttctgctccgaccggaacctgtacgagctgccagtgaacgacggaggctgtatcccccgagccagacatggccaactggacagctcccaggtaactgcactaggtctaggcgtctgtgccctccctccatggttactgggtaccccctccccagcgctgagtacccagacctccgaaagcacaacaactgcatggccagtcacctgaccccagcagtctatgcacggctctgcgacaagaccacacccactggttggacgctagatcagtgtatccagactggcgtggacaaccctggccaccccttcatcaagactgtgggcatggtggctggagatgaggagacctatgaggtatttgctgacctgtttgaccctgtgatccaagagcgacacaatggatatgacccccggacaatgaagcacaccacggatctagatgccagtaaaatccgttctggctactttgatgagaggtatgtattgtcctctagagtcagaactggccgaagcatccgagga

SEQ ID NO: 122615 - DNA, 1747 bp, Homo sapiens
  Payload ID: 4021
  Gene Symbol: CKMT1B
  Gene Name: creatine kinase, mitochondrial 1B
  Uniprot ID: P12532
  ENST ID: ENST00000441322
  CDS Start-End: 361-1614
agacgcgcgagtctcaggtcccgctaattacctggcgggtgctgcccacccctgccctcgcgcacctagcgcggtggcaggcgggaaggcggggcctgggggagccccacccctggagactgcggctggggcctccctctcctccgcccgcccgcctgccactagctcattgcgcctctcctgcagtctgattggcaccggctcccattccggctccagcctccaatccgacccccatttcggctgcagcctcggacctagctccggccctcggtctatccggttgcatcctccctccctgttccggatcttatcttgcgccagcgcctactccaggatcccgtagccagacctcaagccatggctggtcccttctcccgtctgctgtccgcccgcccgggactcaggctcctggctttggccggagcggggtctctagccgctgggtttctgctccgaccggaacctgtacgagctgccagtgaacgacggaggctgtatcccccgagcgctgagtacccagacctccgaaagcacaacaactgcatggccagtcacctgaccccagcagtctatgcacggctctgcgacaagaccacacccactggttggacgctagatcagtgtatccagactggcgtggacaaccctggccaccccttcatcaagactgtgggcatggtggctggagatgaggagacctatgaggtatttgctgacctgtttgaccctgtgatccaagagcgacacaatggatatgacccccggacaatgaagcacaccacggatctagatgccagtaaaatccgttctggctactttgatgagaggtatgtattgtcctctagagtcagaactggccgaagcatccgaggactcagtctgcctccagcttgcactcgagcagagcgacgagaggtggaacgtgttgtggtggatgcactgagtggcctgaagggtgacctggctggacgttactataggctcagtgagatgacagaggctgaacagcagcagcttattgatgaccactttctgtttgataagcctgtgtccccgttgctgactgcagcaggaatggctcgagactggccagatgctcgtggaatttggcacaacaatgagaagagcttcctgatctgggtgaatgaggaggatcatacacgggtgatctccatggagaagggtggtaacatgaagagagtgtttgaaagattctgccgaggcctcaaagaggtggagagacttatccaagaacgtggctgggagttcatgtggaatgagcgtttgggatacatcttgacctgtccatctaacctgggcactggacttcgggcaggagtgcacatcaaactgcccctgctaagcaaagatagccgcttcccaaagatcctggagaacctaagactccaaaaacgtggtactggaggagtggacactgctgctacaggcggtgtctttgatatttctaatttggaccgactaggcaaatcagaggtggagctggtgcaactggtcatcgatggagtaaactatttgattgattgtgaacggcgtctggagagaggccaggatatccgcatccccacacctgtcatccacaccaagcattaactccccatcgccagctgatgactcaagattcccaggagttctgctcattctaatgatggcccattctacttgctctggacctgcccccgcatcccctgcctccatcctagtaaagactccttgctatgctgca

SEQ ID NO: 122616 - DNA, 1116 bp, Homo sapiens
  Payload ID: 4021
  Gene Symbol: CKMT1B
  Gene Name: creatine kinase, mitochondrial 1B
  ENST ID: ENST00000453782
  CDS Start-End: 393-1116
cttcacctcactttaccttctcctccagcacaggaactaggaactacggagagagaagccaagggagaggaggaggaggaaactaacgattccctgcccacccccacacccagcaccaccaacaggtgggcaagcttgccgagaaaacgcagagggcatcctgtgagcagcaaacacatctgagcctggaaaagacgcagagaagtaaaagatcaaagtctgattggcaccggctcccattccggctccagcctccaatccgacccccatttcggctgcagcctcggacctagctccggccctcggtctatccggttgcatcctccctccctgttccggatcttatcttgcgccagcgcctactccaggatcccgtagccagacctcaagccatggctggtcccttctcccgtctgctgtccgcccgcccgggactcaggctcctggctttggccggagcggggtctctagccgctgggtttctgctccgaccggaacctgtacgagctgccagtgaacgacggaggctgtatcccccgagcgctgagtacccagacctccgaaagcacaacaactgcatggccagtcacctgaccccagcagtctatgcacggctctgcgacaagaccacacccactggttggacgctagatcagtgtatccagactggcgtggacaaccctggccaccccttcatcaagactgtgggcatggtggctggagatgaggagacctatgaggtatttgctgacctgtttgaccctgtgatccaagagcgacacaatggatatgacccccggacaatgaagcacaccacggatctagatgccagtaaaatccgttctggctactttgatgagaggtatgtattgtcctctagagtcagaactggccgaagcatccgaggactcagtctgcctccagcttgcactcgagcagagcgacgagaggtggaacgtgttgtggtggatgcactgagtggcctgaagggtgacctggctggacgttactataggctcagtgagatgacagaggctgaacagcagcagcttattgatgaccactttctgtttgataagcctgtgtccccgttgctgactgcagcaggaatggctc

SEQ ID NO: 122617 - DNA, 542 bp, Homo sapiens
  Payload ID: 4021
  Gene Symbol: CKMT1B
  Gene Name: creatine kinase, mitochondrial 1B
  ENST ID: ENST00000449946
  CDS Start-End: 254-542
gtgtttattccgcggtttccccgcggctgcccccgggagaccgaagaggtggctggggcaggccgaaagcagaggaaagtctgattggcaccggctcccattccggctccagcctccaatccgacccccatttcggctgcagcctcggacctagctccggccctcggtctatccggttgcatcctccctccctgttccggatcttatcttgcgccagcgcctactccaggatcccgtagccagacctcaagccatggctggtcccttctcccgtctgctgtccgcccgcccgggactcaggctcctggctttggccggagcggggtctctagccgctgggtttctgctccgaccggaacctgtacgagctgccagtgaacgacggaggctgtatcccccgagccagacatggccaactggacagctcccaggtaactgcactaggtctaggcgtctgtgccctccctccatggttactgggtaccccctccccagcgctgagtacccagacctccgaaagcacaacaactgcatggccagtc

SEQ ID NO: 122618 - DNA, 2396 bp, Homo sapiens
  Payload ID: 4021
  Gene Symbol: CKMT1B
  Gene Name: creatine kinase, mitochondrial 1B
  ENST ID: ENST00000437534
  CDS Start-End: 193-1089
attgcgcctctcctgcagtctgattggcaccggctcccattccggctccagcctccaatccgacccccatttcggctgcagcctcggacctagctccggccctcggtctatccggttgcatcctccctccctgttccggatcttatcttgcgccagcgcctactccaggatcccgtagccagacctcaagccatggctggtcccttctcccgtctgctgtccgcccgcccgggactcaggctcctggctttggccggagcggggtctctagccgctgggtttctgctccgaccggaacctgtacgagctgccagtgaacgacggaggctgtatcccccgagcgctgagtacccagacctccgaaagcacaacaactgcatggccagtcacctgaccccagcagtctatgcacggctctgcgacaagaccacacccactggttggacgctagatcagtgtatccagactggcgtggacaaccctggccaccccttcatcaagactgtgggcatggtggctggagatgaggagacctatgaggtatttgctgacctgtttgaccctgtgatccaagagcgacacaatggatatgacccccggacaatgaagcacaccacggatctagatgccagtaaaatccgttctggctactttgatgagaggtatgtattgtcctctagagtcagaactggccgaagcatccgaggactcagtctgcctccagcttgcactcgagcagagcgacgagaggtggaacgtgttgtggtggatgcactgagtggcctgaagggtgacctggctggacgttactataggctcagtgagatgacagaggctgaacagcagcagcttattgatgaccactttctgtttgataagcctgtgtccccgttgctgactgcagcaggaatggctcgagactggccagatgctcgtggaatttggcacaacaatgagaagagcttcctgatctgggtgaatgaggaggatcatacacgggtgatctccatggagaagggtggtaacatgaagagagtgtttgaaagattctgccgaggcctcaaagaggttgttgtggggattaagtgaaatacaggtaaagtacttggtccacagtaagtgcttaataagtgttaaagtgttagctgcaatattattctggatggaagagtttccccccatgttcagcatgtaagatatcccctatggcatggttccttctgaactataaagaggatccctttactcatgttgggttgtggtctttgtgaccatcattctgctagatcccttgtctcttgaactctaatagtcatcttcatgactacatggttaagtgaagccaaacgccttccccccgccccctattcctatgaatctggcttttctgctctgttttcatctttctctgcattcacacaggtgctccgttcacagctaacagaatgttatcttacctcttcctggcaaagcttacaccttcatcttctgtctgaagggacccttctaagctctaggctcattagcaaagcaaagataatcgatgcatgcagacctcattgaataatcagtcatctctcagttcagtttaccacctctgttcatttccctagatcatccttaatacaccactccttcgagttttcttcttccacataagatattttttcacaatctcattattatgcacatcataattttgcatcatgcatgcatgaaaacaataacaaacctttttcatttaaaaaaagaccaatgtcattcattcacagccaagtttctgttctagacatatttctagtgttcttgtgggtctagctaagggagggtccagggttaatgaaatatccctgatttttcgttaacaaaacctttgtggactcaggtggagagacttatccaagaacgtggctgggagttcatgtggaatgagcgtttgggatacatcttgacctgtccatctaacctgggcactggacttcgggcaggagtgcacatcaaactgcccctgctaagcaaagatagccgcttcccaaagatcctggagaacctaagactccaaaaacgtggtactggaggagtggacactgctgctacaggcggtgtctttgatatttctaatttggaccgactaggcaaatcagaggtggagctggtgcaactggtcatcgatggagtaaactatttgattgattgtgaacggcgtctggagagaggccaggatatccgcatccccacacctgtcatccacaccaagcattaactccccatcgccagctgatgactcaagattcccaggagttctgctcattctaatgatggcccattctacttgctctggacctgcccccgcatcccctgcctccatcctagtaaagactccttgctatgctgca

SEQ ID NO: 122619 - DNA, 1074 bp, Homo sapiens
  Payload ID: 4021
  Gene Symbol: CKMT1B
  Gene Name: creatine kinase, mitochondrial 1B
  ENST ID: ENST00000627381
  CDS Start-End: 178-1074
cagtctgattggcaccggctcccattccggctccagcctccaatccgacccccatttcggctgcagcctcggacctagctccggccctcggtctatccggttgcatcctccctccctgttccggatcttatcttgcgccagcgcctactccaggatcccgtagccagacctcaagccatggctggtcccttctcccgtctgctgtccgcccgcccgggactcaggctcctggctttggccggagcggggtctctagccgctgggtttctgctccgaccggaacctgtacgagctgccagtgaacgacggaggctgtatcccccgagcgctgagtacccagacctccgaaagcacaacaactgcatggccagtcacctgaccccagcagtctatgcacggctctgcgacaagaccacacccactggttggacgctagatcagtgtatccagactggcgtggacaaccctggccaccccttcatcaagactgtgggcatggtggctggagatgaggagacctatgaggtatttgctgacctgtttgaccctgtgatccaagagcgacacaatggatatgacccccggacaatgaagcacaccacggatctagatgccagtaaaatccgttctggctactttgatgagaggtatgtattgtcctctagagtcagaactggccgaagcatccgaggactcagtctgcctccagcttgcactcgagcagagcgacgagaggtggaacgtgttgtggtggatgcactgagtggcctgaagggtgacctggctggacgttactataggctcagtgagatgacagaggctgaacagcagcagcttattgatgaccactttctgtttgataagcctgtgtccccgttgctgactgcagcaggaatggctcgagactggccagatgctcgtggaatttggcacaacaatgagaagagcttcctgatctgggtgaatgaggaggatcatacacgggtgatctccatggagaagggtggtaacatgaagagagtgtttgaaagattctgccgaggcctcaaagaggttgttgtggggattaagtga

SEQ ID NO: 122620 - DNA, 1512 bp, Homo sapiens
  Payload ID: 4022
  Gene Symbol: CKMT2
  Gene Name: creatine kinase, mitochondrial 2 (sarcomeric)
  Uniprot ID: P17540
  ENST ID: ENST00000254035
  CDS Start-End: 114-1373
agggaggatttccaggccggcccgaccagctcgccctgcatacacttcttggctgtgtgcgctcagcaggacgtgggaggctccggcttcaagacactcatccaagaggaaggatggccagtatcttttctaagttgctaactggccgcaatgcttctctgctgtttgctaccatgggcaccagtgtcctgaccaccgggtacctgctgaaccggcagaaagtgtgtgccgaggtccgggagcagcctaggctatttcctccaagcgcagactacccagacctgcgcaagcacaacaactgcatggccgagtgcctcacccccgccatttatgccaagcttcgcaacaaggtgacacccaacggctacacgctggaccagtgcatccagactggagtggacaaccctggccaccccttcataaagactgtgggcatggtggctggtgacgaggagtcctatgaggtgtttgctgacctttttgaccccgtcatcaaactaagacacaacggctatgaccccagggtgatgaagcacacaacggatctggatgcatcaaagatcacccaagggcagttcgacgagcattacgtgctgtcttctcgggtgcgcactggccgcagcatccgtgggctgagcctgcctccagcctgcacccgggccgagcgaagggaggtagagaacgtggccatcactgccctggagggcctcaagggggacctggctggccgctactacaagctgtccgagatgacggagcaggaccagcagcggctcatcgatgaccactttctgtttgataagccagtgtcccctttattaacatgtgctgggatggcccgtgactggccagatgccaggggaatctggcataattatgataagacatttctcatctggataaatgaggaggatcacaccagggtaatctcaatggaaaaaggaggcaatatgaaacgagtatttgagcgattctgtcgtggactaaaagaagtagaacggttaatccaagaacgaggctgggagttcatgtggaatgagcgcctaggatacattttgacctgtccttcgaaccttggaacaggactacgagctggtgtccacgttaggatcccaaagctcagcaaggacccacgcttttctaagatcctggaaaacctaagactccagaagcgtggcacaggtggtgtggacactgccgcggtcgcagatgtgtacgacatttccaacatagatagaattggtcgatcagaggttgagcttgttcagatagtcatcgatggagtcaattacctggtggattgtgaaaagaagttggagagaggccaagatattaaggtgccaccccctctgcctcagtttggcaaaaagtaaactttccctttcccaatttataaataatctgtctgctggtacgacagacataaatctctactctgagagtttttatacacttggaaaaatataaaattgtagatcctgcctatctttacaataaaactctccttaatat

SEQ ID NO: 122621 - DNA, 1637 bp, Homo sapiens
  Payload ID: 4022
  Gene Symbol: CKMT2
  Gene Name: creatine kinase, mitochondrial 2 (sarcomeric)
  Uniprot ID: P17540
  ENST ID: ENST00000424301
  CDS Start-End: 239-1498
atacacttcttggctgtgtgcgctcagcaggacgtgggaggctccggcttcaagatcaaaggaaatgtttccctttgtcccgtttcacactaaacgggttggggaggaaccaggggagatgtcaaccgtctgccggtgactgggaagttttctgcaagtcctccacagcataggccagcaggccacttttcactaacagaagtcacaagccaagtgagacactcatccaagaggaaggatggccagtatcttttctaagttgctaactggccgcaatgcttctctgctgtttgctaccatgggcaccagtgtcctgaccaccgggtacctgctgaaccggcagaaagtgtgtgccgaggtccgggagcagcctaggctatttcctccaagcgcagactacccagacctgcgcaagcacaacaactgcatggccgagtgcctcacccccgccatttatgccaagcttcgcaacaaggtgacacccaacggctacacgctggaccagtgcatccagactggagtggacaaccctggccaccccttcataaagactgtgggcatggtggctggtgacgaggagtcctatgaggtgtttgctgacctttttgaccccgtcatcaaactaagacacaacggctatgaccccagggtgatgaagcacacaacggatctggatgcatcaaagatcacccaagggcagttcgacgagcattacgtgctgtcttctcgggtgcgcactggccgcagcatccgtgggctgagcctgcctccagcctgcacccgggccgagcgaagggaggtagagaacgtggccatcactgccctggagggcctcaagggggacctggctggccgctactacaagctgtccgagatgacggagcaggaccagcagcggctcatcgatgaccactttctgtttgataagccagtgtcccctttattaacatgtgctgggatggcccgtgactggccagatgccaggggaatctggcataattatgataagacatttctcatctggataaatgaggaggatcacaccagggtaatctcaatggaaaaaggaggcaatatgaaacgagtatttgagcgattctgtcgtggactaaaagaagtagaacggttaatccaagaacgaggctgggagttcatgtggaatgagcgcctaggatacattttgacctgtccttcgaaccttggaacaggactacgagctggtgtccacgttaggatcccaaagctcagcaaggacccacgcttttctaagatcctggaaaacctaagactccagaagcgtggcacaggtggtgtggacactgccgcggtcgcagatgtgtacgacatttccaacatagatagaattggtcgatcagaggttgagcttgttcagatagtcatcgatggagtcaattacctggtggattgtgaaaagaagttggagagaggccaagatattaaggtgccaccccctctgcctcagtttggcaaaaagtaaactttccctttcccaatttataaataatctgtctgctggtacgacagacataaatctctactctgagagtttttatacacttggaaaaatataaaattgtagatcctgcctatctttacaataaaactctccttaatat

SEQ ID NO: 122622 - DNA, 1479 bp, Homo sapiens
  Payload ID: 4022
  Gene Symbol: CKMT2
  Gene Name: creatine kinase, mitochondrial 2 (sarcomeric)
  Uniprot ID: P17540
  ENST ID: ENST00000437669
  CDS Start-End: 83-1342
ctgcatacacttcttggctgtgtgcgctcagcaggacgtgggaggctccggcttcaaggtcgacactcatccaagaggaaggatggccagtatcttttctaagttgctaactggccgcaatgcttctctgctgtttgctaccatgggcaccagtgtcctgaccaccgggtacctgctgaaccggcagaaagtgtgtgccgaggtccgggagcagcctaggctatttcctccaagcgcagactacccagacctgcgcaagcacaacaactgcatggccgagtgcctcacccccgccatttatgccaagcttcgcaacaaggtgacacccaacggctacacgctggaccagtgcatccagactggagtggacaaccctggccaccccttcataaagactgtgggcatggtggctggtgacgaggagtcctatgaggtgtttgctgacctttttgaccccgtcatcaaactaagacacaacggctatgaccccagggtgatgaagcacacaacggatctggatgcatcaaagatcacccaagggcagttcgacgagcattacgtgctgtcttctcgggtgcgcactggccgcagcatccgtgggctgagcctgcctccagcctgcacccgggccgagcgaagggaggtagagaacgtggccatcactgccctggagggcctcaagggggacctggctggccgctactacaagctgtccgagatgacggagcaggaccagcagcggctcatcgatgaccactttctgtttgataagccagtgtcccctttattaacatgtgctgggatggcccgtgactggccagatgccaggggaatctggcataattatgataagacatttctcatctggataaatgaggaggatcacaccagggtaatctcaatggaaaaaggaggcaatatgaaacgagtatttgagcgattctgtcgtggactaaaagaagtagaacggttaatccaagaacgaggctgggagttcatgtggaatgagcgcctaggatacattttgacctgtccttcgaaccttggaacaggactacgagctggtgtccacgttaggatcccaaagctcagcaaggacccacgcttttctaagatcctggaaaacctaagactccagaagcgtggcacaggtggtgtggacactgccgcggtcgcagatgtgtacgacatttccaacatagatagaattggtcgatcagaggttgagcttgttcagatagtcatcgatggagtcaattacctggtggattgtgaaaagaagttggagagaggccaagatattaaggtgccaccccctctgcctcagtttggcaaaaagtaaactttccctttcccaatttataaataatctgtctgctggtacgacagacataaatctctactctgagagtttttatacacttggaaaaatataaaattgtagatcctgcctatctttacaataaaactctccttaat

SEQ ID NO: 122623 - DNA, 594 bp, Homo sapiens
  Payload ID: 4022
  Gene Symbol: CKMT2
  Gene Name: creatine kinase, mitochondrial 2 (sarcomeric)
  ENST ID: ENST00000511719
  CDS Start-End: 83-594
ctgcatacacttcttggctgtgtgcgctcagcaggacgtgggaggctccggcttcaaggtcgacactcatccaagaggaaggatggccagtatcttttctaagttgctaactggccgcaatgcttctctgctgtttgctaccatgggcaccagtgtcctgaccaccgggtacctgctgaaccggcagaaagtgtgtgccgaggtccgggagcagcctaggctatttcctccaagcgcagactacccagacctgcgcaagcacaacaactgcatggccgagtgcctcacccccgccatttatgccaagcttcgcaacaaggtgacacccaacggctacacgctggaccagtgcatccagactggagtggacaaccctggccaccccttcataaagactgtgggcatggtggctggtgacgaggagtcctatgaggtgtttgctgacctttttgaccccgtcatcaaactaagacacaacggctatgaccccagggtgatgaagcacacaacggatctggatgcatcaaagatcacccaagggcagttcgacgagcattacgtgctgtcttctcgggtgcgcactggccgcagcat

SEQ ID NO: 122624 - DNA, 546 bp, Homo sapiens
  Payload ID: 4022
  Gene Symbol: CKMT2
  Gene Name: creatine kinase, mitochondrial 2 (sarcomeric)
  ENST ID: ENST00000505060
  CDS Start-End: 74-546
tacacttcttggctgtgtgcgctcagcaggacgtgggaggctccggcttcaagacactcatccaagaggaaggatggccagtatcttttctaagttgctaactggccgcaatgcttctctgctgtttgctaccatgggcaccagtgtcctgaccaccgggtacctgctgaaccggcagaaagtgtgtgccgaggtccgggagcagcctaggctatttcctccaagcgcagactacccagacctgcgcaagcacaacaactgcatggccgagtgcctcacccccgccatttatgccaagcttcgcaacaaggtgacacccaacggctacacgctggaccagtgcatccagactggagtggacaaccctggccaccccttcataaagactgtgggcatggtggctggtgacgaggagtcctatgaggtgtttgctgacctttttgaccccgtcatcaaactaagacacaacggctatgaccccagggtgatgaagcacacaacggatctggatgcatcaaaggaccactttctgtttgataagccagt

SEQ ID NO: 122625 - DNA, 1657 bp, Homo sapiens
  Payload ID: 4023
  Gene Symbol: CKM
  Gene Name: creatine kinase, muscle
  Uniprot ID: P06732
  ENST ID: ENST00000221476
  CDS Start-End: 176-1321
gctcagctgccctccagaactcctccctggggacaacccctcccagccaatagcacagcctaggtccccctatataaggccacggctgctggcccttcctttgggtcagtgtcacctccaggatacagacagccccccttcagcccagcccagccaggtctcctacaccgccaccatgccattcggtaacacccacaacaagttcaagctgaattacaagcctgaggaggagtaccccgacctcagcaaacataacaaccacatggccaaggtactgacccttgaactctacaagaagctgcgggacaaggagactccatctggcttcactgtagacgatgtcatccagacaggagtggacaacccaggtcaccccttcatcatgaccgtgggctgcgtggctggtgatgaggagtcctacgaagttttcaaggaactctttgaccccatcatctcggatcgccacgggggctacaaacccactgacaagcacaagactgacctcaaccatgaaaacctcaagggtggagacgacctggaccctaactacgtgctcagcagccgcgtccgcactggccgcagcatcaagggctacacgttgcccccacactgctcccgtggcgagcgccgggcggtggagaagctctctgtggaagctctcaacagcctgacgggcgagttcaaagggaagtactaccctctgaagagcatgacggagaaggagcagcagcagctcatcgatgaccacttcctgttcgacaagcccgtgtccccgctgctgctggcctcaggcatggcccgcgactggcccgacgcccgtggcatctggcacaatgacaacaagagcttcctggtgtgggtgaacgaggaggatcacctccgggtcatctccatggagaaggggggcaacatgaaggaggttttccgccgcttctgcgtagggctgcagaagattgaggagatctttaagaaagctggccaccccttcatgtggaaccagcacctgggctacgtgctcacctgcccatccaacctgggcactgggctgcgtggaggcgtgcatgtgaagctggcgcacctgagcaagcaccccaagttcgaggagatcctcacccgcctgcgtctgcagaagaggggtacaggtggcgtggacacagctgccgtgggctcagtatttgacgtgtccaacgctgatcggctgggctcgtccgaagtagaacaggtgcagctggtggtggatggtgtgaagctcatggtggaaatggagaagaagttggagaaaggccagtccattgacgacatgatccccgcccagaagtaggcgcctgcccacctgccaccgactgctggaacccagccagtgggagggcctggcccaccagagtcctgctccctcactcctcgccccgccccctgtcccagagtcccacctgggggctctctccacccttctcagagttccagtttcaaccagagttccaaccaatgggctccatcctctggattctggccaatgaaatatctccctggcagggtcctcttcttttcccagagctccaccccaaccaggagctctagttaatggagagctcccagcacactcggagcttgtgctttgtctccacgcaaagcgataaataaaagcattggtggcctt

SEQ ID NO: 122626 - DNA, 10803 bp, Homo sapiens
  Payload ID: 4024
  Gene Symbol: CREBBP
  Gene Name: CREB binding protein
  Uniprot ID: Q92793
  ENST ID: ENST00000262367
  CDS Start-End: 811-8139
ttcttttttttttaattgaggaatcaacagccgccatcttgtcgcggacccgaccggggcttcgagcgcgatctactcggccccgccggtcccgggccccacaaccgcccgcgcaccccgctccgcccggccggcccgctccgcccggccctcggcgcccgccccggcggccccgctcgcctctcggctcggcctcccggagcccggcggcggcggcggcggcagcggcggcggcggcggcggaacggggggtgggggggccgcggcggcggcggcgaccccgctcggcgcattgtttttcctcacggcggcggcggcggcgggccgcgggccgggagcggagcccggagccccctcgtcgtcgggccgcgagcgaattcattaagtggggcgcggggggggagcgaggcggcggcggcggcggcaccatgttctcggggactgcctgagccgcccggccgggcgccgtcgctgccagccgggcccgggggggcggccgggccgccggggcgcccccaccgcggagtgtcgcgctcgggaggcgggcaggggatgagggggccgcggccggcggcggcggcggcggccgggggcgggcggtgagcgctgcggggcgctgttgctgtggctgagatttggccgccgcctcccccacccggcctgcgccctccctctccctcggcgcccgcccgcccgctcgcggcccgcgctcgctcctctccctcgcagccggcagggcccccgacccccgtccgggccctcgccggcccggccgcccgtgcccggggctgttttcgcgagcaggtgaaaatggctgagaacttgctggacggaccgcccaaccccaaaagagccaaactcagctcgcccggtttctcggcgaatgacagcacagattttggatcattgtttgacttggaaaatgatcttcctgatgagctgatacccaatggaggagaattaggccttttaaacagtgggaaccttgttccagatgctgcttccaaacataaacaactgtcggagcttctacgaggaggcagcggctctagtatcaacccaggaataggaaatgtgagcgccagcagccccgtgcagcagggcctgggtggccaggctcaagggcagccgaacagtgctaacatggccagcctcagtgccatgggcaagagccctctgagccagggagattcttcagcccccagcctgcctaaacaggcagccagcacctctgggcccacccccgctgcctcccaagcactgaatccgcaagcacaaaagcaagtggggctggcgactagcagccctgccacgtcacagactggacctggtatctgcatgaatgctaactttaaccagacccacccaggcctcctcaatagtaactctggccatagcttaattaatcaggcttcacaagggcaggcgcaagtcatgaatggatctcttggggctgctggcagaggaaggggagctggaatgccgtaccctactccagccatgcagggcgcctcgagcagcgtgctggctgagaccctaacgcaggtttccccgcaaatgactggtcacgcgggactgaacaccgcacaggcaggaggcatggccaagatgggaataactgggaacacaagtccatttggacagccctttagtcaagctggagggcagccaatgggagccactggagtgaacccccagttagccagcaaacagagcatggtcaacagtttgcccaccttccctacagatatcaagaatacttcagtcaccaacgtgccaaatatgtctcagatgcaaacatcagtgggaattgtacccacacaagcaattgcaacaggccccactgcagatcctgaaaaacgcaaactgatacagcagcagctggttctactgcttcatgctcataagtgtcagagacgagagcaagcaaacggagaggttcgggcctgctcgctcccgcattgtcgaaccatgaaaaacgttttgaatcacatgacgcattgtcaggctgggaaagcctgccaagttgcccattgtgcatcttcacgacaaatcatctctcattggaagaactgcacacgacatgactgtcctgtttgcctccctttgaaaaatgccagtgacaagcgaaaccaacaaaccatcctggggtctccagctagtggaattcaaaacacaattggttctgttggcacagggcaacagaatgccacttctttaagtaacccaaatcccatagaccccagctccatgcagcgagcctatgctgctctcggactcccctacatgaaccagccccagacgcagctgcagcctcaggttcctggccagcaaccagcacagcctcaaacccaccagcagatgaggactctcaaccccctgggaaataatccaatgaacattccagcaggaggaataacaacagatcagcagcccccaaacttgatttcagaatcagctcttccgacttccctgggggccacaaacccactgatgaacgatggctccaactctggtaacattggaaccctcagcactataccaacagcagctcctccttctagcaccggtgtaaggaaaggctggcacgaacatgtcactcaggacctgcggagccatctagtgcataaactcgtccaagccatcttcccaacacctgatcccgcagctctaaaggatcgccgcatggaaaacctggtagcctatgctaagaaagtggaaggggacatgtacgagtctgccaacagcagggatgaatattatcacttattagcagagaaaatctacaagatacaaaaagaactagaagaaaaacggaggtcgcgtttacataaacaaggcatcttggggaaccagccagccttaccagccccgggggctcagccccctgtgattccacaggcacaacctgtgagacctccaaatggacccctgtccctgccagtgaatcgcatgcaagtttctcaagggatgaattcatttaaccccatgtccttggggaacgtccagttgccacaagcacccatgggacctcgtgcagcctccccaatgaaccactctgtccagatgaacagcatgggctcagtgccagggatggccatttctccttcccgaatgcctcagcctccgaacatgatgggtgcacacaccaacaacatgatggcccaggcgcccgctcagagccagtttctgccacagaaccagttcccgtcatccagcggggcgatgagtgtgggcatggggcagccgccagcccaaacaggcgtgtcacagggacaggtgcctggtgctgctcttcctaaccctctcaacatgctggggcctcaggccagccagctaccttgccctccagtgacacagtcaccactgcacccaacaccgcctcctgcttccacggctgctggcatgccatctctccagcacacgacaccacctgggatgactcctccccagccagcagctcccactcagccatcaactcctgtgtcgtcttccgggcagactcccaccccgactcctggctcagtgcccagtgctacccaaacccagagcacccctacagtccaggcagcagcccaggcccaggtgaccccgcagcctcaaaccccagttcagcccccgtctgtggctacccctcagtcatcgcagcaacagccgacgcctgtgcacgcccagcctcctggcacaccgctttcccaggcagcagccagcattgataacagagtccctaccccctcctcggtggccagcgcagaaaccaattcccagcagccaggacctgacgtacctgtgctggaaatgaagacggagacccaagcagaggacactgagcccgatcctggtgaatccaaaggggagcccaggtctgagatgatggaggaggatttgcaaggagcttcccaagttaaagaagaaacagacatagcagagcagaaatcagaaccaatggaagtggatgaaaagaaacctgaagtgaaagtagaagttaaagaggaagaagagagtagcagtaacggcacagcctctcagtcaacatctccttcgcagccgcgcaaaaaaatctttaaaccagaggagttacgccaggccctcatgccaaccctagaagcactgtatcgacaggacccagagtcattacctttccggcagcctgtagatccccagctcctcggaattccagactattttgacatcgtaaagaatcccatggacctctccaccatcaagcggaagctggacacagggcaataccaagagccctggcagtacgtggacgacgtctggctcatgttcaacaatgcctggctctataatcgcaagacatcccgagtctataagttttgcagtaagcttgcagaggtctttgagcaggaaattgaccctgtcatgcagtcccttggatattgctgtggacgcaagtatgagttttccccacagactttgtgctgctatgggaagcagctgtgtaccattcctcgcgatgctgcctactacagctatcagaataggtatcatttctgtgagaagtgtttcacagagatccagggcgagaatgtgaccctgggtgacgacccttcacagccccagacgacaatttcaaaggatcagtttgaaaagaagaaaaatgataccttagaccccgaacctttcgttgattgcaaggagtgtggccggaagatgcatcagatttgcgttctgcactatgacatcatttggccttcaggttttgtgtgcgacaactgcttgaagaaaactggcagacctcgaaaagaaaacaaattcagtgctaagaggctgcagaccacaagactgggaaaccacttggaagaccgagtgaacaaatttttgcggcgccagaatcaccctgaagccggggaggtttttgtccgagtggtggccagctcagacaagacggtggaggtcaagcccgggatgaagtcacggtttgtggattctggggaaatgtctgaatctttcccatatcgaaccaaagctctgtttgcttttgaggaaattgacggcgtggatgtctgcttttttggaatgcacgtccaagaatacggctctgattgcccccctccaaacacgaggcgtgtgtacatttcttatctggatagtattcatttcttccggccacgttgcctccgcacagccgtttaccatgagatccttattggatatttagagtatgtgaagaaattagggtatgtgacagggcacatctgggcctgtcctccaagtgaaggagatgattacatcttccattgccacccacctgatcaaaaaatacccaagccaaaacgactgcaggagtggtacaaaaagatgctggacaaggcgtttgcagagcggatcatccatgactacaaggatattttcaaacaagcaactgaagacaggctcaccagtgccaaggaactgccctattttgaaggtgatttctggcccaatgtgttagaagagagcattaaggaactagaacaagaagaagaggagaggaaaaaggaagagagcactgcagccagtgaaaccactgagggcagtcagggcgacagcaagaatgccaagaagaagaacaacaagaaaaccaacaagaacaaaagcagcatcagccgcgccaacaagaagaagcccagcatgcccaacgtgtccaatgacctgtcccagaagctgtatgccaccatggagaagcacaaggaggtcttcttcgtgatccacctgcacgctgggcctgtcatcaacaccctgccccccatcgtcgaccccgaccccctgctcagctgtgacctcatggatgggcgcgacgccttcctcaccctcgccagagacaagcactgggagttctcctccttgcgccgctccaagtggtccacgctctgcatgctggtggagctgcacacccagggccaggaccgctttgtctacacctgcaacgagtgcaagcaccacgtggagacgcgctggcactgcactgtgtgcgaggactacgacctctgcatcaactgctataacacgaagagccatgcccataagatggtgaagtgggggctgggcctggatgacgagggcagcagccagggcgagccacagtcaaagagcccccaggagtcacgccggctgagcatccagcgctgcatccagtcgctggtgcacgcgtgccagtgccgcaacgccaactgctcgctgccatcctgccagaagatgaagcgggtggtgcagcacaccaagggctgcaaacgcaagaccaacgggggctgcccggtgtgcaagcagctcatcgccctctgctgctaccacgccaagcactgccaagaaaacaaatgccccgtgcccttctgcctcaacatcaaacacaagctccgccagcagcagatccagcaccgcctgcagcaggcccagctcatgcgccggcggatggccaccatgaacacccgcaacgtgcctcagcagagtctgccttctcctacctcagcaccgcccgggacccccacacagcagcccagcacaccccagacgccgcagccccctgcccagccccaaccctcacccgtgagcatgtcaccagctggcttccccagcgtggcccggactcagccccccaccacggtgtccacagggaagcctaccagccaggtgccggcccccccacccccggcccagccccctcctgcagcggtggaagcggctcggcagatcgagcgtgaggcccagcagcagcagcacctgtaccgggtgaacatcaacaacagcatgcccccaggacgcacgggcatggggaccccggggagccagatggcccccgtgagcctgaatgtgccccgacccaaccaggtgagcgggcccgtcatgcccagcatgcctcccgggcagtggcagcaggcgccccttccccagcagcagcccatgccaggcttgcccaggcctgtgatatccatgcaggcccaggcggccgtggctgggccccggatgcccagcgtgcagccacccaggagcatctcacccagcgctctgcaagacctgctgcggaccctgaagtcgcccagctcccctcagcagcaacagcaggtgctgaacattctcaaatcaaacccgcagctaatggcagctttcatcaaacagcgcacagccaagtacgtggccaatcagcccggcatgcagccccagcctggcctccagtcccagcccggcatgcaaccccagcctggcatgcaccagcagcccagcctgcagaacctgaatgccatgcaggctggcgtgccgcggcccggtgtgcctccacagcagcaggcgatgggaggcctgaacccccagggccaggccttgaacatcatgaacccaggacacaaccccaacatggcgagtatgaatccacagtaccgagaaatgttacggaggcagctgctgcagcagcagcagcaacagcagcagcaacaacagcagcaacagcagcagcagcaagggagtgccggcatggctgggggcatggcggggcacggccagttccagcagcctcaaggacccggaggctacccaccggccatgcagcagcagcagcgcatgcagcagcatctccccctccagggcagctccatgggccagatggcggctcagatgggacagcttggccagatggggcagccggggctgggggcagacagcacccccaacatccagcaagccctgcagcagcggattctgcagcaacagcagatgaagcagcagattgggtccccaggccagccgaaccccatgagcccccagcaacacatgctctcaggacagccacaggcctcgcatctccctggccagcagatcgccacgtcccttagtaaccaggtgcggtctccagcccctgtccagtctccacggccccagtcccagcctccacattccagcccgtcaccacggatacagccccagccttcgccacaccacgtctcaccccagactggttccccccaccccggactcgcagtcaccatggccagctccatagatcagggacacttggggaaccccgaacagagtgcaatgctcccccagctgaacacccccagcaggagtgcgctgtccagcgaactgtccctggtcggggacaccacgggggacacgctagagaagtttgtggagggcttgtagcattgtgagagcatcaccttttccctttcatgttcttggaccttttgtactgaaaatccaggcatctaggttctttttattcctagatggaactgcgacttccgagccatggaagggtggattgatgtttaaagaaacaatacaaagaatatatttttttgttaaaaaccagttgatttaaatatctggtctctctctttggtttttttttggcgggggggtggggggggttcttttttttccgttttgtttttgtttggggggaggggggttttgtttggattctttttgtcgtcattgctggtgactcatgcctttttttaacgggaaaaacaagttcattatattcatattttttatttgtattttcaagactttaaacatttatgtttaaaagtaagaagaaaaataatattcagaactgattcctgaaataatgcaagcttataatgtatcccgataactttgtgatgtttcgggaagatttttttctatagtgaactctgtgggcgtctcccagtattaccctggatgataggaattgactccggcgtgcacacacgtacacacccacacacatctatctatacataatggctgaagccaaacttgtcttgcagatgtagaaattgttgctttgtttctctgataaaactggttttagacaaaaaatagggatgatcactcttagaccatgctaatgttactagagaagaagccttcttttctttcttctatgtgaaacttgaaatgaggaaaagcaattctagtgtaaatcatgcaagcgctctaattcctataaatacgaaactcgagaagattcaatcactgtatagaatggtaaaataccaactcatttcttatatcatattgttaaataaactgtgtgcaacagacaaaaagggtggtccttcttgaattcatgtacatggtattaacacttagtgttcggggttttttgttatgaaaatgctgttttcaacattgtatttggactatgcatgtgttttttccccattgtatataaagtaccgcttaaaattgatataaattactgaggtttttaacatgtattctgttctttaagatccctgtaagaatgtttaaggtttttatttatttatatatattttttgagtctgttctttgtaagacatggttctggttgttcgctcatagcggagaggctggggctgcggttgtggttgtggcggcgtgggtggtggctgggaactgtggcccaggcttagcggccgcccggaggcttttcttcccggagactgaggtgggcgactgaggtgggcggctcagcgttggccccacacattcgaggctcacaggtgattgtcgctcacacagttagggtcgtcagttggtctgaaactgcatttggcccactcctccatcctccctgtccgtcgtagctgccacccccagaggcggcgcttcttcccgtgttcaggcggctccccccccccgtacacgactcccagaatctgaggcagagagtgctccaggctcgcgaggtgctttctgacttccccccaaatcctgccgctgccgcgcagcatgtcccgtgtggcgtttgaggaaatgctgagggacagacaccttggagcaccagctccggtccctgttacagtgagaaaggtcccccacttcgggggatacttgcacttagccacatggtcctgcctcccttggagtccagttccaggctcccttactgagtgggtgagacaagttcacaaaaaccgtaaaactgagaggaggaccatgggcaggggagctgaagttcatcccctaagtctaccacccccagcacccagagaacccactttatccctagtcccccaacaaaggctggtctaggtgggggtgatggtaattttagaaatcacgccccaaatagcttccgtttgggcccttacattcacagataggttttaaatagctgaatacttggtttgggaatctgaattcgaggaacctttctaagaagttggaaaggtccgatctagttttagcacagagctttgaaccttgagttataaaatgcagaataattcaagtaaaaataagaccaccatctggcacccctgaccagcccccattcaccccatcccaggaggggaagcacaggccgggcctccggtggagattgctgccactgctcggcctgctgggttcttaacctccagtgtcctcttcatcttttccacccgtagggaaaccttgagccatgtgttcaaacaagaagtggggctagagcccgagagcagcagctctaagcccacactcagaaagtggcgccctcctggttgtgcagccttttaatgtgggcagtggaggggcctctgtttcaggttatcctggaattcaaaacgttatgtaccaacctcatcctctttggagtctgcatcctgtgcaaccgtcttgggcaatccagatgtcgaaggatgtgaccgagagcatggtctgtggatgctaaccctaagtttgtcgtaaggaaatttctgtaagaaacctggaaagccccaacgctgtgtctcatgctgtatacttaagaggagaagaaaaagtcctatatttgtgatcaaaaagaggaaacttgaaatgtgatggtgtttataataaaagatggtaaaactacttggattcaaa

SEQ ID NO: 122627 - DNA, 7598 bp, Homo sapiens
  Payload ID: 4024
  Gene Symbol: CREBBP
  Gene Name: CREB binding protein
  Uniprot ID: Q92793
  ENST ID: ENST00000382070
  CDS Start-End: 205-7419
ctgcggggcgctgttgctgtggctgagatttggccgccgcctcccccacccggcctgcgccctccctctccctcggcgcccgcccgcccgctcgcggcccgcgctcgctcctctccctcgcagccggcagggcccccgacccccgtccgggccctcgccggcccggccgcccgtgcccggggctgttttcgcgagcaggtgaaaatggctgagaacttgctggacggaccgcccaaccccaaaagagccaaactcagctcgcccggtttctcggcgaatgacagcacagattttggatcattgtttgacttggaaaatgatcttcctgatgagctgatacccaatggaggagaattaggccttttaaacagtgggaaccttgttccagatgctgcttccaaacataaacaactgtcggagcttctacgaggaggcagcggctctagtatcaacccaggaataggaaatgtgagcgccagcagccccgtgcagcagggcctgggtggccaggctcaagggcagccgaacagtgctaacatggccagcctcagtgccatgggcaagagccctctgagccagggagattcttcagcccccagcctgcctaaacaggcagccagcacctctgggcccacccccgctgcctcccaagcactgaatccgcaagcacaaaagcaagtggggctggcgactagcagccctgccacgtcacagactggacctggtatctgcatgaatgctaactttaaccagacccacccaggcctcctcaatagtaactctggccatagcttaattaatcaggcttcacaagggcaggcgcaagtcatgaatggatctcttggggctgctggcagaggaaggggagctggaatgccgtaccctactccagccatgcagggcgcctcgagcagcgtgctggctgagaccctaacgcaggtttccccgcaaatgactggtcacgcgggactgaacaccgcacaggcaggaggcatggccaagatgggaataactgggaacacaagtccatttggacagccctttagtcaagctggagggcagccaatgggagccactggagtgaacccccagttagccagcaaacagagcatggtcaacagtttgcccaccttccctacagatatcaagaatacttcagtcaccaacgtgccaaatatgtctcagatgcaaacatcagtgggaattgtacccacacaagcaattgcaacaggccccactgcagatcctgaaaaacgcaaactgatacagcagcagctggttctactgcttcatgctcataagtgtcagagacgagagcaagcaaacggagaggttcgggcctgctcgctcccgcattgtcgaaccatgaaaaacgttttgaatcacatgacgcattgtcaggctgggaaagcctgccaagccatcctggggtctccagctagtggaattcaaaacacaattggttctgttggcacagggcaacagaatgccacttctttaagtaacccaaatcccatagaccccagctccatgcagcgagcctatgctgctctcggactcccctacatgaaccagccccagacgcagctgcagcctcaggttcctggccagcaaccagcacagcctcaaacccaccagcagatgaggactctcaaccccctgggaaataatccaatgaacattccagcaggaggaataacaacagatcagcagcccccaaacttgatttcagaatcagctcttccgacttccctgggggccacaaacccactgatgaacgatggctccaactctggtaacattggaaccctcagcactataccaacagcagctcctccttctagcaccggtgtaaggaaaggctggcacgaacatgtcactcaggacctgcggagccatctagtgcataaactcgtccaagccatcttcccaacacctgatcccgcagctctaaaggatcgccgcatggaaaacctggtagcctatgctaagaaagtggaaggggacatgtacgagtctgccaacagcagggatgaatattatcacttattagcagagaaaatctacaagatacaaaaagaactagaagaaaaacggaggtcgcgtttacataaacaaggcatcttggggaaccagccagccttaccagccccgggggctcagccccctgtgattccacaggcacaacctgtgagacctccaaatggacccctgtccctgccagtgaatcgcatgcaagtttctcaagggatgaattcatttaaccccatgtccttggggaacgtccagttgccacaagcacccatgggacctcgtgcagcctccccaatgaaccactctgtccagatgaacagcatgggctcagtgccagggatggccatttctccttcccgaatgcctcagcctccgaacatgatgggtgcacacaccaacaacatgatggcccaggcgcccgctcagagccagtttctgccacagaaccagttcccgtcatccagcggggcgatgagtgtgggcatggggcagccgccagcccaaacaggcgtgtcacagggacaggtgcctggtgctgctcttcctaaccctctcaacatgctggggcctcaggccagccagctaccttgccctccagtgacacagtcaccactgcacccaacaccgcctcctgcttccacggctgctggcatgccatctctccagcacacgacaccacctgggatgactcctccccagccagcagctcccactcagccatcaactcctgtgtcgtcttccgggcagactcccaccccgactcctggctcagtgcccagtgctacccaaacccagagcacccctacagtccaggcagcagcccaggcccaggtgaccccgcagcctcaaaccccagttcagcccccgtctgtggctacccctcagtcatcgcagcaacagccgacgcctgtgcacgcccagcctcctggcacaccgctttcccaggcagcagccagcattgataacagagtccctaccccctcctcggtggccagcgcagaaaccaattcccagcagccaggacctgacgtacctgtgctggaaatgaagacggagacccaagcagaggacactgagcccgatcctggtgaatccaaaggggagcccaggtctgagatgatggaggaggatttgcaaggagcttcccaagttaaagaagaaacagacatagcagagcagaaatcagaaccaatggaagtggatgaaaagaaacctgaagtgaaagtagaagttaaagaggaagaagagagtagcagtaacggcacagcctctcagtcaacatctccttcgcagccgcgcaaaaaaatctttaaaccagaggagttacgccaggccctcatgccaaccctagaagcactgtatcgacaggacccagagtcattacctttccggcagcctgtagatccccagctcctcggaattccagactattttgacatcgtaaagaatcccatggacctctccaccatcaagcggaagctggacacagggcaataccaagagccctggcagtacgtggacgacgtctggctcatgttcaacaatgcctggctctataatcgcaagacatcccgagtctataagttttgcagtaagcttgcagaggtctttgagcaggaaattgaccctgtcatgcagtcccttggatattgctgtggacgcaagtatgagttttccccacagactttgtgctgctatgggaagcagctgtgtaccattcctcgcgatgctgcctactacagctatcagaataggtatcatttctgtgagaagtgtttcacagagatccagggcgagaatgtgaccctgggtgacgacccttcacagccccagacgacaatttcaaaggatcagtttgaaaagaagaaaaatgataccttagaccccgaacctttcgttgattgcaaggagtgtggccggaagatgcatcagatttgcgttctgcactatgacatcatttggccttcaggttttgtgtgcgacaactgcttgaagaaaactggcagacctcgaaaagaaaacaaattcagtgctaagaggctgcagaccacaagactgggaaaccacttggaagaccgagtgaacaaatttttgcggcgccagaatcaccctgaagccggggaggtttttgtccgagtggtggccagctcagacaagacggtggaggtcaagcccgggatgaagtcacggtttgtggattctggggaaatgtctgaatctttcccatatcgaaccaaagctctgtttgcttttgaggaaattgacggcgtggatgtctgcttttttggaatgcacgtccaagaatacggctctgattgcccccctccaaacacgaggcgtgtgtacatttcttatctggatagtattcatttcttccggccacgttgcctccgcacagccgtttaccatgagatccttattggatatttagagtatgtgaagaaattagggtatgtgacagggcacatctgggcctgtcctccaagtgaaggagatgattacatcttccattgccacccacctgatcaaaaaatacccaagccaaaacgactgcaggagtggtacaaaaagatgctggacaaggcgtttgcagagcggatcatccatgactacaaggatattttcaaacaagcaactgaagacaggctcaccagtgccaaggaactgccctattttgaaggtgatttctggcccaatgtgttagaagagagcattaaggaactagaacaagaagaagaggagaggaaaaaggaagagagcactgcagccagtgaaaccactgagggcagtcagggcgacagcaagaatgccaagaagaagaacaacaagaaaaccaacaagaacaaaagcagcatcagccgcgccaacaagaagaagcccagcatgcccaacgtgtccaatgacctgtcccagaagctgtatgccaccatggagaagcacaaggaggtcttcttcgtgatccacctgcacgctgggcctgtcatcaacaccctgccccccatcgtcgaccccgaccccctgctcagctgtgacctcatggatgggcgcgacgccttcctcaccctcgccagagacaagcactgggagttctcctccttgcgccgctccaagtggtccacgctctgcatgctggtggagctgcacacccagggccaggaccgctttgtctacacctgcaacgagtgcaagcaccacgtggagacgcgctggcactgcactgtgtgcgaggactacgacctctgcatcaactgctataacacgaagagccatgcccataagatggtgaagtgggggctgggcctggatgacgagggcagcagccagggcgagccacagtcaaagagcccccaggagtcacgccggctgagcatccagcgctgcatccagtcgctggtgcacgcgtgccagtgccgcaacgccaactgctcgctgccatcctgccagaagatgaagcgggtggtgcagcacaccaagggctgcaaacgcaagaccaacgggggctgcccggtgtgcaagcagctcatcgccctctgctgctaccacgccaagcactgccaagaaaacaaatgccccgtgcccttctgcctcaacatcaaacacaagctccgccagcagcagatccagcaccgcctgcagcaggcccagctcatgcgccggcggatggccaccatgaacacccgcaacgtgcctcagcagagtctgccttctcctacctcagcaccgcccgggacccccacacagcagcccagcacaccccagacgccgcagccccctgcccagccccaaccctcacccgtgagcatgtcaccagctggcttccccagcgtggcccggactcagccccccaccacggtgtccacagggaagcctaccagccaggtgccggcccccccacccccggcccagccccctcctgcagcggtggaagcggctcggcagatcgagcgtgaggcccagcagcagcagcacctgtaccgggtgaacatcaacaacagcatgcccccaggacgcacgggcatggggaccccggggagccagatggcccccgtgagcctgaatgtgccccgacccaaccaggtgagcgggcccgtcatgcccagcatgcctcccgggcagtggcagcaggcgccccttccccagcagcagcccatgccaggcttgcccaggcctgtgatatccatgcaggcccaggcggccgtggctgggccccggatgcccagcgtgcagccacccaggagcatctcacccagcgctctgcaagacctgctgcggaccctgaagtcgcccagctcccctcagcagcaacagcaggtgctgaacattctcaaatcaaacccgcagctaatggcagctttcatcaaacagcgcacagccaagtacgtggccaatcagcccggcatgcagccccagcctggcctccagtcccagcccggcatgcaaccccagcctggcatgcaccagcagcccagcctgcagaacctgaatgccatgcaggctggcgtgccgcggcccggtgtgcctccacagcagcaggcgatgggaggcctgaacccccagggccaggccttgaacatcatgaacccaggacacaaccccaacatggcgagtatgaatccacagtaccgagaaatgttacggaggcagctgctgcagcagcagcagcaacagcagcagcaacaacagcagcaacagcagcagcagcaagggagtgccggcatggctgggggcatggcggggcacggccagttccagcagcctcaaggacccggaggctacccaccggccatgcagcagcagcagcgcatgcagcagcatctccccctccagggcagctccatgggccagatggcggctcagatgggacagcttggccagatggggcagccggggctgggggcagacagcacccccaacatccagcaagccctgcagcagcggattctgcagcaacagcagatgaagcagcagattgggtccccaggccagccgaaccccatgagcccccagcaacacatgctctcaggacagccacaggcctcgcatctccctggccagcagatcgccacgtcccttagtaaccaggtgcggtctccagcccctgtccagtctccacggccccagtcccagcctccacattccagcccgtcaccacggatacagccccagccttcgccacaccacgtctcaccccagactggttccccccaccccggactcgcagtcaccatggccagctccatagatcagggacacttggggaaccccgaacagagtgcaatgctcccccagctgaacacccccagcaggagtgcgctgtccagcgaactgtccctggtcggggacaccacgggggacacgctagagaagtttgtggagggcttgtagcattgtgagagcatcaccttttccctttcatgttcttggaccttttgtactgaaaatccaggcatctaggttctttttattcctagatggaactgcgacttccgagccatggaagggtggattgatgtttaaagaaacaatacaaagaatatatttttttgttaaaaaccagttgattt

SEQ ID NO: 122628 - DNA, 846 bp, Homo sapiens
  Payload ID: 4024
  Gene Symbol: CREBBP
  Gene Name: CREB binding protein
  ENST ID: ENST00000572134
  CDS Start-End: 1-764
acgatggctccaactctggtaacattggaaccctcagcactataccaacagcagctcctccttctagcaccggtgtaaggaaaggctggcacgaacatgtcactcaggacctgcggagccatctagtgcataaactcgtccaagccatcttcccaacacctgatcccgcagctctaaaggatcgccgcatggaaaacctggtagcctatgctaagaaagtggaaggggacatgtacgagtctgccaacagcagggatgaatattatcacttattagcagagaaaatctacaagatacaaaaagaactagaagaaaaacggaggtcgcgtttacataaacaaggcatcttggggaaccagccagccttaccagccccgggggctcagccccctgtgattccacaggcacaacctgtgagacctccaaggatgaattcatttaaccccatgtccttggggaacgtccagttgccacaagcacccatgggacctcgtgcagcctccccaatgaaccactctgtccagatgaacagcatgggctcagtgccagggatggccatttctccttcccgaatgcctcagcctccgaacatgatgggtgcacacaccaacaacatgatggcccaggcgcccgctcagagccagtttctgccacagaaccagttcccgtcatccagcggggcgatgagtgtgggcatggggcagccgccagcccaaacaggcgtgtcacaggtactgtgccccactgggaccgtggctccctaggaaataaaattcttgtgttaagttttggttttttttttctgtcttccttcgtggaaattaaaattccagaatgcacatttca

SEQ ID NO: 122629 - DNA, 627 bp, Homo sapiens
  Payload ID: 4024
  Gene Symbol: CREBBP
  Gene Name: CREB binding protein
  ENST ID: ENST00000571826
  CDS Start-End: 1-545
atcacttattagcagagaaaatctacaagatacaaaaagaactagaagaaaaacggaggtcgcgtttacataaacaaggcatcttggggaaccagccagccttaccagccccgggggctcagccccctgtgattccacaggcacaacctgtgagacctccaaatggacccctgtccctgccagtgaatcgcatgcaagtttctcaagggatgaattcatttaaccccatgtccttggggaacgtccagttgccacaagcacccatgggacctcgtgcagcctccccaatgaaccactctgtccagatgaacagcatgggctcagtgccagggatggccatttctccttcccgaatgcctcagcctccgaacatgatgggtgcacacaccaacaacatgatggcccaggcgcccgctcagagccagtttctgccacagaaccagttcccgtcatccagcggggcgatgagtgtgggcatggggcagccgccagcccaaacaggcgtgtcacaggtactgtgccccactgggaccgtggctccctaggaaataaaattcttgtgttaagttttggttttttttttctgtcttccttcgtggaaattaaaattccagaatgcacatttca

SEQ ID NO: 122630 - DNA, 718 bp, Homo sapiens
  Payload ID: 4024
  Gene Symbol: CREBBP
  Gene Name: CREB binding protein
  ENST ID: ENST00000573517
  CDS Start-End: 1-590
ataggtatcatttctgtgagaagtgtttcacagagatccagggcgagaatgtgaccctgggtgacgacccttcacagccccagacgacaatttcaaaggatcagtttgaaaagaagaaaaatgataccttagaccccgaacctttcgttgattgcaaggagtgtggccggaagatgcatcagatttgcgttctgcactatgacatcatttggccttcaggttttgtgtgcgacaactgcttgaagaaaactggcagacctcgaaaagaaaacaaattcagtgctaagaggctgcagaccacaagactgggaaaccacttggaagaccgagtgaacaaatttttgcggcgccagaatcaccctgaagccggggaggtttttgtccgagtggtggccagctcagacaagacggtggaggtcaagcccgggatgaagtcacggtttgtggattctggggaaatgtctgaatctttcccatatcgaaccaaagctctgtttgcttttgaggaaattgacggcgtggatgtctgcttttttggaatgcacgtccaagaatacggctctgattgcccccctccaaacacgaggtagttttccagctccttccagggcgtgtcattcagtgagccgtgttaggatagaccagggctcttaagtgtcccagaggagcctgtgagccttcataggggattaaagtaaatgaaaccacaattaactaa

SEQ ID NO: 122631 - DNA, 3316 bp, Homo sapiens
  Payload ID: 4024
  Gene Symbol: CREBBP
  Gene Name: CREB binding protein
  ENST ID: ENST00000570939
  CDS Start-End: 1-3316
aatgccacttctttaagtaacccaaatcccatagaccccagctccatgcagcgagcctatgctgctctcggactcccctacatgaaccagccccagacgcagctgcagcctcaggttcctggccagcaaccagcacagcctcaaacccaccagcagatgaggactctcaaccccctgggaaataatccaatgaacattccagcaggaggaataacaacagatcagcagcccccaaacttgatttcagaatcagctcttccgacttccctgggggccacaaacccactgatgaacgatggctccaactctggtaacattggaaccctcagcactataccaacagcagctcctccttctagcaccggtgtaaggaaaggctggcacgaacatgtcactcaggacctgcggagccatctagtgcataaactcgtccaagccatcttcccaacacctgatcccgcagctctaaaggatcgccgcatggaaaacctggtagcctatgctaagaaagtggaaggggacatgtacgagtctgccaacagcagggatgaatattatcacttattagcagagaaaatctacaagatacaaaaagaactagaagaaaaacggaggtcgcgtttacataaacaaggcatcttggggaaccagccagccttaccagccccgggggctcagccccctgtgattccacaggcacaacctgtgagacctccaaatggacccctgtccctgccagtgaatcgcatgcaagtttctcaagggatgaattcatttaaccccatgtccttggggaacgtccagttgccacaagcacccatgggacctcgtgcagcctccccaatgaaccactctgtccagatgaacagcatgggctcagtgccagggatggccatttctccttcccgaatgcctcagcctccgaacatgatgggtgcacacaccaacaacatgatggcccaggcgcccgctcagagccagtttctgccacagaaccagttcccgtcatccagcggggcgatgagtgtgggcatggggcagccgccagcccaaacaggcgtgtcacagggacaggtgcctggtgctgctcttcctaaccctctcaacatgctggggcctcaggccagccagctaccttgccctccagtgacacagtcaccactgcacccaacaccgcctcctgcttccacggctgctggcatgccatctctccagcacacgacaccacctgggatgactcctccccagccagcagctcccactcagccatcaactcctgtgtcgtcttccgggcagactcccaccccgactcctggctcagtgcccagtgctacccaaacccagagcacccctacagtccaggcagcagcccaggcccaggtgaccccgcagcctcaaaccccagttcagcccccgtctgtggctacccctcagtcatcgcagcaacagccgacgcctgtgcacgcccagcctcctggcacaccgctttcccaggcagcagccagcattgataacagagtccctaccccctcctcggtggccagcgcagaaaccaattcccagcagccaggacctgacgtacctgtgctggaaatgaagacggagacccaagcagaggacactgagcccgatcctggtgaatccaaaggggagcccaggtctgagatgatggaggaggatttgcaaggagcttcccaagttaaagaagaaacagacatagcagagcagaaatcagaaccaatggaagtggatgaaaagaaacctgaagtgaaagtagaagttaaagaggaagaagagagtagcagtaacggcacagcctctcagtcaacatctccttcgcagccgcgcaaaaaaatctttaaaccagaggagttacgccaggccctcatgccaaccctagaagcactgtatcgacaggacccagagtcattacctttccggcagcctgtagatccccagctcctcggaattccagactattttgacatcgtaaagaatcccatggacctctccaccatcaagcggaagctggacacagggcaataccaagagccctggcagtacgtggacgacgtctggctcatgttcaacaatgcctggctctataatcgcaagacatcccgagtctataagttttgcagtaagcttgcagaggtctttgagcaggaaattgaccctgtcatgcagtcccttggatattgctgtggacgcaagtatgagttttccccacagactttgtgctgctatgggaagcagctgtgtaccattcctcgcgatgctgcctactacagctatcagaatagttcacccaagtatggccttcttgctgacaggtatcatttctgtgagaagtgtttcacagagatccagggcgagaatgtgaccctgggtgacgacccttcacagccccagacgacaatttcaaaggatcagtttgaaaagaagaaaaatgataccttagaccccgaacctttcgttgattgcaaggagtgtggccggaagatgcatcagatttgcgttctgcactatgacatcatttggccttcaggttttgtgtgcgacaactgcttgaagaaaactggcagacctcgaaaagaaaacaaattcagtgctaagaggctgcagaccacaagactgggaaaccacttggaagaccgagtgaacaaatttttgcggcgccagaatcaccctgaagccggggaggtttttgtccgagtggtggccagctcagacaagacggtggaggtcaagcccgggatgaagtcacggtttgtggattctggggaaatgtctgaatctttcccatatcgaaccaaagctctgtttgcttttgaggaaattgacggcgtggatgtctgcttttttggaatgcacgtccaagaatacggctctgattgcccccctccaaacacgaggcgtgtgtacatttcttatctggatagtattcatttcttccggccacgttgcctccgcacagccgtttaccatgagatccttattggatatttagagtatgtgaagaaattagggtatgtgacagggcacatctgggcctgtcctccaagtgaaggagatgattacatcttccattgccacccacctgatcaaaaaatacccaagccaaaacgactgcaggagtggtacaaaaagatgctggacaaggcgtttgcagagcggatcatccatgactacaaggatattttcaaacaagcaactgaagacaggctcaccagtgccaaggaactgccctattttgaaggtgatttctggcccaatgtgttagaagagagcattaaggaactagaacaagaagaag

SEQ ID NO: 122632 - DNA, 2501 bp, Homo sapiens
  Payload ID: 4025
  Gene Symbol: CRTC1
  Gene Name: CREB regulated transcription coactivator 1
  Uniprot ID: Q6UUV9
  ENST ID: ENST00000321949
  CDS Start-End: 27-1931
gaggaggaggaggtggcggcgagaagatggcgacttcgaacaatccgcggaaattcagcgagaagatcgcgctgcacaatcagaagcaggcggaggagacggcggccttcgaggaggtcatgaaggacctgagcctgacgcgggccgcgcggctccagctccagaaatcccagtacctgcaactgggccccagccgaggccagtactatggcgggtccctgcccaacgtgaaccagatcgggagtggcaccatggacctgcccttccagacccccttccaatcctcgggcctggacaccagccggaccacccggcaccatgggctggtggacagggtgtaccgggagcgtggccggctcggctccccacaccgccggcccctgtcagtggacaaacacggacggcaggccgacagctgcccctatggcaccatgtacctctcaccacccgcggacaccagctggagaaggaccaattctgactccgccctgcaccagagcacaatgacgcccacgcagccagaatcctttagcagtgggtcccaggacgtgcaccagaaaagagtcttactgttaacagtcccaggaatggaagagaccacatcagaggcagacaaaaacctttccaagcaagcatgggacaccaagaagacggggtccaggcccaagtcctgtgaggtccccggaatcaacatcttcccgtctgccgaccaggaaaacactacagccctgatccccgccacccacaacacaggggggtccctgcccgacctgaccaacatccacttcccctccccgctcccgaccccgctggaccccgaggagcccaccttccctgcactgagcagctccagcagcaccggcaacctcgcggccaacctgacgcacctgggcatcggtggcgccggccagggaatgagcacacctggctcctctccacagcaccgcccagctggcgtcagccccctgtccctgagcacagaggcaaggcgtcagcaggcatcgcccaccctgtccccgctgtcacccatcactcaggctgtagccatggacgccctgtctctggagcagcagctgccctacgccttcttcacccaggcgggctcccagcagccaccgccgcagccccagcccccgccgcctcctccacccgcgtcccagcagccaccacccccgccacccccacaggcgcccgtccgcctgccccctggtggccccctgttgcccagcgccagcctgactcgtgggccacagccgcccccgcttgcagtcacggtaccgtcctctctcccccagtcccccccagagaaccctggccagccatcgatggggatcgacatcgcctcggcgccggctctgcagcagtaccgcactagcgccggctccccggccaaccagtctcccacctcgccagtctccaatcaaggcttctccccagggagctccccgcaacacacttccaccctgggcagcgtgtttggggacgcgtactatgagcagcagatggcggccaggcaggccaatgctctgtcccaccagctggagcagttcaacatgatggagaacgccatcagctccagcagcctgtacagcccgggctccacactcaactactcgcaggcggccatgatgggcctcacgggcagccacgggagcctgccggactcgcagcaactgggatacgccagccacagtggcatccccaacatcatcctcacagtgacaggagagtccccccccagcctctctaaagaactgaccagctctctggccggggtcggcgacgtcagcttcgactccgacagccagtttcccctggacgaactcaagatcgaccccctgaccctcgacggactgcacatgctcaacgaccccgacatggttctggccgacccagccaccgaggacaccttccggatggaccgcctgtgagcgggcacgccggcaccctgccgctcagccgtcccgacggcgcctccccagcccggggacggccgtgctccgtccctcgccaacggccgagcttgtgattctgagcttgcaatgccgccaagcgccccccgccagcccgcccccggttgtccacctcccgcgaagcccaatcgcgaggccgcgagccgggccgtccacccacccgcccgcccagggctgggctgggatcggaggccgtgagcctcccgcccctgcagaccctccctgcactggctccctcgcccccagccccggggcctgagccgtcccctgtaagatgcgggaagtgtcagctcccggcgtggcgggcaggctcaggggaggggcgcgcatggtccgccagggctgtgggccgtggcgcattttccgactgtttgtccagctctcactgccttccttggttcccggtcccccagcccatccgccatccccagcccgtggtcaggtagagagtgagccccacgccgccccagggaggaggcgccagagcgcggggcagacgcaaagtgaaataaacactattttgacggc

SEQ ID NO: 122633 - DNA, 6929 bp, Homo sapiens
  Payload ID: 4025
  Gene Symbol: CRTC1
  Gene Name: CREB regulated transcription coactivator 1
  Uniprot ID: Q6UUV9
  ENST ID: ENST00000338797
  CDS Start-End: 26-1978
aggaggaggaggtggcggcgagaagatggcgacttcgaacaatccgcggaaattcagcgagaagatcgcgctgcacaatcagaagcaggcggaggagacggcggccttcgaggaggtcatgaaggacctgagcctgacgcgggccgcgcggctccagctccagaaatcccagtacctgcaactgggccccagccgaggccagtactatggcgggtccctgcccaacgtgaaccagatcgggagtggcaccatggacctgcccttccagcccagcggatttctgggggaggccctggcagcggctcctgtctctctgacccccttccaatcctcgggcctggacaccagccggaccacccggcaccatgggctggtggacagggtgtaccgggagcgtggccggctcggctccccacaccgccggcccctgtcagtggacaaacacggacggcaggccgacagctgcccctatggcaccatgtacctctcaccacccgcggacaccagctggagaaggaccaattctgactccgccctgcaccagagcacaatgacgcccacgcagccagaatcctttagcagtgggtcccaggacgtgcaccagaaaagagtcttactgttaacagtcccaggaatggaagagaccacatcagaggcagacaaaaacctttccaagcaagcatgggacaccaagaagacggggtccaggcccaagtcctgtgaggtccccggaatcaacatcttcccgtctgccgaccaggaaaacactacagccctgatccccgccacccacaacacaggggggtccctgcccgacctgaccaacatccacttcccctccccgctcccgaccccgctggaccccgaggagcccaccttccctgcactgagcagctccagcagcaccggcaacctcgcggccaacctgacgcacctgggcatcggtggcgccggccagggaatgagcacacctggctcctctccacagcaccgcccagctggcgtcagccccctgtccctgagcacagaggcaaggcgtcagcaggcatcgcccaccctgtccccgctgtcacccatcactcaggctgtagccatggacgccctgtctctggagcagcagctgccctacgccttcttcacccaggcgggctcccagcagccaccgccgcagccccagcccccgccgcctcctccacccgcgtcccagcagccaccacccccgccacccccacaggcgcccgtccgcctgccccctggtggccccctgttgcccagcgccagcctgactcgtgggccacagccgcccccgcttgcagtcacggtaccgtcctctctcccccagtcccccccagagaaccctggccagccatcgatggggatcgacatcgcctcggcgccggctctgcagcagtaccgcactagcgccggctccccggccaaccagtctcccacctcgccagtctccaatcaaggcttctccccagggagctccccgcaacacacttccaccctgggcagcgtgtttggggacgcgtactatgagcagcagatggcggccaggcaggccaatgctctgtcccaccagctggagcagttcaacatgatggagaacgccatcagctccagcagcctgtacagcccgggctccacactcaactactcgcaggcggccatgatgggcctcacgggcagccacgggagcctgccggactcgcagcaactgggatacgccagccacagtggcatccccaacatcatcctcacagtgacaggagagtccccccccagcctctctaaagaactgaccagctctctggccggggtcggcgacgtcagcttcgactccgacagccagtttcccctggacgaactcaagatcgaccccctgaccctcgacggactgcacatgctcaacgaccccgacatggttctggccgacccagccaccgaggacaccttccggatggaccgcctgtgagcgggcacgccggcaccctgccgctcagccgtcccgacggcgcctccccagcccggggacggccgtgctccgtccctcgccaacggccgagcttgtgattctgagcttgcaatgccgccaagcgccccccgccagcccgcccccggttgtccacctcccgcgaagcccaatcgcgaggccgcgagccgggccgtccacccacccgcccgcccagggctgggctgggatcggaggccgtgagcctcccgcccctgcagaccctccctgcactggctccctcgcccccagccccggggcctgagccgtcccctgtaagatgcgggaagtgtcagctcccggcgtggcgggcaggctcaggggaggggcgcgcatggtccgccagggctgtgggccgtggcgcattttccgactgtttgtccagctctcactgccttccttggttcccggtcccccagcccatccgccatccccagcccgtggtcaggtagagagtgagccccacgccgccccagggaggaggcgccagagcgcggggcagacgcaaagtgaaataaacactattttgacggctgtcttttatatttctgagcacacacagagccctggcgtccaccggggcaggcgcaaagtggacagagcatgcagggcggcggacccccccacgaccctcctcgccctgtctccatcccctcgaagccctgcctcaccgcaggcaggcccatcggtggccacctttgccgggaagtgaccggaaggccccgtgaggggtcgaacgcggaggcaggggttacctcttggggctttacaatccgtggcccctcctgtcctgcactgtggtcaccggtcctgtcatagatgctgttaatttaaggtacaggcagaggtggccaggggagtttcattgtggtttttttttccttttagtttctagttacattttggttgtagatgactcgcttaatcttttaagccaacacttgcctgagagcatgtttttatttcagaaatccaactttacctattttttaagctaactggaaatggaggccatgcgccccaaagcagcccgccacccacctgagtgtaagaagtgagtccggcttttgggtttcaccccaagttatctcaaaacaaaagggctggtcaggctgggcagggccttgtcaggagctcacggtaggcagaggtgcctctgccagggccacagaacagacttccgggaaggggccttggcttttattgagggtctctcaaagacccagcctgccagcctctcccagaggtgcctgctagtccttagagtgtgtgtgtgaagatgccatgaccagtggcagctgagacctctctgccccaagagtgtgggggactggcagggagcgagggtccccgagacgaggaccacggtcctccctgagaacctgggtggaactggcatttcatcccctctccaccctaccctctggctcctagcccacaccccctctcttgggcagcgtggtctgctggctgccccttcttggcagctcagggtcgtggcaggtggacttggagacacacagcagtgtgtgttttagtggcaggtttcaggagcacctctaagaccagggtgacagggtacttgggagctgtcctggaccctccccataccacgggccctgcaagggaggcatcagggctggctttgttttctgctgttcttggaataggaactgctgttctgatccccccaaaactgcattgcggctctcgctcgctcctgcctgccgggacagcgccttctgctgagtccgtttatttgtagtgtcatggctgctgctttcactggggtcctgggcaccctggcttctgtcctcagagctgggtttgatcctagcaaccatcccttcctctctttgcccggcaatgcctttggcatgtgtctgagcagccaagtggccactcataggagaaggctccctggtcacgttgctcctgctgccgtcttgttccaaggtgcgggggggacactgttggtctgtccaggtcaaggtccctttctcttaccatgacagaggctgggggcagacagcggggacttttttttttttttaagaaaaactacatgtacataggagagtttcattaccattagacttgtatgtaggacttaaaaaaaaatggccttaataaaattacaagcaacccgcctggatgcggttttcaaaagaaggcattgaggaccatgctaggaaacctcataccccatccgtccaacctccggcgggcgccactgcttgtcctctggtcttcggtgtggacagataggagaggagggatgcccacctcggagcatcccaggcccgtggcccattttcagcatcctgaagccagattcacagtgacattgtgttaacgtgacgaccttggtccattatggagttctttttccaataagaacctggtggaccgaggtccgagcttgccagggacagtggggcccacgcgagtacccggggcccagccaggagccagcagccaggcgtccctgtgttccagaaggattcacgcccctcctggacctgggcgggcctcccagggggtctgtatcacggccttttgtgtgtgcgtacgtgtggtttttttaaatatcactactacatattcttgaattgccaagactttctgaaacaagacagcttaagggaatcagccttttgctttgtgatgtgaaaatactgtgatttgacgagccgcttcctgaggggcaggcccacgtggggaggttgcgccgtgtacatagacccgccgtctgtgtccttggtcaggcccggatgcttggtctacactgggttagaggctgctctccccacgcacccatgtgctcatggcttctgcagaccctctgctgggtacatcggtcccctacggcgaagttcagccagggctctccctcctgagagcatggcgtccccaccttcctgtttcgccgacgtcactacccagggtggcaagtcttgcaggcagagggtgtagcccaagttcagcctctctctgtgtcctccagagaagagggttctttgccctcatcagggccctgcttgtgggttttcggctctggggaggagagtgttggcatcagtgtgtttggcctgatttcttcagggggccaagctcccgggaggacccctagccaggagggccccccatgtccatccatccctcctgctggggcttggatgtcaggcttgggggctgtgagctgggacctcgcctgagcccggtcaggtgggacaggagcctgccagaagcccatggggggccaggccgggtggcttctattttatttttttagagatggggtcttgctgtgttgcccaggctggtctcggactcctgggctcaagcagtcctccctcctcggcctcccaaagttctggggctacaggtgtgagccacttctgcccagcatcccaggcctgaacagccttggcaggacccgtccctagagggggctctggtgcctcccttaggtgggccttgagctggtttttaaccaaacatccttccaaactcgggctgcgacctgcttcctgagttttctgtatttccaaggagccctccgaccagggagaggctggtggagtaaggtccagcggtattcgggggtcctctgtcacctcgccctgaaaacagcagctcccatcaccttcactgggtcccgatggagccgtctcagaggccgaggggccctctgtgtgggggtgggacgcaggggctctcagagcaagggccacaaagccgatggcacagatgtgcccctgggcctggcccgtcacccacatgtggtgccctgggccagggcgtgcgggcgccagagccttccctacacagcctaagagcaggggcaagactcggcccctcactcaccctgggaggcctgcctgggctacatggacacctgggtctctttctacccccattcaccatggaccaggggcctccatttcctgggggctcttgcggcatgtgatttgggggtccctgggacattctcccgtcagctccacctgagccaagtgtcctgttccctgcggcccttggccttccagggtcctggccaggcaggggtcaggcaccccatactcttccgtgtggcacaggtgtccacccacccccactggccacagacaccattctccccctgggagcaggaggtggagtaagttgtacccccaggcctgggtgctggggagttcctgagggcatgggtggggcaggagtgagtgcctcgtgatcccagcctcagtttctctcttgtcactttctcaaacctgcaggtctcagggccccgggctcctcctgggcaggatggggggcaggggctgggccttggggtggtgctggctctgatgattccagagcctgtatccaccttctgggctcctggccagcaccccacccccaggagccagggacaggtggcatgtgttggggtcgggggatggcccccatctcgaagtgttctggaatttgggggcaacccttgcccagcccagccatcaagaacttctgatctcctgcccaccaggaggggacttagccatggacttggccagtaggcctggggagggagggctttggcagccaaagtccactggccctgccgtgcccctgagtaggaaactgtcccctaggggctgggtggccccactgatatatgcaaacccgccggtccgagccctgttcctgcctgtgctcctctgtgcccaggctggctctcccccaaccctagcatgtatactctgccacggacgtcccgtgggccatgattgtgggcggccgcagcgggcgggggcaggcggctcagggcacactcggccgtccctgccccatcctctggcagggctgcttttgtctttgtacctttgcatcctttgtaatgaaacgtaataaaaatccaacgttttcgtca

SEQ ID NO: 122634 - DNA, 2384 bp, Homo sapiens
  Payload ID: 4025
  Gene Symbol: CRTC1
  Gene Name: CREB regulated transcription coactivator 1
  ENST ID: ENST00000594658
  CDS Start-End: 33-1814
cccttaggggaagagtcctgctctggctgttgatgctccagctccagaaatcccagtacctgcaactgggccccagccgaggccagtactatggcgggtccctgcccaacgtgaaccagatcgggagtggcaccatggacctgcccttccagacccccttccaatcctcgggcctggacaccagccggaccacccggcaccatgggctggtggacagggtgtaccgggagcgtggccggctcggctccccacaccgccggcccctgtcagtggacaaacacggacggcaggccgacagctgcccctatggcaccatgtacctctcaccacccgcggacaccagctggagaaggaccaattctgactccgccctgcaccagagcacaatgacgcccacgcagccagaatcctttagcagtgggtcccaggacgtgcaccagaaaagagtcttactgttaacagtcccaggaatggaagagaccacatcagaggcagacaaaaacctttccaagcaagcatgggacaccaagaagacggggtccaggcccaagtcctgtgaggtccccggaatcaacatcttcccgtctgccgaccaggaaaacactacagccctgatccccgccacccacaacacaggggggtccctgcccgacctgaccaacatccacttcccctccccgctcccgaccccgctggaccccgaggagcccaccttccctgcactgagcagctccagcagcaccggcaacctcgcggccaacctgacgcacctgggcatcggtggcgccggccagggaatgagcacacctggctcctctccacagcaccgcccagctggcgtcagccccctgtccctgagcacagaggcaaggcgtcagcaggcatcgcccaccctgtccccgctgtcacccatcactcaggctgtagccatggacgccctgtctctggagcagcagctgccctacgccttcttcacccaggcgggctcccagcagccaccgccgcagccccagcccccgccgcctcctccacccgcgtcccagcagccaccacccccgccacccccacaggcgcccgtccgcctgccccctggtggccccctgttgcccagcgccagcctgactcgtgggccacagccgcccccgcttgcagtcacggtaccgtcctctctcccccagtcccccccagagaaccctggccagccatcgatggggatcgacatcgcctcggcgccggctctgcagcagtaccgcactagcgccggctccccggccaaccagtctcccacctcgccagtctccaatcaaggcttctccccagggagctccccgcaacacacttccaccctgggcagcgtgtttggggacgcgtactatgagcagcagatggcggccaggcaggccaatgctctgtcccaccagctggagcagttcaacatgatggagaacgccatcagctccagcagcctgtacagcccgggctccacactcaactactcgcaggcggccatgatgggcctcacgggcagccacgggagcctgccggactcgcagcaactgggatacgccagccacagtggcatccccaacatcatcctcacagtgacaggagagtccccccccagcctctctaaagaactgaccagctctctggccggggtcggcgacgtcagcttcgactccgacagccagtttcccctggacgaactcaagatcgaccccctgaccctcgacggactgcacatgctcaacgaccccgacatggttctggccgacccagccaccgaggacaccttccggatggaccgcctgtgagcgggcacgccggcaccctgccgctcagccgtcccgacggcgcctccccagcccggggacggccgtgctccgtccctcgccaacggccgagcttgtgattctgagcttgcaatgccgccaagcgccccccgccagcccgcccccggttgtccacctcccgcgaagcccaatcgcgaggccgcgagccgggccgtccacccacccgcccgcccagggctgggctgggatcggaggccgtgagcctcccgcccctgcagaccctccctgcactggctccctcgcccccagccccggggcctgagccgtcccctgtaagatgcgggaagtgtcagctcccggcgtggcgggcaggctcaggggaggggcgcgcatggtccgccagggctgtgggccgtggcgcattttccgactgtttgtccagctctcactgccttccttggttcccggtcccccagcccatccgccatccccagcccgtggtcaggtagagagtgagccccacgccgccccagggaggaggcgccagagcgcggggcagacgcaaagtgaaataaacactattttgacggc

SEQ ID NO: 122635 - DNA, 1834 bp, Homo sapiens
  Payload ID: 4025
  Gene Symbol: CRTC1
  Gene Name: CREB regulated transcription coactivator 1
  ENST ID: ENST00000601916
  CDS Start-End: 100-1278
ctccagctccagaaatcccagtacctgcaactgggccccagccgaggccagtactatggcgggtccctgcccaacgtgaaccagatcgggagtggcaccatggacctgcccttccagacccccttccaatcctcgggcctggacaccagccggaccacccggcaccatgggctggtggacagggtgtaccgggagcgtggccggctcggctccccacaccgccggcccctgtcagtggacaaacacggacggcaggccgacagctgcccctatggcaccatgtacctctcaccacccgcggacaccagctggagaaggaccaattctgactccgccctgcaccagagcacaatgacgcccacgcagccagaatcctttagcagtgggtcccaggacgtgcaccagaaaagagtcttactgttaacagtcccaggaatggaagagaccacatcagaggcagacaaaaacctttccaagcaagcatgggacaccaagaagacggggtccaggcccaagtcctgtgaggtccccggaatcaacatcttcccgtctgccgaccaggaaaacactacagccctgatccccgccacccacaacacaggggggtccctgcccgacctgaccaacatccacttcccctccccgctcccgaccccgctggaccccgaggagcccaccttccctgcactgagcagctccagcagcaccggcaacctcgcggccaacctgacgcacctgggcatcggtggcgccggccagggaatgagcacacctggctcctctccacagcaccgcccagctggcgtcagccccctgtccctgagcacagaggcaaggcgtcagcaggcatcgcccaccctgtccccgctgtcacccatcactcagctggagcagttcaacatgatggagaacgccatcagctccagcagcctgtacagcccgggctccacactcaactactcgcaggcggccatgatgggcctcacgggcagccacgggagcctgccggactcgcagcaactgggatacgccagccacagtggcatccccaacatcatcctcacagtgacaggagagtccccccccagcctctctaaagaactgaccagctctctggccggggtcggcgacgtcagcttcgactccgacagccagtttcccctggacgaactcaagatcgaccccctgaccctcgacggactgcacatgctcaacgaccccgacatggttctggccgacccagccaccgaggacaccttccggatggaccgcctgtgagcgggcacgccggcaccctgccgctcagccgtcccgacggcgcctccccagcccggggacggccgtgctccgtccctcgccaacggccgagcttgtgattctgagcttgcaatgccgccaagcgccccccgccagcccgcccccggttgtccacctcccgcgaagcccaatcgcgaggccgcgagccgggccgtccacccacccgcccgcccagggctgggctgggatcggaggccgtgagcctcccgcccctgcagaccctccctgcactggctccctcgcccccagccccggggcctgagccgtcccctgtaagatgcgggaagtgtcagctcccggcgtggcgggcaggctcaggggaggggcgcgcatggtccgccagggctgtgggccgtggcgcattttccgactgtttgtccagctctcactgccttccttggttcccggtcccccagcccatccgccatccccagcccgtggtcaggtagagagtgagccccacgccgccccagggaggaggcgccagagcgcggggcagacgcaaagtgaaataaac

SEQ ID NO: 122636 - DNA, 2290 bp, Homo sapiens
  Payload ID: 4026
  Gene Symbol: CRTC2
  Gene Name: CREB regulated transcription coactivator 2
  ENST ID: ENST00000303569
  CDS Start-End: 119-283
gccgggttcgcggtgctcgctgaggcggcggtggctacggctggaggagccgggccgaggccgcggcggaggccgcggctggtactgggagggtggcagggagggacggggaaggaagatggcgacgtcgggggcgaacgggcctggttcggccacggcctcggcttccaatccgcgcaaatttagtgagaagattgcgctgcagaagcagcgtcaggccgaggagacggcggccttcgaggaggtgatgatggacatcggctccacccgggacaagctctgactctgcccttcatacaagtgtgatgaaccccagtccccaggatacctacccaggccccacacctcccagcatcctgcccagccgacgtgggggtattctggatggtgaaatggaccccaaagtacctgctattgaggagaacttgctagatgacaagcatttgctgaagccatgggatgctaagaagctatcctcatcctcttcccgacctcggtcctgtgaagtccctggaattaacatctttccatctcctgaccagcctgccaatgtgcctgtcctcccacctgccatgaacacggggggctccctacctgacctcaccaacctgcactttcccccaccactgcccacccccctggaccctgaagagacagcctaccctagcctgagtgggggcaacagtacctccaatttgacccacaccatgactcacctgggcatcagcaggggcatgggcctgggcccaggctatgatgcaccaggacttcattcacctctcagccacccatccctgcagtcctccctaagcaatcccaacctccaggcttccctgagcagtcctcagccccagcttcagggctcccacagccacccctctctgcctgcctcctccttggcccgccatgtactgcccaccacctccctgggccacccctcactcagtgctccggctctctcctcctcctcttcctcctcctccacttcatctcctgttttgggcgccccctcttaccctgcttctacccctggggcctccccccaccaccgccgtgtgcccctcagccccctgagtttgctcgcgggcccagccgacgccagaaggtcccaacagcagctgcccaaacagttttcgccaacaatgtcacccaccttgtcttccatcactcagggcgtccccctggataccagtaaactgtccactgaccagcggttacccccatacccatacagctccccaagtctggttctgcctacccagccccacaccccaaagtctctacagcagccagggctgccctctcagtcttgttcagtgcagtcctcaggtgggcagcccccaggcaggcagtctcattatgggacaccgtacccacctgggcccagtgggcatgggcaacagtcttaccaccggccaatgagtgacttcaacctggggaatctggagcagttcagcatggagagcccatcagccagcctggtgctggatccccctggcttttctgaagggcctggatttttagggggtgaggggccaatgggtggcccccaggatccccacaccttcaaccaccagaacttgacccactgttcccgccatggctcagggcctaacatcatcctcacaggggactcctctccaggtttctctaaggagattgcagcagccctggccggagtgcctggctttgaggtgtcagcagctggattggagctagggcttgggctagaagatgagctgcgcatggagccactgggcctggaagggctaaacatgctgagtgacccctgtgccctgctgcctgatcctgctgtggaggagtcattccgcagtgaccggctccaatgagggcacctcatcaccatccctcttcttggccccatcccccaccaccattcctttcctcccttccccctggcaggtagagactctactctctgtccccagatcctctttctagcatgaatgaaggatgccaagaatgagaaaaagcaaggggtttgtccaggtggcccctgaattctgcgcaagggatgggcctgggggaactcaagggagggcctaaagcacttgtaactttgaaccgtctgtctggaggtcagagcctgttggaaagcaggggtagaggggagccctggaagcagggcttttccggatgcctaggggtgggcagtgccagcccctcctcaccactcttccccttgcagtggaggagagagccagagtggatactattttttattaaatatattattatatgttaataaaaaaatcatatcaaacccttg

SEQ ID NO: 122637 - DNA, 1635 bp, Homo sapiens
  Payload ID: 4026
  Gene Symbol: CRTC2
  Gene Name: CREB regulated transcription coactivator 2
  ENST ID: ENST00000368630
  CDS Start-End: 80-1201
gctggaggagccgggccgaggccgcggcggaggccgcggctggtactgggagggtggcagggagggacggggaaggaagatggcgacgtcgggggcgaacgggcctggttcggccacggcctcggcttccaatccgcgcaaatttagtgagaagattgcgctgcagaagcagcgtcaggcttccctgagcagtcctcagccccagcttcagggctcccacagccacccctctctgcctgcctcctccttggcccgccatgtactgcccaccacctccctgggccacccctcactcagtgctccggctctctcctcctcctcttcctcctcctccacttcatctcctgttttgggcgccccctcttaccctgcttctacccctggggcctccccccaccaccgccgtgtgcccctcagccccctgagtttgctcgcgggcccagccgacgccagaaggtcccaacagcagctgcccaaacagttttcgccaacaatgtcacccaccttgtcttccatcactcagggcgtccccctggataccagtaaactgtccactgaccagcggttacccccatacccatacagctccccaagtctggttctgcctacccagccccacaccccaaagtctctacagcagccagggctgccctctcagtcttgttcagtgcagtcctcaggtgggcagcccccaggcaggcagtctcattatgggacaccgtacccacctgggcccagtgggcatgggcaacagtcttaccaccggccaatgagtgacttcaacctggggaatctggagcagttcagcatggagagcccatcagccagcctggtgctggatccccctggcttttctgaagggcctggatttttagggggtgaggggccaatgggtggcccccaggatccccacaccttcaaccaccagaacttgacccactgttcccgccatggctcagggcctaacatcatcctcacaggggactcctctccaggtttctctaaggagattgcagcagccctggccggagtgcctggctttgaggtgtcagcagctggattggagctagggcttgggctagaagatgagctgcgcatggagccactgggcctggaagggctaaacatgctgagtgacccctgtgccctgctgcctgatcctgctgtggaggagtcattccgcagtgaccggctccaatgagggcacctcatcaccatccctcttcttggccccatcccccaccaccattcctttcctcccttccccctggcaggtagagactctactctctgtccccagatcctctttctagcatgaatgaaggatgccaagaatgagaaaaagcaaggggtttgtccaggtggcccctgaattctgcgcaagggatgggcctgggggaactcaagggagggcctaaagcacttgtaactttgaaccgtctgtctggaggtcagagcctgttggaaagcaggggtagaggggagccctggaagcagggcttttccggatgcctaggggtgggcagtgccagcccctcctcaccactcttccccttgcagtggaggagagagccagagtggatactattttttattaaatatattattatatgttaataaaaaaatcatatcaaa

SEQ ID NO: 122638 - DNA, 2644 bp, Homo sapiens
  Payload ID: 4026
  Gene Symbol: CRTC2
  Gene Name: CREB regulated transcription coactivator 2
  Uniprot ID: Q53ET0
  ENST ID: ENST00000368633
  CDS Start-End: 129-2210
ctaggctggggccgggttcgcggtgctcgctgaggcggcggtggctacggctggaggagccgggccgaggccgcggcggaggccgcggctggtactgggagggtggcagggagggacggggaaggaagatggcgacgtcgggggcgaacgggcctggttcggccacggcctcggcttccaatccgcgcaaatttagtgagaagattgcgctgcagaagcagcgtcaggccgaggagacggcggccttcgaggaggtgatgatggacatcggctccacccggttacaggcccaaaaactgcgactggcatacacaaggagctctcattatggtgggtctctgcccaatgttaaccagattggctctggcctggccgagttccagagccccctccactcacctttggattcatctcggagcactcggcaccatgggctggtggaacgggtgcagcgagatcctcgaagaatggtgtccccacttcgccgatacacccgccacattgacagctctccctatagtcctgcctacttatctcctcccccagagtctagctggcgaaggacgatggcctggggcaatttccctgcagagaaggggcagttgtttcgactaccatctgcacttaacaggacaagctctgactctgcccttcatacaagtgtgatgaaccccagtccccaggatacctacccaggccccacacctcccagcatcctgcccagccgacgtgggggtattctggatggtgaaatggaccccaaagtacctgctattgaggagaacttgctagatgacaagcatttgctgaagccatgggatgctaagaagctatcctcatcctcttcccgacctcggtcctgtgaagtccctggaattaacatctttccatctcctgaccagcctgccaatgtgcctgtcctcccacctgccatgaacacggggggctccctacctgacctcaccaacctgcactttcccccaccactgcccacccccctggaccctgaagagacagcctaccctagcctgagtgggggcaacagtacctccaatttgacccacaccatgactcacctgggcatcagcaggggcatgggcctgggcccaggctatgatgcaccaggacttcattcacctctcagccacccatccctgcagtcctccctaagcaatcccaacctccaggcttccctgagcagtcctcagccccagcttcagggctcccacagccacccctctctgcctgcctcctccttggcccgccatgtactgcccaccacctccctgggccacccctcactcagtgctccggctctctcctcctcctcttcctcctcctccacttcatctcctgttttgggcgccccctcttaccctgcttctacccctggggcctccccccaccaccgccgtgtgcccctcagccccctgagtttgctcgcgggcccagccgacgccagaaggtcccaacagcagctgcccaaacagttttcgccaacaatgtcacccaccttgtcttccatcactcagggcgtccccctggataccagtaaactgtccactgaccagcggttacccccatacccatacagctccccaagtctggttctgcctacccagccccacaccccaaagtctctacagcagccagggctgccctctcagtcttgttcagtgcagtcctcaggtgggcagcccccaggcaggcagtctcattatgggacaccgtacccacctgggcccagtgggcatgggcaacagtcttaccaccggccaatgagtgacttcaacctggggaatctggagcagttcagcatggagagcccatcagccagcctggtgctggatccccctggcttttctgaagggcctggatttttagggggtgaggggccaatgggtggcccccaggatccccacaccttcaaccaccagaacttgacccactgttcccgccatggctcagggcctaacatcatcctcacaggggactcctctccaggtttctctaaggagattgcagcagccctggccggagtgcctggctttgaggtgtcagcagctggattggagctagggcttgggctagaagatgagctgcgcatggagccactgggcctggaagggctaaacatgctgagtgacccctgtgccctgctgcctgatcctgctgtggaggagtcattccgcagtgaccggctccaatgagggcacctcatcaccatccctcttcttggccccatcccccaccaccattcctttcctcccttccccctggcaggtagagactctactctctgtccccagatcctctttctagcatgaatgaaggatgccaagaatgagaaaaagcaaggggtttgtccaggtggcccctgaattctgcgcaagggatgggcctgggggaactcaagggagggcctaaagcacttgtaactttgaaccgtctgtctggaggtcagagcctgttggaaagcaggggtagaggggagccctggaagcagggcttttccggatgcctaggggtgggcagtgccagcccctcctcaccactcttccccttgcagtggaggagagagccagagtggatactattttttattaaatatattattatatgttaataaaaaaatcatatcaaa

SEQ ID NO: 122639 - DNA, 2343 bp, Homo sapiens
  Payload ID: 4026
  Gene Symbol: CRTC2
  Gene Name: CREB regulated transcription coactivator 2
  ENST ID: ENST00000461638
  CDS Start-End: 1-1446
agccccctccactcacctttggattcatctcggagcactcggcaccatgggctggtggaacgggtgcagcgagatcctcgaagaatggtgtccccacttcgccgatacacccgccacattgacagctctccctatagtcctgcctacttatctcctcccccagagtctagctggcgaaggacgatggcctggggcaatttccctgcagagaaggggcagttgtttcgactaccatctgcacttaacaggacaagctctgactctgcccttcatacaagtgtgatgaaccccagtccccaggatacctacccaggccccacacctcccagcatcctgcccagccgacgtgggggtattctggatggtgaaatggaccccaaagtctttctctttcaagtacctgctattgaggagaacttgctagatgacaagcatttgctgaagccatgggatgctaagaagctatcctcatcctcttcccgacctcggtcctgtgaagtccctggaattaacatctttccatctcctgaccagcctgccaatgtgcctgtcctcccacctgccatgaacacggggggctccctacctgacctcaccaacctgcactttcccccaccactgcccacccccctggaccctgaagagacagcctaccctagcctgagtgggggcaacagtacctccaatttgacccacaccatgactcacctgggcatcagcaggggcatgggcctgggcccaggctatgatgcaccaggacttcattcacctctcagccacccatccctgcagtcctccctaagcaatcccaacctccaggcttccctgagcagtcctcagccccagcttcagggctcccacagccacccctctctgcctgcctcctccttggcccgccatgtactgcccaccacctccctgggccacccctcactcagtgctccggctctctcctcctcctcttcctcctcctccacttcatctcctgttttgggcgccccctcttaccctgcttctacccctggggcctccccccaccaccgccgtgtgcccctcagccccctgagtttgctcgcgggcccagccgacgccagaaggtcccaacagcagctgcccaaacagttttcgccaacaatgtcacccaccttgtcttccatcactcagggcgtccccctggataccagtaaactgtccactgaccagcggttacccccatacccatacagctccccaagtctggttctgcctacccagccccacaccccaaagtctctacagcagccagggctgccctctcagtcttgttcagtgcagtcctcaggtgggcagcccccaggcaggcagtctcattatgggacaccgtacccacctgggcccagtgggcatgggcaacagtcttaccaccggccaatgagtgacttcaacctggggaatcttgctctttgatgacttctgccttgacccgttctcttcctggcatgcacatgctctggcccagcagctggagcagttcagcatggagagcccatcagccagcctggtgctggatccccctggcttttctgaagggcctggatttttagggggtgaggggccaatgggtggcccccaggatccccacaccttcaaccaccagaacttgacccactgttcccgccatggctcagggcctaacatcatcctcacaggggactcctctccaggtttctctaaggagattgcagcagccctggccggagtgcctggctttgaggtgtcagcagctggattggagctagggcttgggctagaagatgagctgcgcatggagccactgggcctggaagggctaaacatgctgagtgacccctgtgccctgctgcctgatcctgctgtggaggagtcattccgcagtgaccggctccaatgagggcacctcatcaccatccctcttcttggccccatcccccaccaccattcctttcctcccttccccctggcaggtagagactctactctctgtccccagatcctctttctagcatgaatgaaggatgccaagaatgagaaaaagcaaggggtttgtccaggtggcccctgaattctgcgcaagggatgggcctgggggaactcaagggagggcctaaagcacttgtaactttgaaccgtctgtctggaggtcagagcctgttggaaagcaggggtagaggggagccctggaagcagggcttttccggatgcctaggggtgggcagtgccagcccctcctcaccactcttccccttgcagtggaggagagagccagagtggatactattttttattaaatatattattatatgttaataaaaaaatcatatcaaa

SEQ ID NO: 122640 - DNA, 2537 bp, Homo sapiens
  Payload ID: 4027
  Gene Symbol: CRTC3
  Gene Name: CREB regulated transcription coactivator 3
  Uniprot ID: Q6UUV7
  ENST ID: ENST00000268184
  CDS Start-End: 5-1864
cgccatggccgcctcgccgggctcgggcagcgccaacccgcggaagttcagtgagaagatcgcgctgcacacgcagagacaggccgaggagacgcgggccttcgagcagctcatgaccgacctcaccctgtcgcgggttcaatttcagaagcttcagcaactgcgccttacacagtaccatggaggatccttaccaaatgtgagccagctgcggagcagtgcgtcagagtttcagccgtcatttcaccaagctgataatgttcggggaacccgccatcacgggctggtggagaggccatccaggaaccgcttccaccccctccaccgaaggtctggggacaagccagggcgacaatttgatggtagtgcttttggagccaattattcctcacagcctctggatgagagttggccaaggcagcagcctccttggaaagacgaaaagcatcctgggttcaggctgacatctgcacttaacaggaccaattctgattctgctcttcacacgagtgctctgagtaccaagccccaggacccctatggaggagggggccagtcggcctggcctgccccatacatgggtttctgtgatggtgagaataatggacatggggaagtagcatctttccctggcccattgaaagaagagaatctgttaaatgttccgaagccactgccaaaacaactgtgggagaccaaggagattcagtccctgtcaggacgccctcgatcctgtgatgttggaggtggcaatgcttttccacataatggtcaaaacctaggcctctcacccttcttggggaccttgaacactggagggtcattgccagatctaaccaacctccactactcgacacccctgccagcctccctggacaccaccgaccaccactttggcagtatgagtgtggggaatagtgtgaacaacatcccagctgctatgacccacctgggtataagaagctcctctggtctccagagttctcggagtaacccctccatccaagccacgctcaataagactgtgctttcctcttccttaaataaccacccacagacatctgttcccaacgcatctgctcttcacccttcgctccgtctgttttcccttagcaacccatctctttccaccacaaacctgagcggcccgtctcggcgtcggcagcctcccgtcagccctctcacgctttctcctggccctgaagcacatcaaggtttcagcagacagctgtcttcaaccagcccactggccccatatcctacctcccagatggtgtcctcagaccgaagccaactttcctttctgcccacagaagctcaagcccaggtgtcgccgccacccccttaccctgcaccccaggagctcacccagcccctcctgcagcagccccgcgcccctgaggcccctgcccagcagccccaggcagcctcctcactgccacagtcagactttcagcttctcccggcccagggctcatctttgaccaacttcttcccagatgtgggttttgaccagcagtccatgaggccaggccctgcctttcctcaacaggtgcctctggtgcaacaaggttcccgagaactgcaggactcttttcatttgagaccaagcccgtattccaactgcgggagtctcccgaacaccatcctgccagaagactccagcaccagcctgttcaaagacctcaacagtgcgctggcaggcctgcctgaggtcagcctgaacgtggacactccatttccactggaagaggagctgcagattgaacccctgagcctggacggactcaacatgttaagtgactccagcatgggcctgctggacccctctgttgaagagacgtttcgagctgacagactgtgaacagaaggcagtggaacagaagaatgtttttctgcaacagccaaaatagaatggaatagaatgaagccagctgataccacgggctttcgttatcttgacatagaaggaagcaatgccacggctccagggtttcagatgagatcccatctcagacactgtggcttcctccagatcacacagctttgtactgcctctcccgcctgtggccaaagtcgtgttgcagcaggcaggctgcttggagcttcccatgaactggaaagctcacctccactgcatctttttactggccatccagtcagccgatgtgtaagagtaggaaatactgtgtcactggaggcctccgtagcattgtgtagtgtgctcagaaccactgatctccgtccgcaccgaaggcgggcccggagtgggaggctcggcctggggcggcggcaccggagagggcacctcgatgcctgctctgacctgacccagagggcgaggccctccagcgggggacattcccaggctgagtggaccccacggctctctcccacgcctggattacgacatgaagtttttaccacaagcccgagggcaggcttgagttaggcagactgaaggctaattttcattttctcccagctggtttctgctgcttcagaaaagtacaccttttccttatggaccagaggaa

SEQ ID NO: 122641 - DNA, 5209 bp, Homo sapiens
  Payload ID: 4027
  Gene Symbol: CRTC3
  Gene Name: CREB regulated transcription coactivator 3
  Uniprot ID: Q6UUV7
  ENST ID: ENST00000420329
  CDS Start-End: 148-2004
ctccggggccgcggcggctcctctgccgggtcgcgccggacgactggcttcgggcggcggccccggcggcctgtggacggacgggtgggccgaggtacaggccccacggccgccgtctcccgcttctgcccgcgcagagtccgcgccatggccgcctcgccgggctcgggcagcgccaacccgcggaagttcagtgagaagatcgcgctgcacacgcagagacaggccgaggagacgcgggccttcgagcagctcatgaccgacctcaccctgtcgcgggttcaatttcagaagcttcagcaactgcgccttacacagtaccatggaggatccttaccaaatgtgagccagctgcggagcagtgcgtcagagtttcagccgtcatttcaccaagctgataatgttcggggaacccgccatcacgggctggtggagaggccatccaggaaccgcttccaccccctccaccgaaggtctggggacaagccagggcgacaatttgatggtagtgcttttggagccaattattcctcacagcctctggatgagagttggccaaggcagcagcctccttggaaagacgaaaagcatcctgggttcaggctgacatctgcacttaacaggaccaattctgattctgctcttcacacgagtgctctgagtaccaagccccaggacccctatggaggagggggccagtcggcctggcctgccccatacatgggtttctgtgatggtgagaataatggacatggggaagtagcatctttccctggcccattgaaagaagagaatctgttaaatgttccgaagccactgccaaaacaactgtgggagaccaaggagattcagtccctgtcaggacgccctcgatcctgtgatgttggaggtggcaatgcttttccacataatggtcaaaacctaggcctctcacccttcttggggaccttgaacactggagggtcattgccagatctaaccaacctccactactcgacacccctgccagcctccctggacaccaccgaccaccactttggcagtatgagtgtggggaatagtgtgaacaacatcccagctgctatgacccacctgggtataagaagctcctctggtctccagagttctcggagtaacccctccatccaagccacgctcaataagactgtgctttcctcttccttaaataaccacccacagacatctgttcccaacgcatctgctcttcacccttcgctccgtctgttttcccttagcaacccatctctttccaccacaaacctgagcggcccgtctcggcgtcggcagcctcccgtcagccctctcacgctttctcctggccctgaagcacatcaaggtttcagcagacagctgtcttcaaccagcccactggccccatatcctacctcccagatggtgtcctcagaccgaagccaactttcctttctgcccacagaagctcaagcccaggtgtcgccgccacccccttaccctgcaccccaggagctcacccagcccctcctgcagcagccccgcgcccctgaggcccctgcccagcagccccaggcagcctcctcactgccacagtcagactttcagcttctcccggcccagggctcatctttgaccaacttcttcccagatgtgggttttgaccagcagtccatgaggccaggccctgcctttcctcaacaggtgcctctggtgcaacaaggttcccgagaactgcaggactcttttcatttgagaccaagcccgtattccaactgcgggagtctcccgaacaccatcctgccagactccagcaccagcctgttcaaagacctcaacagtgcgctggcaggcctgcctgaggtcagcctgaacgtggacactccatttccactggaagaggagctgcagattgaacccctgagcctggacggactcaacatgttaagtgactccagcatgggcctgctggacccctctgttgaagagacgtttcgagctgacagactgtgaacagaaggcagtggaacagaagaatgtttttctgcaacagccaaaatagaatggaatagaatgaagccagctgataccacgggctttcgttatcttgacatagaaggaagcaatgccacggctccagggtttcagatgagatcccatctcagacactgtggcttcctccagatcacacagctttgtactgcctctcccgcctgtggccaaagtcgtgttgcagcaggcaggctgcttggagcttcccatgaactggaaagctcacctccactgcatctttttactggccatccagtcagccgatgtgtaagagtaggaaatactgtgtcactggaggcctccgtagcattgtgtagtgtgctcagaaccactgatctccgtccgcaccgaaggcgggcccggagtgggaggctcggcctggggcggcggcaccggagagggcacctcgatgcctgctctgacctgacccagagggcgaggccctccagcgggggacattcccaggctgagtggaccccacggctctctcccacgcctggattacgacatgaagtttttaccacaagcccgagggcaggcttgagttaggcagactgaaggctaattttcattttctcccagctggtttctgctgcttcagaaaagtacaccttttccttatggaccagaggaagaggaagaccattttatcagtcactgaaaagagtcccctggcactgatgagcctgaagagaactgtgctcctcctcgggggctggggaaggaagacagggactgcaggtgtctcatactcagtggcctccagacaaactccagacaagcacagacctccccactaagagcagccagagggagctggtgaggccctaaccccacccaccgagcaactgagcttccccatccctccccagagctgtgtctctgtgggctgggagtctaatgtcacccccctagaccgtaagctccttgagggcagggacagtgccttatcattgttgaacccgtagcacctaacacgtgcgtggcagcacagtcgtgtgctggagtgagtgctgcagaaccgtgcgtgcagcgcatgatgaatgagtgcgtccgccatgccgtaaggcaggctcacctgtagctatccccttccctgccagatcttctcagagctttagcttttctagcactcgtgcctatggtgaagcatgcactttaatatgcttttaacactaggtgaccaaatcacagtgaagccgggcactgcattctccttgggctgtgctccacgcgggtgggtgggagctgtcttctgagtacatccggaagggctgagcaggtgagtgccctgagcatcctggctgggccccacccaggaagatcttccttctcagatccacgtttggctctaaattgcttcaagtagagattcattctttgaggttgaaaaaatagtttatagtaaaacgaaggcctaattcatggaagcatcattagtcatcaataccttctcataaaatagatgggccagatttccaccaccgcctgcctcctctaacttgggtgatgccagtaggtttgaagggggcagagcactgcagggggaggggggggtctaggctgtgagaggacagggtggagaggaggagaaccctgaaggagagacggaagatgccaggacctttgcttggacagccattgcccttccaggagaccctggagtgtactgagggttgctggactgttccacccagaggagcaaggctgtacaatgagggtctgaatctggcacacctgtcccttatgtaaaaggagtcgtggtcacaagaccctgggctggttagcctctcccgacctcattccatttctatcttctgaccttgcctctcatctttaaaataaccctcatggggtgcccctccaccttcctctggaatccaagtattcctgtttcacatttgccccaaatctttgctgtggaattgggaaatcaaaccagagtcctcctcgcctgatttccagctcaggaagggcctgctggcctgccctgttcccagttacactttcagatccctttgtgctcaagatctcagagggggtggctttttgttaaagagccttcagtcgcaatgctacccagcaccccatgtgccaaaagaaaccagctcctgtgtcaaagggcttccaaacctgatctcactctcaacaggcgatggtgctgatgtttcaagaattgtgtttttataaaacagaggtctcagcatagtcactcttcacatagtgccttacccatgggtatcgtcatatccgggtcccagttcagtttgtctgcacagcagccaccctgcctggcaacagagaccccaagacctacacagtgaaccctactgccccaaaggcgttctccaggtgacttgtgaaaacagacctccggggaagtgatttattgggggtgtacactgggggcaatatggtttagcactgaattcaatttgtccttaggtctatgagtgagtccgatcttttcttgtgaaaggttttgggcatcgtacaacccactctgcctagaaggtgtggaggactcaccacgggcagggtcgccctggcccacagcacgtgagcctgcactcactgcggcctttgtaacaaaaccagttgtggtcctcagcatttgaagcagctgcatacttcagagtaaactatttttcattatttagttttgtcacaagaaatcgaccattgtactactctcacttacagcagttaaacagcatagaactaaaaacctgtctgcatttccattttttctttctgtatggttgtgggttttaggacatagggggttaggagaaggggtttcttgatcatgtcatgaattctcctttgtcctgtttctcctgtttcatttctcctccgcctgctgtatattacctgagctggtgttgtatcttcaagtccatatgcgtatttgcagacctttcctgttcccactcttgttggctcttctgatttatgcacagatggttcccagcatgtgtccagtgcttcatggatgggaccatcccagcaactaatcagacttcctgccagtgtcctaacccccagggcaccctgttcaaccatatttaaaaattggaatttgtataaagttgcttccaagttttataatgcatcattttacatcttttgtaattaaaagcatcacaatgaggttgtctctgca

SEQ ID NO: 122642 - DNA, 1421 bp, Homo sapiens
  Payload ID: 4027
  Gene Symbol: CRTC3
  Gene Name: CREB regulated transcription coactivator 3
  ENST ID: ENST00000560098
  CDS Start-End: 105-380
ctggcttcgggcggcggccccggcggcctgtggacggacgggtgggccgaggtacaggccccacggccgccgtctcccgcttctgcccgcgcagagtccgcgccatggccgcctcgccgggctcgggcagcgccaacccgcggaagttcagtgagaagatcgcgctgcacacgcagagacaggccgaggagacgcgggccttcgagcagctcatgaccgacctcaccctgtcgcgggttcaatttcagaagcttcagcaactgcgccttacacagtaccatggaggatccttaccaaatgtgagccagctgcggagcagtgcgtcagagtttcaggttgagaggaacagcagtccctgtgttgatggattgaggcagtaactcgaggaggaagattttcctgcacagaactgcagaggcttggggagagagagaacacactgggatgactctgagatcctaacatgagtgtcttggtggacggtggcctcactaaatgagatggactataagaagaggaacagattaaggggacagtgattggttggatttttggtagaatttgagctgtcttgggtacttttggcagagaacttgagtaggcagttggaagtatgcacttggagttcacaaaagaactgttgggagctggaggtgtcgatttatgagttactggactgtgggtgacagtggggccgagggaaggatgcgattggccaaggcgagcatggaggacaggggctctctaccaggaagacgggcactggccctgaggctcttaggaagcgcctcctaaagctcctgtgcccggaggctcccgccaccccctccacctgctcacactctgcctggtgcccagggatcctgagagcatcctttgcctctcagagcaatgcaggcaggtgtggcctgaggctgcgaggccacaggaccccagggaacatcaggacggaaggcaaaggggcggaaaggagtgcacagagggataagaaaagatccatgtgagtgtggggatttttttttttaactttaatttttgtttccatccattgcagccacctcttctttgtttatctttttcatcatccctcctccctgccttccttttttaatgtggaaatcttccttgagccaaaggcttcactaagcttaactaaggaagcaatggaggaggcgctgatgtggttgttaaaagccctgtgacctgtgctgcccttccgctggcacgctggcacctggcagggatgccagaaatgtttcttgagtaaatggtaaattcaagtttataaataagagtgtttcctttgtctcgaggttgttacttagggcatgtcagtgttgtggagtagtttaaagccacctgaatgaagttttctgaagttttccaaagaacaaataaacttcttctagattttccttgca

SEQ ID NO: 122643 - DNA, 570 bp, Homo sapiens
  Payload ID: 4027
  Gene Symbol: CRTC3
  Gene Name: CREB regulated transcription coactivator 3
  ENST ID: ENST00000558005
  CDS Start-End: 1-570
ccaccccctccaccgaaggtctggggacaagccagggcgacaatttgatggtagtgcttttggagccaattattcctcacagcctctggatgagagttggccaaggcagcagcctccttggaaagacgaaaagcatcctgggttcaggctgacatctgcacttaacaggaccaattctgattctgctcttcacacgagtgctctgagtaccaagccccaggacccctatggaggagggggccagtcggcctggcctgccccatacatggtagcatctttccctggcccattgaaagaagagaatctgttaaatgttccgaagccactgccaaaacaactgtgggagaccaaggagattcagtccctgtcaggacgccctcgatcctgtgatgttggaggtggcaatgcttttccacataatggtcaaaacctaggcctctcacccttcttggggaccttgaacactggagggtcattgccagatctaaccaacctccactactcgacacccctgccagcctccctggacaccaccgaccaccactttggcagtatgagtgtggggaatag

SEQ ID NO: 122644 - DNA, 1431 bp, Homo sapiens
  Payload ID: 4028
  Gene Symbol: CREBZF
  Gene Name: CREB/ATF bZIP transcription factor
  ENST ID: ENST00000260058
  CDS Start-End: 1-855
gtgcgcgcgccctcccccgaggagatggaggaggaggcgatcgccagcctcccgggggaagagacggaggatatggactttctgtctgggctggaactggcggatctcctggaccccaggcaaccggactggcacctggaccccgggcttagctcgccggggcctctctcctcgtctggcggaggctcggatagcggcggcctgtggagaggggacgatgacgatgaggccgcggctgctgaaatgcagcgcttctctgacctgctgcaaaggctgttaaacggtatcggaggctgcagcagcagcagtgacagtggcagcgccgaaaagaggcggagaaagtccccaggaggaggcggcggtggcggcagcggtaacgacaacaaccaggcggcgacaaagagtccccggaaggcggcggcggccgctgcccgccttaatcgactgaagaagaaggagtacgtgatggggctggagagtcgagtccggggtctggcagccgagaaccaggagctgcgggccgagaatcgggagctgggcaaacgcgtacaggcactgcaggaggagagtcgctacctacgggcagtcttagccaacgagactggactggctcgcttgctgagccggctgagcggcgtgggactgcggctgaccacctcgctcttcagagactcgcccgccggtgaccacgactacgctctgccggtgggaaagcagaagcaggacctgctggaagaggacgactcggcgggaggagtctgtctccatgtggacaaggataaggtgtcggtggagttctgctcggcgtgcgcccggaaggcgtcgtcttctcttaaaattttcttttttaggtgatttccttcctgccaggctccgttgtaggggttacagaacagtcgttcccgcctcacaacctgtggatacagctgttggggcagaagagacgggaccagctgctggccacatttcctgctttattttaaaagcttagcagtgtctgcaaaaacgaatcttttcctacaacctgttaactgactggactgttggtaacaaagtaattgtgagaaccatgtcggtcaaaaatttggcatctgctgaaaaaaatgaatgccattttcaagttcccaaattacttctatactgatttcactttccagaaatggagatatgaaaagattctctggaatccttgaaagacttaatagagatacatgagactaagttaatcttggaacaaaattatactttttttgtctttcatgggagtgatactcagttattgcatatctttacaaaattgtaacctttggagaattacagtatttcatcaagaaattagagtttttacataatcaagagcatattctatggaattaacatttagtggactagaattacataagcaggccatcagtgatcacaaggcatatg

SEQ ID NO: 122645 - DNA, 898 bp, Homo sapiens
  Payload ID: 4028
  Gene Symbol: CREBZF
  Gene Name: CREB/ATF bZIP transcription factor
  ENST ID: ENST00000527529
  CDS Start-End: 1-391
gatggggctggagagtcgagtccggggtctggcagccgagaaccaggagctgcgggccgagaatcgggagctgggcaaacgcgtacaggcactgcaggaggagagtcgctacctacgggcagtcttagccaacgagactggactggctcgcttgctgagccggctgagcggcgtgggactgcggctgaccacctcgctcttcagagactcgcccgccggtgaccacgactacgctctgccggtgggaaagcagaagcaggacctgctggaagaggacgactcggcgggaggagtctgtctccatgtggacaaggataaggtgtcggtggagttctgctcggcgtgcgcccggaaggcgtcgtcttctcttaaaattttcttttttaggtgatttccttcctgccaggctccgttgtaggggttacagaacagtcgttcccgcctcacaacctgtggatacagctgttggggcagaagagacgggaccagctgctggccacatttcctgctttattttaaaagttatgggctcaaagaatttattcatctctaacatgatattggaaaataatggatgaaaataggaaaaatgattgttaatgctgactgtgggtcttaaaaggttctggaaagcacttagcagtgtctgcaaaaacgaatcttttcctacaacctgttaactgactggactgttggtaacaaagtaattgtgagaaccatgtcggtcaaaaatttggcatctgctgaaaaaaatgaatgccattttcaagttcccaaattacttctatactgatttcactttccagaaatggagatatgaaaagattctctggaatccttgaaagacttaatagagatacatgagactaagttaatcttggaacaaaattatactttt

SEQ ID NO: 122646 - DNA, 4037 bp, Homo sapiens
  Payload ID: 4028
  Gene Symbol: CREBZF
  Gene Name: CREB/ATF bZIP transcription factor
  Uniprot ID: Q9NS37
  ENST ID: ENST00000527447
  CDS Start-End: 228-1292
ggcgcggtcgagtcatcgcagggcctcaccgcttcgttctcccgtccctccccgcgccttggcgcggggggtcgactagccaagtgaggcgggaggcgactcggacctttccctgcatttcgtttcggccagtgccgggggctacccgccctggggcctgggatccttggggcccgtgaggcccactcttagcggccggggcctaccgcggcccgccgctggccctcatgaggcatagcctgaccaagctgctggcagcctcgggcagcaactccccaacccgcagtgagagcccggagccggctgcaacttgttcgctgccctctgacctgacccgggctgcagcgggggaggaggagacggcggcggccggatctcccggccgcaagcagcagtttggcgacgaaggagagttggaagccgggagggggagccgcggcggcgtggccgtgcgcgcgccctcccccgaggagatggaggaggaggcgatcgccagcctcccgggggaagagacggaggatatggactttctgtctgggctggaactggcggatctcctggaccccaggcaaccggactggcacctggaccccgggcttagctcgccggggcctctctcctcgtctggcggaggctcggatagcggcggcctgtggagaggggacgatgacgatgaggccgcggctgctgaaatgcagcgcttctctgacctgctgcaaaggctgttaaacggtatcggaggctgcagcagcagcagtgacagtggcagcgccgaaaagaggcggagaaagtccccaggaggaggcggcggtggcggcagcggtaacgacaacaaccaggcggcgacaaagagtccccggaaggcggcggcggccgctgcccgccttaatcgactgaagaagaaggagtacgtgatggggctggagagtcgagtccggggtctggcagccgagaaccaggagctgcgggccgagaatcgggagctgggcaaacgcgtacaggcactgcaggaggagagtcgctacctacgggcagtcttagccaacgagactggactggctcgcttgctgagccggctgagcggcgtgggactgcggctgaccacctcgctcttcagagactcgcccgccggtgaccacgactacgctctgccggtgggaaagcagaagcaggacctgctggaagaggacgactcggcgggaggagtctgtctccatgtggacaaggataaggtgtcggtggagttctgctcggcgtgcgcccggaaggcgtcgtcttctcttaaaatgtagggtcaagtaatctgctctttatccgcgtttacccctttcaactcccttacaccatgtcaaacttaccttagtgggacatcttcaccggacacatttcagaggagagaaaaaaagtaatattgaatcttaaagtgtttagctaaaagcatgaatgtgacacagtaaccaactcctaatgataacatgtgactattaaatctctctgacagtttcttttttaggtgatttccttcctgccaggctccgttgtaggggttacagaacagtcgttcccgcctcacaacctggtaaggatccatctcttcccgtaacgctcatgctctgctgctttgtctactttaatgggcaacatctcagtttgtgtgtgtgtgatttttttttttttttctgttttggaaggtgggagggaaatctaatttgggccctgtccaccctggaaacagacttgtgctggtcaagaatgtatttaagatgcctcttctggttgaaatagctattaatgtgtccccttattcagacttgcgtgtacctagctcttctgtccccagtgtggacatggccttggatgacatcggttccaactgtacactgaaacctgcttatagagagacagtttggagacagtgaaacaggtgaagttgaatggaagttccgagttgtacaaggtgcaaattggaattccgattttagggcaacttttcagaggttgacagttaagtatttggggcatgcacaaatgtgatagttattttgctggaggtgacaggtatctcttaaatatcaacaatgccttttagttttcagtatgagatatagaaacagtctataatggagtaacattttaatgtctcaccattagagaagttggaaattaacatacatatgagactcctgcgttttagttaattggagaataagaatggctaatgtttctttgaggaccagcagtgattaccctatcactgagattgaataaattgttgaacatctttatttttgttgtattaaaattttaggttaaatttatatatgtatgattagatattgaaggttgtgaaatgtgaatgaaaacgtgtaaagtgaggcttcacaaagaatcttattctctgtgtttcaaaagtatttgtcctattttaaaataattttttaaattgagtggttctggccacttaaatgacacgattggtactattttcctaaggtgggatttattcccttgaatctattaaccagttgtataaattgaattatggtgtccttcagtgtaagaggcattaagaaattctttgtgaaacatcactgcttgataaagtatatacgtatttagcatccttgtttttctttgtgctaaagtggatacagctgttggggcagaagagacgggaccagctgctggccacatttcctgctttattttaaaaggtagtataagaaatgaggaaaaagaggtaatatcagggcttctgctgttttttatttttaacatgttcataattaaaaagtattttccagcagtccaaagatgtaagttatcttacacataaaatgttttattttgttatttggttatgaaaatggaatccttgttcttgcacaactgtaaatgttttgttgctagataatacgatttgagacctgaattggtctttggtttccagtgcatcacagcatattttgtaaaatcatctactactgcacttgagcatgaatgggtagtagccaaactcacaaattggagtgatgaacctgcttatacctaagggcaggagcaagcccctcacaatgcagctgcatgggtttttagtgcctactgaattatatatatatatacatatatatatatatatataaaccaaaagtagttggaaagattatttgaaatgactaatttgtgctatctttatgaaatatgttaaatgtagcttttttgaaacagaagccttgaattgaaatttaactaatacttgaacattttgtatatatttctttgtatataattttgtgcagtaccaatgacaaaaatatggtgtcataataaaaccaggtttgttgatcttttagttatgggctcaaagaatttattcatctctaacatgatattggaaaataatggatgaaaataggaaaaatgattgttaatgctgactgtgggtcttaaaaggttctggaaagcagtaagttcatttttctaaaaactataacattctgttggagtattttcttccttacgtcaatacttttcctgcattatttgaaattgtgggctggggagaaacagtagtcaaagctttctgaattgagatactttgaaattccaagtgtagatttttagaatgtcattttataaatggcagtttttggaattacttgataagaacttttgaaaatggaaggattagtatggcctatttttaaagctgctttgttaggttccttatgttttattaactgtcttttctcagtttccatttcatttttttttttctagttttggtgacttagtgattttgtcattttttacatcaacttcatggtcttgtttttacatggtaattgcatgtacttaggatctatctaataggggctttaaataaatttggtcatatttatgtgtaagcacattttactgtaaatgtttgggtttctgaatttaaacagatctgtttatttcagtatgtagtaaacaatatcttaaagtgtccgattcactacttgttaattaaaaaagttatgattaatgtgaaa

SEQ ID NO: 122647 - DNA, 4329 bp, Homo sapiens
  Payload ID: 4028
  Gene Symbol: CREBZF
  Gene Name: CREB/ATF bZIP transcription factor
  Uniprot ID: Q9NS37
  ENST ID: ENST00000490820
  CDS Start-End: 228-1292
ggcgcggtcgagtcatcgcagggcctcaccgcttcgttctcccgtccctccccgcgccttggcgcggggggtcgactagccaagtgaggcgggaggcgactcggacctttccctgcatttcgtttcggccagtgccgggggctacccgccctggggcctgggatccttggggcccgtgaggcccactcttagcggccggggcctaccgcggcccgccgctggccctcatgaggcatagcctgaccaagctgctggcagcctcgggcagcaactccccaacccgcagtgagagcccggagccggctgcaacttgttcgctgccctctgacctgacccgggctgcagcgggggaggaggagacggcggcggccggatctcccggccgcaagcagcagtttggcgacgaaggagagttggaagccgggagggggagccgcggcggcgtggccgtgcgcgcgccctcccccgaggagatggaggaggaggcgatcgccagcctcccgggggaagagacggaggatatggactttctgtctgggctggaactggcggatctcctggaccccaggcaaccggactggcacctggaccccgggcttagctcgccggggcctctctcctcgtctggcggaggctcggatagcggcggcctgtggagaggggacgatgacgatgaggccgcggctgctgaaatgcagcgcttctctgacctgctgcaaaggctgttaaacggtatcggaggctgcagcagcagcagtgacagtggcagcgccgaaaagaggcggagaaagtccccaggaggaggcggcggtggcggcagcggtaacgacaacaaccaggcggcgacaaagagtccccggaaggcggcggcggccgctgcccgccttaatcgactgaagaagaaggagtacgtgatggggctggagagtcgagtccggggtctggcagccgagaaccaggagctgcgggccgagaatcgggagctgggcaaacgcgtacaggcactgcaggaggagagtcgctacctacgggcagtcttagccaacgagactggactggctcgcttgctgagccggctgagcggcgtgggactgcggctgaccacctcgctcttcagagactcgcccgccggtgaccacgactacgctctgccggtgggaaagcagaagcaggacctgctggaagaggacgactcggcgggaggagtctgtctccatgtggacaaggataaggtgtcggtggagttctgctcggcgtgcgcccggaaggcgtcgtcttctcttaaaatgtagggtcaagtaatctgctctttatccgcgtttacccctttcaactcccttacaccatgtcaaacttaccttagtgggacatcttcaccggacacatttcagaggagagaaaaaaagtaatattgaatcttaaagtgtttagctaaaagcatgaatgtgacacagtaaccaactcctaatgataacatgtgactattaaatctctctgacagtttcttttttaggtgatttccttcctgccaggctccgttgtaggggttacagaacagtcgttcccgcctcacaacctgtggatacagctgttggggcagaagagacgggaccagctgctggccacatttcctgctttattttaaaaggtagtataagaaatgaggaaaaagaggtaatatcagggcttctgctgttttttatttttaacatgttcataattaaaaagtattttccagcagtccaaagatgtaagttatcttacacataaaatgttttattttgttatttggttatgaaaatggaatccttgttcttgcacaactgtaaatgttttgttgctagataatacgatttgagacctgaattggtctttggtttccagtgcatcacagcatattttgtaaaatcatctactactgcacttgagcatgaatgggtagtagccaaactcacaaattggagtgatgaacctgcttatacctaagggcaggagcaagcccctcacaatgcagctgcatgggtttttagtgcctactgaattatatatatatatacatatatatatatatatataaaccaaaagtagttggaaagattatttgaaatgactaatttgtgctatctttatgaaatatgttaaatgtagcttttttgaaacagaagccttgaattgaaatttaactaatacttgaacattttgtatatatttctttgtatataattttgtgcagtaccaatgacaaaaatatggtgtcataataaaaccaggtttgttgatcttttagttatgggctcaaagaatttattcatctctaacatgatattggaaaataatggatgaaaataggaaaaatgattgttaatgctgactgtgggtcttaaaaggttctggaaagcagtaagttcatttttctaaaaactataacattctgttggagtattttcttccttacgtcaatacttttcctgcattatttgaaattgtgggctggggagaaacagtagtcaaagctttctgaattgagatactttgaaattccaagtgtagatttttagaatgtcattttataaatggcagtttttggaattacttgataagaacttttgaaaatggaaggattagtatggcctatttttaaagctgctttgttaggttccttatgttttattaactgtcttttctcagtttccatttcatttttttttttctagttttggtgacttagtgattttgtcattttttacatcaacttcatggtcttgtttttacatggtaattgcatgtacttaggatctatctaataggggctttaaataaatttggtcatatttatgtgtaagcacattttactgtaaatgtttgggtttctgaatttaaacagatctgtttatttcagtatgtagtaaacaatatcttaaagtgtccgattcactacttgttaattaaaaaagttatgattaatgtgaaactgttgtcttactatttttagaaaattgtgttctggatgattagcacatggataaaggagatttctggaatataaaatggattgtttttgaaatttctaggtttggctctatttactgtaatggttgaaaacaatttagtatttgggtgacccttttgtttttcttctaaatgtgcctctggtaaaatacagaactagactaaagatgtagctttttaatatttgtcttttgatggtggcaggagttcatacattaattgaactaacacatcatattttgacctactatttctatcatattgacttactgtttctgcacttctttgaccagacttatcttaaaaagtccacttttgttaaaatgtagtcacacctctgatataatccaacaagaagtgttcaaaatattttaaatatttgtgcattttataatcactaaattaatctctctctcttctctttgaacagcttagcagtgtctgcaaaaacgaatcttttcctacaacctgttaactgactggactgttggtaacaaagtaattgtgagaaccatgtcggtcaaaaatttggcatctgctgaaaaaaatgaatgccattttcaagttcccaaattacttctatactgatttcactttccagaaatggagatatgaaaagattctctggaatccttgaaagacttaatagagatacatgagactaagttaatcttggaacaaaattatactttttttgtctttcatgggagtgatactcagttattgcatatctttacaaaattgtaacctttggagaattacagtatttcatcaagaaattagagtttttacataatcaagagcatattctatggaattaacatttagtggactagaattacataagcaggccatcagtgatcacaaggcatatgagtttgtatttatttcctggaacatgagagctaatttggagtacagacagacaccctgctgagtagaatataaaagttaatgtaaagttctgaactataaagagtagtccttttaaatagatgcattgatttgtatatctttgaaaaagttgattatgattaaatgtgtgggtagttaattacaatttagggtaacaaccaggatgtatggattcttgaggttttggcttcttgagctttctcttgagtacttgatactgttttctgaatattttgaggtttctaattaatggtatgctagtttctactgttttatataaaaatttatctagtgttgtataaggactttagtattgtggatgatgggagtggctttttgtggcatatggttgttttaattgaaatattttttcagtttattacaagtgtgaaaaaacactcaaaa

SEQ ID NO: 122648 - DNA, 2850 bp, Homo sapiens
  Payload ID: 4028
  Gene Symbol: CREBZF
  Gene Name: CREB/ATF bZIP transcription factor
  ENST ID: ENST00000525639
  CDS Start-End: 228-1304
ggcgcggtcgagtcatcgcagggcctcaccgcttcgttctcccgtccctccccgcgccttggcgcggggggtcgactagccaagtgaggcgggaggcgactcggacctttccctgcatttcgtttcggccagtgccgggggctacccgccctggggcctgggatccttggggcccgtgaggcccactcttagcggccggggcctaccgcggcccgccgctggccctcatgaggcatagcctgaccaagctgctggcagcctcgggcagcaactccccaacccgcagtgagagcccggagccggctgcaacttgttcgctgccctctgacctgacccgggctgcagcgggggaggaggagacggcggcggccggatctcccggccgcaagcagcagtttggcgacgaaggagagttggaagccgggagggggagccgcggcggcgtggccgtgcgcgcgccctcccccgaggagatggaggaggaggcgatcgccagcctcccgggggaagagacggaggatatggactttctgtctgggctggaactggcggatctcctggaccccaggcaaccggactggcacctggaccccgggcttagctcgccggggcctctctcctcgtctggcggaggctcggatagcggcggcctgtggagaggggacgatgacgatgaggccgcggctgctgaaatgcagcgcttctctgacctgctgcaaaggctgttaaacggtatcggaggctgcagcagcagcagtgacagtggcagcgccgaaaagaggcggagaaagtccccaggaggaggcggcggtggcggcagcggtaacgacaacaaccaggcggcgacaaagagtccccggaaggcggcggcggccgctgcccgccttaatcgactgaagaagaaggagtacgtgatggggctggagagtcgagtccggggtctggcagccgagaaccaggagctgcgggccgagaatcgggagctgggcaaacgcgtacaggcactgcaggaggagagtcgctacctacgggcagtcttagccaacgagactggactggctcgcttgctgagccggctgagcggcgtgggactgcggctgaccacctcgctcttcagagactcgcccgccggtgaccacgactacgctctgccggtgggaaagcagaagcaggacctgctggaagaggacgactcggcgggaggagtctgtctccatgtggacaaggataaggtgtcggtggagttctgctcggcgtgcgcccggaaggcgtcgtcttctcttaaaattttcttttttaggtgatttccttcctgccaggctccgttgtaggggttacagaacagtcgttcccgcctcacaacctgtggatacagctgttggggcagaagagacgggaccagctgctggccacatttcctgctttattttaaaagttatgggctcaaagaatttattcatctctaacatgatattggaaaataatggatgaaaataggaaaaatgattgttaatgctgactgtgggtcttaaaaggttctggaaagcagtaagttcatttttctaaaaactataacattctgttggagtattttcttccttacgtcaatacttttcctgcattatttgaaattgtgggctggggagaaacagtagtcaaagctttctgaattgagatactttgaaattccaagtgtagatttttagaatgtcattttataaatggcagtttttggaattacttgataagaacttttgaaaatggaaggattagtatggcctatttttaaagctgctttgttaggttccttatgttttattaactgtcttttctcagtttccatttcatttttttttttctagttttggtgacttagtgattttgtcattttttacatcaacttcatggtcttgtttttacatggtaattgcatgtacttaggatctatctaataggggctttaaataaatttggtcatatttatgtgtaagcacattttactgtaaatgtttgggtttctgaatttaaacagatctgtttatttcagtatgtagtaaacaatatcttaaagtgtccgattcactacttgttaattaaaaaagttatgattaatgtgaaactgttgtcttactatttttagaaaattgtgttctggatgattagcacatggataaaggagatttctggaatataaaatggattgtttttgaaatttctaggtttggctctatttactgtaatggttgaaaacaatttagtatttgggtgacccttttgtttttcttctaaatgtgcctctggtaaaatacagaactagactaaagatgtagctttttaatatttgtcttttgatggtggcaggagttcatacattaattgaactaacacatcatattttgacctactatttctatcatattgacttactgtttctgcacttctttgaccagacttatcttaaaaagtccacttttgttaaaatgtagtcacacctctgatataatccaacaagaagtgttcaaaatattttaaatatttgtgcattttataatcactaaattaatctctctctcttctctttgaacagcttagcagtgtctgcaaaaacgaatcttttcctacaacctgttaactgactggactgttggtaacaaagtaattgtgagaaccatgtcggtcaaaaatttggcatctgctgaaaaaaatgaatgccattttcaagttcccaaattacttctatactgatttcactttccagaaatggagatatgaaaagattctctggaatccttgaaagacttaatagagatacatgagactaagttaatcttggaacaaaattatactttt

SEQ ID NO: 122649 - DNA, 545 bp, Homo sapiens
  Payload ID: 4028
  Gene Symbol: CREBZF
  Gene Name: CREB/ATF bZIP transcription factor
  ENST ID: ENST00000534224
  CDS Start-End: 1-204
atgcgtgccgaccctccagcctctctaccgctcctcctccctcccacaaccttttcttttttaggtgatttccttcctgccaggctccgttgtaggggttacagaacagtcgttcccgcctcacaacctgtggatacagctgttggggcagaagagacgggaccagctgctggccacatttcctgctttattttaaaagcttagcagtgtctgcaaaaacgaatcttttcctacaacctgttaactgactggactgttggtaacaaagtaattgtgagaaccatgtcggtcaaaaatttggcatctgctgaaaaaaatgaatgccattttcaagttcccaaattacttctatactgatttcactttccagaaatggagatatgaaaagattctctggaatccttgaaagacttaatagagatacatgagactaagttaatcttggaacaaaattatactttttttgtctttcatgggagtgatactcagttattgcatatctttacaaaattgtaacctttggagaattacagtatttcatcaag

SEQ ID NO: 122650 - DNA, 7778 bp, Homo sapiens
  Payload ID: 4029
  Gene Symbol: CREBRF
  Gene Name: CREB3 regulatory factor
  Uniprot ID: Q8IUR6
  ENST ID: ENST00000296953
  CDS Start-End: 320-2239
gagtcacgcgatttccgggaacccgtcaggaaggacataaacaaaacaaacccgaggcagcatggagaggggccgtggcccctgcagcggaaccggacccagtccctgagccgcccctacacccacagacagcatcgcacagaattattttaaaaaaaagcagtgatccaagcaattgaattggaagcactctggggaaacctgctgtttattgtggaaatcatcttcgatcttggaattgaaagtaaagctggaaaggaatttacaaacaagaaaaaaaagaagtttggaatcggattcacaggatctgggcttggaaatgcctcagcctagtgtaagcggaatggatccgcctttcggggatgcctttcgaagccacaccttttcggaacaaactctgatgagcacagatctcttagcaaacagttcggatccagatttcatgtatgaactggatagagagatgaactaccaacagaatcctagagacaactttctttctttggaggactgcaaagacattgaaaatctggagtctttcacagatgtcctggataatgagggtgctttaacctcaaactgggaacagtgggatacatactgtgaagacctaacgaaatataccaaactaaccagctgtgacatctggggaacaaaagaagtggattacttgggtcttgatgacttttctagtccttaccaagatgaagaggttataagtaaaactccaactttagctcaacttaatagtgaggactcacagtctgtttctgattccctttattaccccgattcacttttcagtgtcaaacaaaatcccttaccctcttcattccctggtaaaaagatcacaagcagagcagctgctcctgtgtgttcttctaagactctgcaggctgaggtccctttgtcagactgtgtccaaaaagcaagtaaacccacttcaagcacacaaatcatggtgaagaccaacatgtatcataatgaaaaggtgaactttcatgttgaatgtaaagactatgtaaaaaaggcaaaggtaaagatcaacccagtgcaacagagccggcccttgttgagccagattcacacagatgcagcaaaggagaacacctgctactgtggtgcagtggcaaagagacaagagaaaaaagggatggagcctcttcaaggtcatgccactcccgctttgccttttaaagaaacccaggaactattactaagtcccctgccccaggaaggtcctgggtcacttgcagcaggagagagcagcagtctttctgccagtacatcagtctcagattcatcccagaaaaaagaagagcacaattattctctttttgtctccgacaacttgggtgaacagccaactaaatgcagtcctgaagaagatgaggaggacgaggaggatgttgatgatgaggaccatgatgaaggattcggcagtgagcatgaactgtctgaaaatgaggaggaggaagaagaggaagaggattatgaagatgacaaggatgatgatattagtgatactttctctgaaccaggctatgaaaatgattctgtagaagacctgaaggaggtgacttcaatatcttcacggaagagaggtaaaagaagatacttctgggagtatagtgaacaacttacaccatcacagcaagagaggatgctgagaccatctgagtggaaccgagatactttgccaagtaatatgtatcagaaaaatggcttacatcatggaaaatatgcagtaaagaagtcacggagaactgatgtagaagacctgactccaaatcctaaaaaactcctccagataggcaatgaacttcggaaactgaataaggtgattagtgacctgactccagtcagtgagcttcccttaacagcccgaccaaggtcaaggaaggaaaaaaataagctggcttccagagcttgtcggttaaagaagaaagcccagtatgaagctaataaagtgaaattatggggcctcaacacagaatatgataatttattgtttgtaatcaactccatcaagcaagagattgtaaaccgggtacagaatccaagagatgagagaggacccaacatggggcagaagcttgaaatcctcattaaagatactctcggtctaccagttgctgggcaaacctcagaatttgttaaccaagtgttagagaagactgcagaagggaatcccactggaggccttgtaggattaaggataccaacatcaaaggtgtaatcagcctcattggaccactggtcagaaatgtctgcgttttgtcacgttatccattgtaaattttcattctgttttgcatgtcagttagcattatgtaaacatttacaattaggttacattgttttaagaactaagtagcataagtgaagcatgatccaaaatacttgattattgcattttcagagcataaaccatgattaaaactgctactggcatcagaattgaaaatcatatgtttaagtaaatgttaggtacagattacaaaaatctgttaaagcaaaacattttggaggagtgaaatagtaaaatgccaagtattgtggcagatttatgctctgaaccacacaaaaaaattgaggaagcatttttttaaacagtcggtttaaattgtttttagaattattgctttttgttctaattttccacaaccattaatctcacttgtatatggcacacccagcacttgtgcctgtgggccatattagatgttcattgtcagagctcaagatgatatatataaatatatatatatatatatatatatacacacacacacacaaatgtctgtgcaagtaagaaaaaaaaagcatattctttgtgccttgtattttggggaaactctaaaactggtaatattttgtatgatgaaaaccctaatgagaaaaaacaagatatatagatggaaaaattatggggtttaaatgtttttttgttccaactctttttcagattttttgaatgtatataggactatgttgaaatgtagatatatgccacagagtctgtgtattgtataaaaaacaaaacaaaaaacaacaaaaaaaagatggctctagaaaactcatatttcggtacttgaccggaagaagacaaatacttgcacattattgcgattgttttattttttgtaccaaagacaaatgcaactgatatggcaaactgccagtctaagtaaagttttgcacagcttacatgatactgtatgaatgtatgaaaaaaaaggagaaaaaaaagaaaaaaaaaggtcagggttagggatcttactgaactgtgaattttatttctgtttgggtccaattatctacagaaggagcatccatacatacaaatattattttgctgttcctctagttcgcttccatagtagataagttggtggccatttagatgtcttttatttctgcacttattgtaggaaattttaatatatttcattttagtaagctattgataaaatagtttttgactttgaaaattaaaatgtttatttagcttattgtagtatacttccaccagacaacaaaatagattatttttattgtattatgtatatatatatatgtaaagaaagaaaaaagctaaaaatatctaattctttagttgccacttttccgattgatgtattattgtgcatgtaatattttcaaagatcaacacaggctaaaacaaaaacaatttatagatttttatatttttgtacaggtattttcaaactagcttcttcaaacttaacatgtgacttattcttctatagtttctagaattgagaaacattaacacatttagtttttaggtgctcttttttgctcatataaaacagcttcattagtcagtgttttaactgtgttcaagctttacctcttgatgagaaatttcttatgtcaaggcagcattataaaccttcccccacagatttttccatcctgtctctcttactgttttattctcaaatcttgtgctttgaactctgaaaactggtggcttaaaaactaaaaaaagaaaaaaagcatatttagcaaggaaaaaaataccaaaaatttcaggcatagctgctggaaaaattatctatttctccattacccactgtaggatttcttttttaattatactttgactataaagtgtcaaagtataatttgttcttttcttttactttgttaccccatttgtaagctatagcatatgaagctatatatatagcttgtgaaggtttgatctagaacacccagtaacaaatgaacaatgttgcttacctgcttctttgacatcttaaaaaagaaatccaaggaggattgtaaggattgtcttaccaccttagctgaactgtgatgcacaagatttttctatgtgtttggtggaaatgtacctggtttgtacattcacgctaaacagatgataagctcaagtctgatggtttaatagaatgtaagttcatcgtttaaagcttttcctttttaggttggagaaggcaaaacacaggcttgcaagttggaagtatatgaagtcttgacagagtgtgtctggtaaattgaaaagtgtttcaaactatggcagttttgcaatcaggtgaaaatcacctcatgatattcagctgataaggtttataaaattgcccctttctagctgctctgttaggaattctggtttttgatacttttttcctgtctgcaaaccagaatttgattttttggtcttgcatttcaaaaaaaaaaagactttgaatctgtttagtagattccatatctttgagtttcagtgttttatatgtactacttaagttaaatagttaaaagcttttaaatagttgagctttttaatgttgacactttattttgtacctatttatatatgtatgtatatcttagaaaagcactttgttaaaaaaaaattgcattttatatgattcctgccatttgctgctaaatctgggctggtcagaatgctgcagcgatacttgatctatataaaaacctggcagtaaaatgtagagtgaaagttaaatcctcttgctgttttaactttatcataaagatgacataggcaagctgtgcagctttacattttaaccaggggactctgtggcatttaaaaccgtctagaaatggttgtactttaatgccagtaataatctgcttcctctattgtcattaaaatatatacgtttagtgtatcacacaaaccaatcttataagggtaatgtaaaaaccccaacaattgtacatgttctgtttttgaaaattgtggcatgtatttttgggtgaagatcattagagaagagttctctaaaggttttctgtgttcatacatggtatacagatagctcataatgaagtccagaatcttacttttaagtgaaggcattgtgaattcacctcaagtaaacccattgttccaaagcaattataaactttgactctagtactactatgatttaaaaaaaaaaaaaaccaacaaaaaccttttttcctagtttcagatacactggattctttatagagtttgtctccatatgaaagcatgctgtccagtcgctcttgttaagatcttgtctgagttttgaattgggtgccacacttttccagtcaatataattgcttgttctactgtaccatgtatgattcttgtcctttcctatatccttcatgacagattatgatgtggctttatattgtgccttacttgtacatttaaaactaaacgtcttcattcccttccacttcctacatctttaactttgacctttttggtaagagaatcagaactattacaaaagcatcatgaaggatttcagatgggtatggtttcaaattccctctctttatagttattttatatttgtatgaaagaccagttttggatggtctttgaatataggggggaaagattagcagtaatttcactacatcccttttctctgactttcatgcatttctcatacatcttctttctgatgcttgactttatttgcttcctagcaatagtctgcatttaaagaaaggtgtgttcaattcatcagcttgaaattgactatttcatttttccaggattttttaggagaagagtacccattttgttttataaaaacagatgacaagtctctttaaaagaaacagaagtacagtacttttgaaatacaatgctgttagtttggatttctttttatatatatatataatattcatacaatgatctgatgtttgccttcattaataaagctgttagtttattcaccaaaatgtcaagaatggatgtgcttttctttattccacacatttaaaaaaatttagctgctaagatttaatgttataagaaatgaattcaagttgccttcagcaagaattaacaaaaacttatgttccctttctttatatagtttcctaaaattctgttcaagtattttctagttaattatgtaacagaatgttagcatctctccatatcttgaaacttgaattttgagaatgcattgaattatgctttcagtgttaaagtaaaaggtttcaattatccttctagtgaagtctgttgtggaataccatttcccatggaactgaggccatttccacaactttgcacagaactgcagtcttgttcttcccttggatcatgacaaataagtctcacacagtgccgtaatacttgtggattcttttgtaatctttgtaatcttaataagggcattatgagaagacgactccatgtttttttaatacttcaaacacattgggatgtaacaatgaatgtcaactgtaggaatggtggtttcgttttaaggaataagcatgttggggaaagatgatgaaaatgtactactgaaagttatacacttccataggcaaatgggattatgtgttgaagcatagtcctcatgcttaataaactgactgaaatcgtagaaattacacctaggaactgagctaggccaaattgccatttttgtttagagagttttggaggtagtagtgaggggacagagccttaaaactacttccaaacagtattttggaattgaagacttggtaactagtgaagaacatcaaagttgggtatttcaatgtgccaagtttgggtgaactaggttcggtttgcctctttcataacaatgtaaacacaatggtgtagttaattaaattctgggtggataggagcaggactgattactatgtcttgcccttcgccctttgtttttttcagaaccaaataacagaaatgtgtatgtgtgtactgtatctgcctttccaccacatttttatgacactgtattccactgcctgcttttttaccttctttccctaggatttgtcctacagcttagtattgtggttgacagcgatactagggctgacagcacagaagtcacaagagaagagtggaagggcaagaattcaaagcatttgttcatacaatgtggcaacctcttttgcatagttgcgtaggatcctgtttgtaatgctatcataaatattctgtagttttttttttttctctcccaactggagctatgacactttttattggattcagtcttgtctcttgtctagaaagaactttatcttgttgacgcatgagctgtttaaaaattatcctattaaatgttggttaatagttgtgcagtttttcatttcagatggaaaggcaatgcaaattttgcctttgttttctgtcaccttccaacccctgagcacttctagtcagatacagattcatcagtgtatgcaacatcctttgtaatttaaaataaaaaaagatgaaaagaaaa

SEQ ID NO: 122651 - DNA, 1660 bp, Homo sapiens
  Payload ID: 4029
  Gene Symbol: CREBRF
  Gene Name: CREB3 regulatory factor
  Uniprot ID: Q8IUR6
  ENST ID: ENST00000520420
  CDS Start-End: 304-1557
gggaacccgtcaggaaggacataaacaaaacaaacccgaggcagcatggagaggggccgtggcccctgcagcggaaccggacccagtccctgagccgcccctacacccacagacagcatcgcacagaattattttaaaaaaaagcagtgatccaagcaattgaattggaagcactctggggaaacctgctgtttattgtggaaatcatcttcgatcttggaattgaaagtaaagctggaaaggaatttacaaacaagaaaaaaaagaagtttggaatcggattcacaggatctgggcttggaaatgcctcagcctagtgtaagcggaatggatccgcctttcggggatgcctttcgaagccacaccttttcggaacaaactctgatgagcacagatctcttagcaaacagttcggatccagatttcatgtatgaactggatagagagatgaactaccaacagaatcctagagacaactttctttctttggaggactgcaaagacattgaaaatctggagtctttcacagatgtcctggataatgagggtgctttaacctcaaactgggaacagtgggatacatactgtgaagacctaacgaaatataccaaactaaccagctgtgacatctggggaacaaaagaagtggattacttgggtcttgatgacttttctagtccttaccaagatgaagaggttataagtaaaactccaactttagctcaacttaatagtgaggactcacagtctgtttctgattccctttattaccccgattcacttttcagtgtcaaacaaaatcccttaccctcttcattccctggtaaaaagatcacaagcagagcagctgctcctgtgtgttcttctaagactctgcaggctgaggtccctttgtcagactgtgtccaaaaagcaagtaaacccacttcaagcacacaaatcatggtgaagaccaacatgtatcataatgaaaaggtgaactttcatgttgaatgtaaagactatgtaaaaaaggcaaaggtaaagatcaacccagtgcaacagagccggcccttgttgagccagattcacacagatgcagcaaaggagaacacctgctactgtggtgcagtggcaaagagacaagagaaaaaagggatggagcctcttcaaggtcatgccactcccgctttgccttttaaagaaacccaggaactattactaagtcccctgccccaggaaggtcctgggtcacttgcagcaggagagagcagcagtctttctgccagtacatcagtctcagattcatcccagaaaaaagaagagcacaattattctctttttgtctccgacaacttgggtgaacagccaactaaatgcagtcctgaagaagatgaggaggacgaggaggatgttgatgatgaggaccatgatgaaggattcggcagtgagcatgaactgtctgaaaatgaggaggaggaagaagaggaagaggattatgaagatgacaaggatgatgatattagtgatactttctctgaaccaggtattataatgcttgcaagcttaccagactgacctttgtattactattttgaaatagaaaggtttttgtttctgttttgtttggataatttctttattttagtttgggaattaaatgacttaaaccttggattgg

SEQ ID NO: 122652 - DNA, 559 bp, Homo sapiens
  Payload ID: 4029
  Gene Symbol: CREBRF
  Gene Name: CREB3 regulatory factor
  ENST ID: ENST00000523161
  CDS Start-End: 482-559
gaaggcgagtccgatcggaccaggaagtagctcaggggagcctgacctcgacccgcctttctcctcacacgagctgaggaggcagggaagtaccgagggcagtcaagcctcccctgggggtggttcctgggactagatggagctcagtctctggattctccctctttctcggccctatgcttcctgacagacctggccgccaaaccctgtaatcgccctcctttaacccaagaaagcaagtctttctgccgtttctgagctggcttgagccttaagactaccttaaggagacagcatcgcacagaattattttaaaaaaaagcagtgatccaagcaattgaattggaagcactctggggaaacctgctgtttattgtggaaatcatcttcgatcttggaattgaaagtaaagctggaaaggaatttacaaacaagaaaaaaaagaagtttggaatcggattcacaggatctgggcttggaaatgcctcagcctagtgtaagcggaatggatccgcctttcggggatgcctttcgaagccacaccttttcggaacaaact

SEQ ID NO: 122653 - DNA, 2466 bp, Homo sapiens
  Payload ID: 4029
  Gene Symbol: CREBRF
  Gene Name: CREB3 regulatory factor
  Uniprot ID: Q8IUR6
  ENST ID: ENST00000522692
  CDS Start-End: 316-1569
gagtcacgcgatttccgggaacccgtcaggaaggacataaacaaaacaaacccgaggcagcatggagaggggccgtggcccctgcagcggaaccggacccagtccctgagccgcccctacacccacagcatcgcacagaattattttaaaaaaaagcagtgatccaagcaattgaattggaagcactctggggaaacctgctgtttattgtggaaatcatcttcgatcttggaattgaaagtaaagctggaaaggaatttacaaacaagaaaaaaaagaagtttggaatcggattcacaggatctgggcttggaaatgcctcagcctagtgtaagcggaatggatccgcctttcggggatgcctttcgaagccacaccttttcggaacaaactctgatgagcacagatctcttagcaaacagttcggatccagatttcatgtatgaactggatagagagatgaactaccaacagaatcctagagacaactttctttctttggaggactgcaaagacattgaaaatctggagtctttcacagatgtcctggataatgagggtgctttaacctcaaactgggaacagtgggatacatactgtgaagacctaacgaaatataccaaactaaccagctgtgacatctggggaacaaaagaagtggattacttgggtcttgatgacttttctagtccttaccaagatgaagaggttataagtaaaactccaactttagctcaacttaatagtgaggactcacagtctgtttctgattccctttattaccccgattcacttttcagtgtcaaacaaaatcccttaccctcttcattccctggtaaaaagatcacaagcagagcagctgctcctgtgtgttcttctaagactctgcaggctgaggtccctttgtcagactgtgtccaaaaagcaagtaaacccacttcaagcacacaaatcatggtgaagaccaacatgtatcataatgaaaaggtgaactttcatgttgaatgtaaagactatgtaaaaaaggcaaaggtaaagatcaacccagtgcaacagagccggcccttgttgagccagattcacacagatgcagcaaaggagaacacctgctactgtggtgcagtggcaaagagacaagagaaaaaagggatggagcctcttcaaggtcatgccactcccgctttgccttttaaagaaacccaggaactattactaagtcccctgccccaggaaggtcctgggtcacttgcagcaggagagagcagcagtctttctgccagtacatcagtctcagattcatcccagaaaaaagaagagcacaattattctctttttgtctccgacaacttgggtgaacagccaactaaatgcagtcctgaagaagatgaggaggacgaggaggatgttgatgatgaggaccatgatgaaggattcggcagtgagcatgaactgtctgaaaatgaggaggaggaagaagaggaagaggattatgaagatgacaaggatgatgatattagtgatactttctctgaaccaggtattataatgcttgcaagcttaccagactgacctttgtattactattttgaaatagaaaggtttttgtttctgttttgtttggataatttctttattttagtttgggaattaaatgacttaaaccttggattggatatgtaattggtttttctattcaaatagctctaaaatgatcacttttgctcacatagggattcataagctgattccttgagggcttattttttattattttatttcttatttttaaaattaaaatagagatgagagcttgccactgtgcccagctgaggacttattcttaatgtatcttatgttaagtgacctgttttgtcactctcttgagcatttatgcaaagacaccaataatttattggtttaaaaaatattcctgtttagggccaggcgcagtggctcacgttagtaatcccagcactttgggaggccgaggtgggcggatcacctgaggtcaggagttaaagaccagcccggccaacacagcgaaaccctgtctctactaaaaatacaaaaatcagatgtggtggcacgcatctgtaatcccagctactccagaggttgaggcgggagaatcacttgaacccaggaggctgaggttgcggttagctgacatcgcaccattgcactccagcctgggcaacaggagtgaaagtctgtctcaataacaacaaaaaataataaataaaaatattactgtttatgcatgtgtctctctattatagttgagataagttaggagtatatagaatgttgaaccaagtgatgatggtttatattactcattccaatacccaacaaagtctatttatgaataatgtaaaagcattttctttgtgtctgctaacattttaatttacatcgtattttcctatttaagaaaaatacatgctgtaatttggtgagcatgaa

SEQ ID NO: 122654 - DNA, 1046 bp, Homo sapiens
  Payload ID: 4030
  Gene Symbol: CFC1
  Gene Name: cripto, FRL-1, cryptic family 1
  Uniprot ID: P0CG37
  ENST ID: ENST00000259216
  CDS Start-End: 264-935
atagagggaattgttcttcaggctcggaggggcctgcctgtcactgcgcccccgaccctagctcagggactgcagaactcaagataccatcccgtttctcctggctgaggaagggaagggaacatccacatcttctgtactcgtccattctgtgtccccggggcctggagtaaagacaccttcaaatgcagagactcttcagattcagctttcctggaaactgatcttcaatgcactaagagaaggagactctcaaaccaaaaatgacctggaggcaccatgtcaggcttctgtttacggtcagtttggcattacagatcatcaatttgggaaacagctatcaaagagagaaacataacggcggtagagaggaagtcaccaaggttgccactcagaagcaccgacagtcaccgctcaactggacctccagtcatttcggagaggtgactgggagcgccgagggctgggggccggaggagccgctcccctactcccgggctttcggagagggtgcgtccgcgcggccgcgctgctgcaggaacggcggtacctgcgtgctgggcagcttctgcgtgtgcccggcccacttcaccggccgctactgcgagcatgaccagaggcgcagtgaatgcggcgccctggagcacggagcctggaccctccgcgcctgccacctctgcaggtgcatcttcggggccctgcactgcctccccctccagacgcctgaccgctgtgacccgaaagacttcctggcctcccacgctcacgggccgagcgccgggggcgcgcccagcctgctactcttgctgccctgcgcactcctgcaccgcctcctgcgcccggatgcgcccgcgcaccctcggtccctggtcccttccgtcctccagcgggagcggcgcccctgcggaaggccgggacttgggcatcgcctttaattttctatgttgtaaataatagatgtgtttagtttaccgtaagctgaagcactgggtgaatatttttattgggtaataaatattttcatgaaagcgcctttggctccagat

SEQ ID NO: 122655 - DNA, 1554 bp, Homo sapiens
  Payload ID: 4030
  Gene Symbol: CFC1
  Gene Name: cripto, FRL-1, cryptic family 1
  ENST ID: ENST00000615342
  CDS Start-End: 289-864
agtccccaccccccagccaggtctcatagagggaattgttcttcaggctcggaggggcctgcctgtcactgcgcccccgaccctagctcagggactgcagaactcaagataccatcccgtttctcctggctgaggaagggaagggaacatccacatcttctgtactcgtccattctgtgtccccggggcctggagtaaagacaccttcaaatgcagagactcttcagattcagctttcctggaaactgatcttcaatgcactaagagaaggagactctcaaaccaaaaatgacctggaggcaccatgtcaggcttctgtttacggtcagtttggcattacagatcatcaatttgggaaacagctatcaaagagagaaacataacggcggtagagaggaagtcaccaaggttgccactcagaagcaccgacagtcaccgctcaactggacctccagtcatttcggagaggtgactgggagcgccgagggctgggggccggaggagccgctcccctactcccgggctttcggagaggtgaatgcggcgccctggagcacggagcctggaccctccgcgcctgccacctctgcaggtgcatcttcggggccctgcactgcctccccctccagacgcctgaccgctgtgacccgaaagacttcctggcctcccacgctcacgggccgagcgccgggggcgcgcccagcctgctactcttgctgccctgcgcactcctgcaccgcctcctgcgcccggatgcgcccgcgcaccctcggtccctggtcccttccgtcctccagcgggagcggcgcccctgcggaaggccgggacttgggcatcgcctttaattttctatgttgtaaataatagatgtgtttagtttaccgtaagctgaagcactgggtgaatatttttattgggtaataaatattttcatgaaagcgcctttggctccagatccttgggagagggacacgtgtgtccccagcaccactgtgaccggtaggtagagacagcagaacaacagcgagaaggagccaaagctggagccagaaagcctggcaccgccaccttcccctgacagttagcaccttcctttcacaacatctcccttaagggggaagcgtctgctgtggaacccaccgcaaggcaacgcaggcagagttcagcctgaagagcgccaggccagcctcctctgtcttccgagcaccgcttctcaggtcgcttcccaatctgaggaggctgtcgtgtccacaaccagtccagggggatgtgcgccactagctgaggacgccaggcccggcgacaccacaaaggcttggccatgcggaatgtgccctcaagagcacacacttcgggtagagggcacttgcattgagctcttcagctttttaaatccactgtagttcatgagcctgtgtgacataattacttttacattttatattgtcaattagtttattggcattttcaatcttttcaactattggctatgaaaatatgaatttaacgtaacattcaaatgagtattaaagaaaaataaagtagaacttcatt

SEQ ID NO: 122656 - DNA, 1444 bp, Homo sapiens
  Payload ID: 4030
  Gene Symbol: CFC1
  Gene Name: cripto, FRL-1, cryptic family 1
  ENST ID: ENST00000621673
  CDS Start-End: 289-735
agtccccaccccccagccaggtctcatagagggaattgttcttcaggctcggaggggcctgcctgtcactgcgcccccgaccctagctcagggactgcagaactcaagataccatcccgtttctcctggctgaggaagggaagggaacatccacatcttctgtactcgtccattctgtgtccccggggcctggagtaaagacaccttcaaatgcagagactcttcagattcagctttcctggaaactgatcttcaatgcactaagagaaggagactctcaaaccaaaaatgacctggaggcaccatgtcaggcttctgtttacggtcagtttggcattacagatcatcaatttgggaaacagctatcaaagagagaaacataacggcggtagagaggaagtcaccaaggttgccactcagaagcaccgacagtcaccgctcaactggacctccagtcatttcggagaggtgactgggagcgccgagggctgggggccggaggagccgctcccctactcccgggctttcggagaggacccgaaagacttcctggcctcccacgctcacgggccgagcgccgggggcgcgcccagcctgctactcttgctgccctgcgcactcctgcaccgcctcctgcgcccggatgcgcccgcgcaccctcggtccctggtcccttccgtcctccagcgggagcggcgcccctgcggaaggccgggacttgggcatcgcctttaattttctatgttgtaaataatagatgtgtttagtttaccgtaagctgaagcactgggtgaatatttttattgggtaataaatattttcatgaaagcgcctttggctccagatccttgggagagggacacgtgtgtccccagcaccactgtgaccggtaggtagagacagcagaacaacagcgagaaggagccaaagctggagccagaaagcctggcaccgccaccttcccctgacagttagcaccttcctttcacaacatctcccttaagggggaagcgtctgctgtggaacccaccgcaaggcaacgcaggcagagttcagcctgaagagcgccaggccagcctcctctgtcttccgagcaccgcttctcaggtcgcttcccaatctgaggaggctgtcgtgtccacaaccagtccagggggatgtgcgccactagctgaggacgccaggcccggcgacaccacaaaggcttggccatgcggaatgtgccctcaagagcacacacttcgggtagagggcacttgcattgagctcttcagctttttaaatccactgtagttcatgagcctgtgtgacataattacttttacattttatattgtcaattagtttattggcattttcaatcttttcaactattggctatgaaaatatgaatttaacgtaacattcaaatgagtattaaagaaaaataaagtagaacttcatt

SEQ ID NO: 122657 - DNA, 1071 bp, Homo sapiens
  Payload ID: 4031
  Gene Symbol: CFC1B
  Gene Name: cripto, FRL-1, cryptic family 1B
  Uniprot ID: P0CG36
  ENST ID: ENST00000281882
  CDS Start-End: 289-960
agtccccaccccccagccaggtctcatagagggaattgttcttcaggctcggaggggcctgcctgtcactgcgcccccgaccctagctcagggactgcagaactcaagataccatcccgtttctcctggctgaggaagggaagggaacatccacatcttctgtactcgtccattctgtgtccccggggcctggagtaaagacaccttcaaatgcagagactcttcagattcagctttcctggaaactgatcttcaatgcactaagagaaggagactctcaaaccaaaaatgacctggaggcaccatgtcaggcttctgtttacggtcagtttggcattacagatcatcaatttgggaaacagctatcaaagagagaaacataacggcggtagagaggaagtcaccaaggttgccactcagaagcaccgacagtcaccgctcaactggacctccagtcatttcggagaggtgactgggagcgccgagggctgggggccggaggagccgctcccatactcctgggctttcggagagggtgcgtccgcgcggccgcgctgctgcaggaacggcggtacctgcgtgctgggcagcttctgcgtgtgcccggcccacttcaccggccgctactgcgagcatgaccagaggcgcagtgaatgcggcgccctggagcacggagcctggaccctccgcgcctgccacctctgcaggtgcatcttcggggccctgcactgcctccccctccagacgcctgaccgctgtgacccgaaagacttcctggcctcccacgctcacgggccgagcgccgggggcgcgcccagcctgctactcttgctgccctgcgcactcctgcaccgcctcctgcgcccggatgcgcccgcgcaccctcggtccctggtcccttccgtcctccagcgggagcggcgcccctgcggaaggccgggacttgggcatcgcctttaattttctatgttgtaaataatagatgtgtttagtttaccgtaagctgaagcactgggtgaatatttttattgggtaataaatattttcatgaaagcgcctttggctccagat

SEQ ID NO: 122658 - DNA, 1444 bp, Homo sapiens
  Payload ID: 4031
  Gene Symbol: CFC1B
  Gene Name: cripto, FRL-1, cryptic family 1B
  ENST ID: ENST00000620207
  CDS Start-End: 289-735
agtccccaccccccagccaggtctcatagagggaattgttcttcaggctcggaggggcctgcctgtcactgcgcccccgaccctagctcagggactgcagaactcaagataccatcccgtttctcctggctgaggaagggaagggaacatccacatcttctgtactcgtccattctgtgtccccggggcctggagtaaagacaccttcaaatgcagagactcttcagattcagctttcctggaaactgatcttcaatgcactaagagaaggagactctcaaaccaaaaatgacctggaggcaccatgtcaggcttctgtttacggtcagtttggcattacagatcatcaatttgggaaacagctatcaaagagagaaacataacggcggtagagaggaagtcaccaaggttgccactcagaagcaccgacagtcaccgctcaactggacctccagtcatttcggagaggtgactgggagcgccgagggctgggggccggaggagccgctcccatactcctgggctttcggagaggacccgaaagacttcctggcctcccacgctcacgggccgagcgccgggggcgcgcccagcctgctactcttgctgccctgcgcactcctgcaccgcctcctgcgcccggatgcgcccgcgcaccctcggtccctggtcccttccgtcctccagcgggagcggcgcccctgcggaaggccgggacttgggcatcgcctttaattttctatgttgtaaataatagatgtgtttagtttaccgtaagctgaagcactgggtgaatatttttattgggtaataaatattttcatgaaagcgcctttggctccagatccttgggagagggacacgtgtgtccccagcaccactgtgaccggtaggtagagacagcagaacaacagcgagaaggagccaaagctggagccagaaagcctggcaccgccaccttcccctgacagttagcaccttcctttcacaacatctcccttaagggggaagcgtctgctgtggaacccaccgcaaggcaacgcaggcagagttcagcctgaagagcgccaggccagcctcctctgtcttccgagcaccgcttctcaggtcgcttcccaatctgaggaggctgtcgtgtccacaaccagtccagggggatgtgcgccactagctgaggacgccaggcccggcgacaccacaaaggcttggccatgcggaatgtgccctcaagagcacacacttcgggtagaaggcacttgcattgagctcttcagctttttaaatccactgtagttcatgagcctgtgtgacacaattacttttacattttatattgtcaattagtttattggcattttcaatcttttcaactattggctatgaaaatatgaatttaacgtaacattcaaatgagtattaaagaaaaataaagtagaacttcatt

SEQ ID NO: 122659 - DNA, 1554 bp, Homo sapiens
  Payload ID: 4031
  Gene Symbol: CFC1B
  Gene Name: cripto, FRL-1, cryptic family 1B
  ENST ID: ENST00000619050
  CDS Start-End: 289-864
agtccccaccccccagccaggtctcatagagggaattgttcttcaggctcggaggggcctgcctgtcactgcgcccccgaccctagctcagggactgcagaactcaagataccatcccgtttctcctggctgaggaagggaagggaacatccacatcttctgtactcgtccattctgtgtccccggggcctggagtaaagacaccttcaaatgcagagactcttcagattcagctttcctggaaactgatcttcaatgcactaagagaaggagactctcaaaccaaaaatgacctggaggcaccatgtcaggcttctgtttacggtcagtttggcattacagatcatcaatttgggaaacagctatcaaagagagaaacataacggcggtagagaggaagtcaccaaggttgccactcagaagcaccgacagtcaccgctcaactggacctccagtcatttcggagaggtgactgggagcgccgagggctgggggccggaggagccgctcccatactcctgggctttcggagaggtgaatgcggcgccctggagcacggagcctggaccctccgcgcctgccacctctgcaggtgcatcttcggggccctgcactgcctccccctccagacgcctgaccgctgtgacccgaaagacttcctggcctcccacgctcacgggccgagcgccgggggcgcgcccagcctgctactcttgctgccctgcgcactcctgcaccgcctcctgcgcccggatgcgcccgcgcaccctcggtccctggtcccttccgtcctccagcgggagcggcgcccctgcggaaggccgggacttgggcatcgcctttaattttctatgttgtaaataatagatgtgtttagtttaccgtaagctgaagcactgggtgaatatttttattgggtaataaatattttcatgaaagcgcctttggctccagatccttgggagagggacacgtgtgtccccagcaccactgtgaccggtaggtagagacagcagaacaacagcgagaaggagccaaagctggagccagaaagcctggcaccgccaccttcccctgacagttagcaccttcctttcacaacatctcccttaagggggaagcgtctgctgtggaacccaccgcaaggcaacgcaggcagagttcagcctgaagagcgccaggccagcctcctctgtcttccgagcaccgcttctcaggtcgcttcccaatctgaggaggctgtcgtgtccacaaccagtccagggggatgtgcgccactagctgaggacgccaggcccggcgacaccacaaaggcttggccatgcggaatgtgccctcaagagcacacacttcgggtagaaggcacttgcattgagctcttcagctttttaaatccactgtagttcatgagcctgtgtgacacaattacttttacattttatattgtcaattagtttattggcattttcaatcttttcaactattggctatgaaaatatgaatttaacgtaacattcaaatgagtattaaagaaaaataaagtagaacttcatt

SEQ ID NO: 122660 - DNA, 4370 bp, Homo sapiens
  Payload ID: 4032
  Gene Symbol: CRNKL1
  Gene Name: crooked neck pre-mRNA splicing factor 1
  ENST ID: ENST00000377327
  CDS Start-End: 33-2543
ctttccgacactctttgggaagagaatctctaatgacggcaacagtggagaacctaacgttccagaaggacactttgggaaatgctgttgacaaaaacaggcgccacggctcgacagagccactcgtcctcgcctggtcatcccagttccggaggctgacctggggatgcgccctggacgccctgcaccgcagtccttgcgtcgctgctagtcagcacggcgttacccacctcatccgcagctccaggacgccgcactccacgcgctgccgcaaggaggacgcgcagcctggtcaccatggaaacggtgccgcctccgtcacggctcaagcgagaggtcaaaggtcagtcctgcaagttccgcttccggttccgagatcctgtttgttttctgaaagctttgtggtttcggtgagctctcagagccgatttctagcgtccgtgccggggacaggtgtccagaggtcgactgctgcagacatggcggcctccaccgcggccgggaagcagcggattcccaaagtggccaaggtgaaaaacaaagccccggctgaggtacagataactgctgaacaactcttaagagaggctaaagaaagagaacttgagcttcttccacctccacctcaacagaagatcacagatgaagaagaattaaatgattataaactaaggaaaaggaagacttttgaagataatataagaaaaaacaggactgtgattagtaactggataaaatacgcacaatgggaagaaagcctaaaggagattcaaagggctcgatccatatacgagcgtgctttagatgtagactaccgaaatattacactctggctgaaatacgcagaaatggaaatgaagaatcgccaagtcaaccatgctcgaaatatctgggaccgggccataacaacgctgcctcgagttaatcagttctggtacaagtacacgtacatggaggaaatgttgggaaacgttgccggtgcccggcaggtgtttgagcgctggatggagtggcagcctgaggagcaagcctggcactcctacatcaactttgagctgagatacaaagaggtggatcgggcccgcaccatttatgagcgatttgtcctcgtgcaccctgatgttaagaactggatcaagtatgcccgctttgaagaaaaacatgcttattttgcccatgcacggaaagtgtatgagagagctgtggaattctttggagatgaacatatggatgagcacctttatgttgcctttgccaagtttgaagaaaatcagaaagagtttgaaagggtacgagtgatttacaagtatgccctggacagaatttcaaaacaagatgcccaagaactctttaaaaattataccatctttgagaagaagtttggtgataggcggggtattgaagatatcattgtgagcaaacggagattccagtacgaagaagaagtgaaggcgaatccacacaattatgatgcatggtttgattacttgcgcttggtagaaagtgacgcagaagctgaagccgtgagagaagtctatgaaagggccattgccaatgtcccacccattcaggagaagaggcactggaagcgctacatttatctttggatcaactatgcactctatgaagaattggaggcaaaggatcctgagaggacaagacaggtgtatcaagcctctttggaactaattcctcacaaaaagttcacatttgccaaaatgtggatactgtatgcacagtttgaaatacgacagaagaatctgtcattagccagaagagcattgggaacttccataggcaaatgtccaaagaacaaattatttaaagtttacatagaattggagctacagcttcgagaatttgacagatgccggaagctttatgaaaagttcctggaatttggacctgaaaattgtacctcatggattaaattcgctgaattagagacaatccttggtgatattgacagagcacgggcaatctatgaattagccatcagtcagccacgtttagacatgccagaggtgctttggaaatcatatattgattttgaaattgagcaggaagaaacagaaagaacacgaaacctttaccggcggttgcttcaacggacgcagcatgtcaaggtatggatcagctttgctcagtttgagttgtcttcaggaaaagaaggaagtttgactaaatgcagacaaatttatgaagaagctaacaaaaccatgcgaaactgtgaagaaaaggaagagagacttatgctgctggaatcttggcgaagttttgaagaagaatttggaacagcttcagataaggagagagtagacaaactcatgccagagaaagtcaagaagagaagaaaggtccagactgatgatgggtctgatgcaggctgggaagaatactttgattacatctttccagaagatgctgccaaccaacctaacctcaaactcctggccatggccaaactgtggaagaaacagcagcaggaaaaggaggatgctgagcaccatccagatgaggacgtcgatgagagtgaatcctgatctttttttcatagacaaatgttttgttatttttataaattaattgtttggaactcttgtgactcctggaagttcttatatatttcaccagtaagaaattgattggtatctttgatggctactttttaagttattttttaaatgctcttgggttagctaggggtagggattgcaagtaaaggacttttttaactgctggatttgtttttccaactgagtccaaacttttctaatgtctgtccacatcatgcattaggaaatgtaattaaggtaacattctacagttacttttcatgtcatacccataaagatagtttatgcattcatctgaaatgtgtaactttttcatgtcttcagagtcacagacttgagttcatttcccagctctgccactcatgattatataacttaattttcattttcctcattcacaaaatgggccaatagtttgacagctcattttgaagattacattataaaaggaatatacctggtgggtgcatagtaagtgctcagtaaattgtttgttctaagccacttttaaaaatggtttcattccttgtagaattgaatgcgagtggattaataatttaccttactttcttactagtgtccagttatattgttttttagaacaacacttggaaaataatttgcagtgattatatttctgaacaaggttcagaaaacattgtttactaagaatttagtctaataatttcagttaggcgctcatcagttctccagagtggttgagtttgtaataccttgtttaaagaataatggcttgttcacgtgtgtgctatgaaaaatgatgtcccatgttcacataaatttgggaaattctggactaagacttaagtctcgttaatcaaatctctttatagttaggcttctgtacattatgtatctccagtagcaatgttgccatattatttatttcccaaacttagtggacaatggagtcatttctacctagagtaccagtaaacatctcccagtgtgctatagtagaaaatgtctactcctcactgctgacatgttaaacttactcttggtttagagcatgtgtagaaacacctaaggtagctctatgctaaataatgaagagtagcacaagaatgaatgtatttgctgatacgttgctcacattctcaagcaaaaattcaactgcattaaccgatctgagagttttcctttaacctggactgtgtttctcaagcacattttttctttgttcactgcccaaggactagaactgtatttttaaggttgttttcccctaaaaggacctttagtaagcaaatttattattaaatgtgcacatcttattcacccaagggaataaaagctacttcgtaatgttgttactaaattttatcttgaaaataaataacagtgtttgaggacagaagaaactaggactgttgttgagataaaatctgttttcagcctgactgctttagtcactggacgagcatcagctactgcggtgtcagatcacttctcgagtagaggtctgcctagtgagtgagcaggagaacatcatcttaatagcctttggctcacccagagtcagggagagatgaaaataataggtcagaatgcaagtgacttaatcacagtcttcctagaattatctgtttatgttgcatgaatgcataagaaaaaaattctgtcatgttcccaaggtagaattgtaataagcatgtgccagtgtgaaagctggaaggaaaaaagctattctctaacaggagaacataaagattcatttctctcccaccctcaactccaccaaagtaaatcctttcgatagtaaaagtttaa

SEQ ID NO: 122661 - DNA, 4406 bp, Homo sapiens
  Payload ID: 4032
  Gene Symbol: CRNKL1
  Gene Name: crooked neck pre-mRNA splicing factor 1
  Uniprot ID: Q9BZJ0
  ENST ID: ENST00000377340
  CDS Start-End: 33-2579
ctttccgacactctttgggaagagaatctctaatgacggcaacagtggagaacctaacgttccagaaggacactttgggaaatgctgttgacaaaaacacatccagattggagctccgttcttactcccttgcagggcgccacggctcgacagagccactcgtcctcgcctggtcatcccagttccggaggctgacctggggatgcgccctggacgccctgcaccgcagtccttgcgtcgctgctagtcagcacggcgttacccacctcatccgcagctccaggacgccgcactccacgcgctgccgcaaggaggacgcgcagcctggtcaccatggaaacggtgccgcctccgtcacggctcaagcgagaggtcaaaggtcagtcctgcaagttccgcttccggttccgagatcctgtttgttttctgaaagctttgtggtttcggtgagctctcagagccgatttctagcgtccgtgccggggacaggtgtccagaggtcgactgctgcagacatggcggcctccaccgcggccgggaagcagcggattcccaaagtggccaaggtgaaaaacaaagccccggctgaggtacagataactgctgaacaactcttaagagaggctaaagaaagagaacttgagcttcttccacctccacctcaacagaagatcacagatgaagaagaattaaatgattataaactaaggaaaaggaagacttttgaagataatataagaaaaaacaggactgtgattagtaactggataaaatacgcacaatgggaagaaagcctaaaggagattcaaagggctcgatccatatacgagcgtgctttagatgtagactaccgaaatattacactctggctgaaatacgcagaaatggaaatgaagaatcgccaagtcaaccatgctcgaaatatctgggaccgggccataacaacgctgcctcgagttaatcagttctggtacaagtacacgtacatggaggaaatgttgggaaacgttgccggtgcccggcaggtgtttgagcgctggatggagtggcagcctgaggagcaagcctggcactcctacatcaactttgagctgagatacaaagaggtggatcgggcccgcaccatttatgagcgatttgtcctcgtgcaccctgatgttaagaactggatcaagtatgcccgctttgaagaaaaacatgcttattttgcccatgcacggaaagtgtatgagagagctgtggaattctttggagatgaacatatggatgagcacctttatgttgcctttgccaagtttgaagaaaatcagaaagagtttgaaagggtacgagtgatttacaagtatgccctggacagaatttcaaaacaagatgcccaagaactctttaaaaattataccatctttgagaagaagtttggtgataggcggggtattgaagatatcattgtgagcaaacggagattccagtacgaagaagaagtgaaggcgaatccacacaattatgatgcatggtttgattacttgcgcttggtagaaagtgacgcagaagctgaagccgtgagagaagtctatgaaagggccattgccaatgtcccacccattcaggagaagaggcactggaagcgctacatttatctttggatcaactatgcactctatgaagaattggaggcaaaggatcctgagaggacaagacaggtgtatcaagcctctttggaactaattcctcacaaaaagttcacatttgccaaaatgtggatactgtatgcacagtttgaaatacgacagaagaatctgtcattagccagaagagcattgggaacttccataggcaaatgtccaaagaacaaattatttaaagtttacatagaattggagctacagcttcgagaatttgacagatgccggaagctttatgaaaagttcctggaatttggacctgaaaattgtacctcatggattaaattcgctgaattagagacaatccttggtgatattgacagagcacgggcaatctatgaattagccatcagtcagccacgtttagacatgccagaggtgctttggaaatcatatattgattttgaaattgagcaggaagaaacagaaagaacacgaaacctttaccggcggttgcttcaacggacgcagcatgtcaaggtatggatcagctttgctcagtttgagttgtcttcaggaaaagaaggaagtttgactaaatgcagacaaatttatgaagaagctaacaaaaccatgcgaaactgtgaagaaaaggaagagagacttatgctgctggaatcttggcgaagttttgaagaagaatttggaacagcttcagataaggagagagtagacaaactcatgccagagaaagtcaagaagagaagaaaggtccagactgatgatgggtctgatgcaggctgggaagaatactttgattacatctttccagaagatgctgccaaccaacctaacctcaaactcctggccatggccaaactgtggaagaaacagcagcaggaaaaggaggatgctgagcaccatccagatgaggacgtcgatgagagtgaatcctgatctttttttcatagacaaatgttttgttatttttataaattaattgtttggaactcttgtgactcctggaagttcttatatatttcaccagtaagaaattgattggtatctttgatggctactttttaagttattttttaaatgctcttgggttagctaggggtagggattgcaagtaaaggacttttttaactgctggatttgtttttccaactgagtccaaacttttctaatgtctgtccacatcatgcattaggaaatgtaattaaggtaacattctacagttacttttcatgtcatacccataaagatagtttatgcattcatctgaaatgtgtaactttttcatgtcttcagagtcacagacttgagttcatttcccagctctgccactcatgattatataacttaattttcattttcctcattcacaaaatgggccaatagtttgacagctcattttgaagattacattataaaaggaatatacctggtgggtgcatagtaagtgctcagtaaattgtttgttctaagccacttttaaaaatggtttcattccttgtagaattgaatgcgagtggattaataatttaccttactttcttactagtgtccagttatattgttttttagaacaacacttggaaaataatttgcagtgattatatttctgaacaaggttcagaaaacattgtttactaagaatttagtctaataatttcagttaggcgctcatcagttctccagagtggttgagtttgtaataccttgtttaaagaataatggcttgttcacgtgtgtgctatgaaaaatgatgtcccatgttcacataaatttgggaaattctggactaagacttaagtctcgttaatcaaatctctttatagttaggcttctgtacattatgtatctccagtagcaatgttgccatattatttatttcccaaacttagtggacaatggagtcatttctacctagagtaccagtaaacatctcccagtgtgctatagtagaaaatgtctactcctcactgctgacatgttaaacttactcttggtttagagcatgtgtagaaacacctaaggtagctctatgctaaataatgaagagtagcacaagaatgaatgtatttgctgatacgttgctcacattctcaagcaaaaattcaactgcattaaccgatctgagagttttcctttaacctggactgtgtttctcaagcacattttttctttgttcactgcccaaggactagaactgtatttttaaggttgttttcccctaaaaggacctttagtaagcaaatttattattaaatgtgcacatcttattcacccaagggaataaaagctacttcgtaatgttgttactaaattttatcttgaaaataaataacagtgtttgaggacagaagaaactaggactgttgttgagataaaatctgttttcagcctgactgctttagtcactggacgagcatcagctactgcggtgtcagatcacttctcgagtagaggtctgcctagtgagtgagcaggagaacatcatcttaatagcctttggctcacccagagtcagggagagatgaaaataataggtcagaatgcaagtgacttaatcacagtcttcctagaattatctgtttatgttgcatgaatgcataagaaaaaaattctgtcatgttcccaaggtagaattgtaataagcatgtgccagtgtgaaagctggaaggaaaaaagctattctctaacaggagaacataaagattcatttctctcccaccctcaactccaccaaagtaaatcctttcgatagtaaaagtttaa

SEQ ID NO: 122662 - DNA, 4093 bp, Homo sapiens
  Payload ID: 4032
  Gene Symbol: CRNKL1
  Gene Name: crooked neck pre-mRNA splicing factor 1
  Uniprot ID: Q9BZJ0
  ENST ID: ENST00000496549
  CDS Start-End: 33-257
ctttccgacactctttgggaagagaatctctaatgacggcaacagtggagaacctaacgttccagaaggacactttgggaaatgctgttgacaaaaacatccttgcgtcgctgctagtcagcacggcgttacccacctcatccgcagctccaggacgccgcactccacgcgctgccgcaaggaggacgcgcagcctggtcaccatggaaacggtgccgcctccgtcacggctcaagcgagaggtcaaaggtcagtgaaaaacaaagccccggctgaggtacagataactgctgaacaactcttaagagaggctaaagaaagagaacttgagcttcttccacctccacctcaacagaagatcacagatgaagaagaattaaatgattataaactaaggaaaaggaagacttttgaagataatataagaaaaaacaggactgtgattagtaactggataaaatacgcacaatgggaagaaagcctaaaggagattcaaagggctcgatccatatacgagcgtgctttagatgtagactaccgaaatattacactctggctgaaatacgcagaaatggaaatgaagaatcgccaagtcaaccatgctcgaaatatctgggaccgggccataacaacgctgcctcgagttaatcagttctggtacaagtacacgtacatggaggaaatgttgggaaacgttgccggtgcccggcaggtgtttgagcgctggatggagtggcagcctgaggagcaagcctggcactcctacatcaactttgagctgagatacaaagaggtggatcgggcccgcaccatttatgagcgatttgtcctcgtgcaccctgatgttaagaactggatcaagtatgcccgctttgaagaaaaacatgcttattttgcccatgcacggaaagtgtatgagagagctgtggaattctttggagatgaacatatggatgagcacctttatgttgcctttgccaagtttgaagaaaatcagaaagagtttgaaagggtacgagtgatttacaagtatgccctggacagaatttcaaaacaagatgcccaagaactctttaaaaattataccatctttgagaagaagtttggtgataggcggggtattgaagatatcattgtgagcaaacggagattccagtacgaagaagaagtgaaggcgaatccacacaattatgatgcatggtttgattacttgcgcttggtagaaagtgacgcagaagctgaagccgtgagagaagtctatgaaagggccattgccaatgtcccacccattcaggagaagaggcactggaagcgctacatttatctttggatcaactatgcactctatgaagaattggaggcaaaggatcctgagaggacaagacaggtgtatcaagcctctttggaactaattcctcacaaaaagttcacatttgccaaaatgtggatactgtatgcacagtttgaaatacgacagaagaatctgtcattagccagaagagcattgggaacttccataggcaaatgtccaaagaacaaattatttaaagtttacatagaattggagctacagcttcgagaatttgacagatgccggaagctttatgaaaagttcctggaatttggacctgaaaattgtacctcatggattaaattcgctgaattagagacaatccttggtgatattgacagagcacgggcaatctatgaattagccatcagtcagccacgtttagacatgccagaggtgctttggaaatcatatattgattttgaaattgagcaggaagaaacagaaagaacacgaaacctttaccggcggttgcttcaacggacgcagcatgtcaaggtatggatcagctttgctcagtttgagttgtcttcaggaaaagaaggaagtttgactaaatgcagacaaatttatgaagaagctaacaaaaccatgcgaaactgtgaagaaaaggaagagagacttatgctgctggaatcttggcgaagttttgaagaagaatttggaacagcttcagataaggagagagtagacaaactcatgccagagaaagtcaagaagagaagaaaggtccagactgatgatgggtctgatgcaggctgggaagaatactttgattacatctttccagaagatgctgccaaccaacctaacctcaaactcctggccatggccaaactgtggaagaaacagcagcaggaaaaggaggatgctgagcaccatccagatgaggacgtcgatgagagtgaatcctgatctttttttcatagacaaatgttttgttatttttataaattaattgtttggaactcttgtgactcctggaagttcttatatatttcaccagtaagaaattgattggtatctttgatggctactttttaagttattttttaaatgctcttgggttagctaggggtagggattgcaagtaaaggacttttttaactgctggatttgtttttccaactgagtccaaacttttctaatgtctgtccacatcatgcattaggaaatgtaattaaggtaacattctacagttacttttcatgtcatacccataaagatagtttatgcattcatctgaaatgtgtaactttttcatgtcttcagagtcacagacttgagttcatttcccagctctgccactcatgattatataacttaattttcattttcctcattcacaaaatgggccaatagtttgacagctcattttgaagattacattataaaaggaatatacctggtgggtgcatagtaagtgctcagtaaattgtttgttctaagccacttttaaaaatggtttcattccttgtagaattgaatgcgagtggattaataatttaccttactttcttactagtgtccagttatattgttttttagaacaacacttggaaaataatttgcagtgattatatttctgaacaaggttcagaaaacattgtttactaagaatttagtctaataatttcagttaggcgctcatcagttctccagagtggttgagtttgtaataccttgtttaaagaataatggcttgttcacgtgtgtgctatgaaaaatgatgtcccatgttcacataaatttgggaaattctggactaagacttaagtctcgttaatcaaatctctttatagttaggcttctgtacattatgtatctccagtagcaatgttgccatattatttatttcccaaacttagtggacaatggagtcatttctacctagagtaccagtaaacatctcccagtgtgctatagtagaaaatgtctactcctcactgctgacatgttaaacttactcttggtttagagcatgtgtagaaacacctaaggtagctctatgctaaataatgaagagtagcacaagaatgaatgtatttgctgatacgttgctcacattctcaagcaaaaattcaactgcattaaccgatctgagagttttcctttaacctggactgtgtttctcaagcacattttttctttgttcactgcccaaggactagaactgtatttttaaggttgttttcccctaaaaggacctttagtaagcaaatttattattaaatgtgcacatcttattcacccaagggaataaaagctacttcgtaatgttgttactaaattttatcttgaaaataaataacagtgtttgaggacagaagaaactaggactgttgttgagataaaatctgttttcagcctgactgctttagtcactggacgagcatcagctactgcggtgtcagatcacttctcgagtagaggtctgcctagtgagtgagcaggagaacatcatcttaatagcctttggctcacccagagtcagggagagatgaaaataataggtcagaatgcaagtgacttaatcacagtcttcctagaattatctgtttatgttgcatgaatgcataagaaaaaaattctgtcatgttcccaaggtagaattgtaataagcatgtgccagtgtgaaagctggaaggaaaaaagctattctctaacaggagaacataaagattcatttctctcccaccctcaactccaccaaagtaaatcctttcgatagtaaaagtttaa

SEQ ID NO: 122663 - DNA, 4183 bp, Homo sapiens
  Payload ID: 4032
  Gene Symbol: CRNKL1
  Gene Name: crooked neck pre-mRNA splicing factor 1
  ENST ID: ENST00000490910
  CDS Start-End: 33-347
ctttccgacactctttgggaagagaatctctaatgacggcaacagtggagaacctaacgttccagaaggacactttgggaaatgctgttgacaaaaacaggcgccacggctcgacagagccactcgtcctcgcctggtcatcccagttccggaggctgacctggggatgcgccctggacgccctgcaccgcagtccttgcgtcgctgctagtcagcacggcgttacccacctcatccgcagctccaggacgccgcactccacgcgctgccgcaaggaggacgcgcagcctggtcaccatggaaacggtgccgcctccgtcacggctcaagcgagaggtcaaaggtgaaaaacaaagccccggctgaggtacagataactgctgaacaactcttaagagaggctaaagaaagagaacttgagcttcttccacctccacctcaacagaagatcacagatgaagaagaattaaatgattataaactaaggaaaaggaagacttttgaagataatataagaaaaaacaggactgtgattagtaactggataaaatacgcacaatgggaagaaagcctaaaggagattcaaagggctcgatccatatacgagcgtgctttagatgtagactaccgaaatattacactctggctgaaatacgcagaaatggaaatgaagaatcgccaagtcaaccatgctcgaaatatctgggaccgggccataacaacgctgcctcgagttaatcagttctggtacaagtacacgtacatggaggaaatgttgggaaacgttgccggtgcccggcaggtgtttgagcgctggatggagtggcagcctgaggagcaagcctggcactcctacatcaactttgagctgagatacaaagaggtggatcgggcccgcaccatttatgagcgatttgtcctcgtgcaccctgatgttaagaactggatcaagtatgcccgctttgaagaaaaacatgcttattttgcccatgcacggaaagtgtatgagagagctgtggaattctttggagatgaacatatggatgagcacctttatgttgcctttgccaagtttgaagaaaatcagaaagagtttgaaagggtacgagtgatttacaagtatgccctggacagaatttcaaaacaagatgcccaagaactctttaaaaattataccatctttgagaagaagtttggtgataggcggggtattgaagatatcattgtgagcaaacggagattccagtacgaagaagaagtgaaggcgaatccacacaattatgatgcatggtttgattacttgcgcttggtagaaagtgacgcagaagctgaagccgtgagagaagtctatgaaagggccattgccaatgtcccacccattcaggagaagaggcactggaagcgctacatttatctttggatcaactatgcactctatgaagaattggaggcaaaggatcctgagaggacaagacaggtgtatcaagcctctttggaactaattcctcacaaaaagttcacatttgccaaaatgtggatactgtatgcacagtttgaaatacgacagaagaatctgtcattagccagaagagcattgggaacttccataggcaaatgtccaaagaacaaattatttaaagtttacatagaattggagctacagcttcgagaatttgacagatgccggaagctttatgaaaagttcctggaatttggacctgaaaattgtacctcatggattaaattcgctgaattagagacaatccttggtgatattgacagagcacgggcaatctatgaattagccatcagtcagccacgtttagacatgccagaggtgctttggaaatcatatattgattttgaaattgagcaggaagaaacagaaagaacacgaaacctttaccggcggttgcttcaacggacgcagcatgtcaaggtatggatcagctttgctcagtttgagttgtcttcaggaaaagaaggaagtttgactaaatgcagacaaatttatgaagaagctaacaaaaccatgcgaaactgtgaagaaaaggaagagagacttatgctgctggaatcttggcgaagttttgaagaagaatttggaacagcttcagataaggagagagtagacaaactcatgccagagaaagtcaagaagagaagaaaggtccagactgatgatgggtctgatgcaggctgggaagaatactttgattacatctttccagaagatgctgccaaccaacctaacctcaaactcctggccatggccaaactgtggaagaaacagcagcaggaaaaggaggatgctgagcaccatccagatgaggacgtcgatgagagtgaatcctgatctttttttcatagacaaatgttttgttatttttataaattaattgtttggaactcttgtgactcctggaagttcttatatatttcaccagtaagaaattgattggtatctttgatggctactttttaagttattttttaaatgctcttgggttagctaggggtagggattgcaagtaaaggacttttttaactgctggatttgtttttccaactgagtccaaacttttctaatgtctgtccacatcatgcattaggaaatgtaattaaggtaacattctacagttacttttcatgtcatacccataaagatagtttatgcattcatctgaaatgtgtaactttttcatgtcttcagagtcacagacttgagttcatttcccagctctgccactcatgattatataacttaattttcattttcctcattcacaaaatgggccaatagtttgacagctcattttgaagattacattataaaaggaatatacctggtgggtgcatagtaagtgctcagtaaattgtttgttctaagccacttttaaaaatggtttcattccttgtagaattgaatgcgagtggattaataatttaccttactttcttactagtgtccagttatattgttttttagaacaacacttggaaaataatttgcagtgattatatttctgaacaaggttcagaaaacattgtttactaagaatttagtctaataatttcagttaggcgctcatcagttctccagagtggttgagtttgtaataccttgtttaaagaataatggcttgttcacgtgtgtgctatgaaaaatgatgtcccatgttcacataaatttgggaaattctggactaagacttaagtctcgttaatcaaatctctttatagttaggcttctgtacattatgtatctccagtagcaatgttgccatattatttatttcccaaacttagtggacaatggagtcatttctacctagagtaccagtaaacatctcccagtgtgctatagtagaaaatgtctactcctcactgctgacatgttaaacttactcttggtttagagcatgtgtagaaacacctaaggtagctctatgctaaataatgaagagtagcacaagaatgaatgtatttgctgatacgttgctcacattctcaagcaaaaattcaactgcattaaccgatctgagagttttcctttaacctggactgtgtttctcaagcacattttttctttgttcactgcccaaggactagaactgtatttttaaggttgttttcccctaaaaggacctttagtaagcaaatttattattaaatgtgcacatcttattcacccaagggaataaaagctacttcgtaatgttgttactaaattttatcttgaaaataaataacagtgtttgaggacagaagaaactaggactgttgttgagataaaatctgttttcagcctgactgctttagtcactggacgagcatcagctactgcggtgtcagatcacttctcgagtagaggtctgcctagtgagtgagcaggagaacatcatcttaatagcctttggctcacccagagtcagggagagatgaaaataataggtcagaatgcaagtgacttaatcacagtcttcctagaattatctgtttatgttgcatgaatgcataagaaaaaaattctgtcatgttcccaaggtagaattgtaataagcatgtgccagtgtgaaagctggaaggaaaaaagctattctctaacaggagaacataaagattcatttctctcccaccctcaactccaccaaagtaaatcctttcgatagtaaaagtttaa

SEQ ID NO: 122664 - DNA, 4009 bp, Homo sapiens
  Payload ID: 4032
  Gene Symbol: CRNKL1
  Gene Name: crooked neck pre-mRNA splicing factor 1
  Uniprot ID: Q9BZJ0
  ENST ID: ENST00000536226
  CDS Start-End: 125-2188
agttccgcttccggttccgagatcctgtttgttttctgaaagctttgtggtttcggtgagctctcagagccgatttctagcgtccgtgccggggacaggtgtccagaggtcgactgctgcagacatggcggcctccaccgcggccgggaagcagcggattcccaaagtggccaaggtgaaaaacaaagccccggctgaggtacagataactgctgaacaactcttaagagaggctaaagaaagagaacttgagcttcttccacctccacctcaacagaagatcacagatgaagaagaattaaatgattataaactaaggaaaaggaagacttttgaagataatataagaaaaaacaggactgtgattagtaactggataaaatacgcacaatgggaagaaagcctaaaggagattcaaagggctcgatccatatacgagcgtgctttagatgtagactaccgaaatattacactctggctgaaatacgcagaaatggaaatgaagaatcgccaagtcaaccatgctcgaaatatctgggaccgggccataacaacgctgcctcgagttaatcagttctggtacaagtacacgtacatggaggaaatgttgggaaacgttgccggtgcccggcaggtgtttgagcgctggatggagtggcagcctgaggagcaagcctggcactcctacatcaactttgagctgagatacaaagaggtggatcgggcccgcaccatttatgagcgatttgtcctcgtgcaccctgatgttaagaactggatcaagtatgcccgctttgaagaaaaacatgcttattttgcccatgcacggaaagtgtatgagagagctgtggaattctttggagatgaacatatggatgagcacctttatgttgcctttgccaagtttgaagaaaatcagaaagagtttgaaagggtacgagtgatttacaagtatgccctggacagaatttcaaaacaagatgcccaagaactctttaaaaattataccatctttgagaagaagtttggtgataggcggggtattgaagatatcattgtgagcaaacggagattccagtacgaagaagaagtgaaggcgaatccacacaattatgatgcatggtttgattacttgcgcttggtagaaagtgacgcagaagctgaagccgtgagagaagtctatgaaagggccattgccaatgtcccacccattcaggagaagaggcactggaagcgctacatttatctttggatcaactatgcactctatgaagaattggaggcaaaggatcctgagaggacaagacaggtgtatcaagcctctttggaactaattcctcacaaaaagttcacatttgccaaaatgtggatactgtatgcacagtttgaaatacgacagaagaatctgtcattagccagaagagcattgggaacttccataggcaaatgtccaaagaacaaattatttaaagtttacatagaattggagctacagcttcgagaatttgacagatgccggaagctttatgaaaagttcctggaatttggacctgaaaattgtacctcatggattaaattcgctgaattagagacaatccttggtgatattgacagagcacgggcaatctatgaattagccatcagtcagccacgtttagacatgccagaggtgctttggaaatcatatattgattttgaaattgagcaggaagaaacagaaagaacacgaaacctttaccggcggttgcttcaacggacgcagcatgtcaaggtatggatcagctttgctcagtttgagttgtcttcaggaaaagaaggaagtttgactaaatgcagacaaatttatgaagaagctaacaaaaccatgcgaaactgtgaagaaaaggaagagagacttatgctgctggaatcttggcgaagttttgaagaagaatttggaacagcttcagataaggagagagtagacaaactcatgccagagaaagtcaagaagagaagaaaggtccagactgatgatgggtctgatgcaggctgggaagaatactttgattacatctttccagaagatgctgccaaccaacctaacctcaaactcctggccatggccaaactgtggaagaaacagcagcaggaaaaggaggatgctgagcaccatccagatgaggacgtcgatgagagtgaatcctgatctttttttcatagacaaatgttttgttatttttataaattaattgtttggaactcttgtgactcctggaagttcttatatatttcaccagtaagaaattgattggtatctttgatggctactttttaagttattttttaaatgctcttgggttagctaggggtagggattgcaagtaaaggacttttttaactgctggatttgtttttccaactgagtccaaacttttctaatgtctgtccacatcatgcattaggaaatgtaattaaggtaacattctacagttacttttcatgtcatacccataaagatagtttatgcattcatctgaaatgtgtaactttttcatgtcttcagagtcacagacttgagttcatttcccagctctgccactcatgattatataacttaattttcattttcctcattcacaaaatgggccaatagtttgacagctcattttgaagattacattataaaaggaatatacctggtgggtgcatagtaagtgctcagtaaattgtttgttctaagccacttttaaaaatggtttcattccttgtagaattgaatgcgagtggattaataatttaccttactttcttactagtgtccagttatattgttttttagaacaacacttggaaaataatttgcagtgattatatttctgaacaaggttcagaaaacattgtttactaagaatttagtctaataatttcagttaggcgctcatcagttctccagagtggttgagtttgtaataccttgtttaaagaataatggcttgttcacgtgtgtgctatgaaaaatgatgtcccatgttcacataaatttgggaaattctggactaagacttaagtctcgttaatcaaatctctttatagttaggcttctgtacattatgtatctccagtagcaatgttgccatattatttatttcccaaacttagtggacaatggagtcatttctacctagagtaccagtaaacatctcccagtgtgctatagtagaaaatgtctactcctcactgctgacatgttaaacttactcttggtttagagcatgtgtagaaacacctaaggtagctctatgctaaataatgaagagtagcacaagaatgaatgtatttgctgatacgttgctcacattctcaagcaaaaattcaactgcattaaccgatctgagagttttcctttaacctggactgtgtttctcaagcacattttttctttgttcactgcccaaggactagaactgtatttttaaggttgttttcccctaaaaggacctttagtaagcaaatttattattaaatgtgcacatcttattcacccaagggaataaaagctacttcgtaatgttgttactaaattttatcttgaaaataaataacagtgtttgaggacagaagaaactaggactgttgttgagataaaatctgttttcagcctgactgctttagtcactggacgagcatcagctactgcggtgtcagatcacttctcgagtagaggtctgcctagtgagtgagcaggagaacatcatcttaatagcctttggctcacccagagtcagggagagatgaaaataataggtcagaatgcaagtgacttaatcacagtcttcctagaattatctgtttatgttgcatgaatgcataagaaaaaaattctgtcatgttcccaaggtagaattgtaataagcatgtgccagtgtgaaagctggaaggaaaaaagctattctctaacaggagaacataaagattcatttctctcccaccctcaactccaccaaagtaaatcctttcgatagtaaaa

SEQ ID NO: 122665 - DNA, 9023 bp, Homo sapiens
  Payload ID: 4033
  Gene Symbol: CRB1
  Gene Name: crumbs family member 1, photoreceptor morphogenesis associated
  ENST ID: ENST00000367397
  CDS Start-End: 859-2883
gcgagaaagaggtgacattgaagaacaagcccacacttctggatatggtccaaaatgatcagaaactcactctgtcaacctagtaggtgtttggatggatacctcttttttaacagaaagatgtttggagccaggacacatggttttcacattttaatggcaatgctcataggaatccactgcgaagaagacgtcaatgaatgttcttcaaacccttgccaaaatggtggtacttgtgagaacttgcctgggaattatacttgccattgcccatttgataacctttctagaactttttatggaggaagggactgttctgatattctcctgggctgtacccatcagcaatgtctaaataatggaacatgcatccctcacttccaagatggccagcatggattcagctgcctatgtccatctggctacaccgggtccctgtgtgaaatcgcaaccacactttcatttgagggcgatggcttcctgtgggtcaaaagtggctcagtgacaaccaagggctcagtttgtaacatagccctcaggtttcagactgttcagccaatggctcttctacttttccgaagcaacagggatgtgtttgtgaagctggagctgctaagtggctacattcacttatcaattcaggtcaataatcagtcaaaggtgcttctgttcatttcccacaacaccagcgatggagagtggcatttcgtggaggtaatatttgcagaggctgtgacccttaccttaatcgacgactcctgtaaggagaaatgcatcgcgaaagctcctactccacttgaaagtgatcaatcaatatgtgcttttcagaactcctttttgggtggtttaccagtgggaatgaccagcaatggtgttgctctgcttaacttctataatatgccatccacaccttcgtttgtaggctgtctccaagacattaaaattgattggaatcacattaccctggagaacatctcgtctggctcatcattaaatgtcaaggcaggctgtgtgagaaaggattggtgtgaaagccaaccttgtcaaagcagaggacgctgcatcaacttgtggctgagttaccagtgtgactgccacaggccctatgaaggccccaactgtctgagagagtatgtggcaggcagatttggccaggatgactccactggttatgtcatctttactcttgatgagagctatggagacaccatcagcctctccatgtttgtccgaacgcttcaaccatcaggcttacttctagctttggaaaacagcacttatcaatatatccgtgtctggctagagcgcggcagactagcaatgctgactccaaactctcccaaattagtagtaaaatttgttcttaatgatggaaatgtccacttgatatctttgaaaatcaagccatataaaattgaactgtatcagtcttcacaaaacctaggatttatttctgcttctacgtggaaaatcgaaaagggagatgtcatctacattggtggcctacctgacaagcaagagactgaacttaatggtggattcttcaaaggctgtatccaagatgtaagactaaacaaccaaaatctggaattctttccaaatccaacaaacaatgcatctctcaatccagttcttgtcaatgtaacccaaggctgtgctggagacaacagctgcaagtccaacccctgtcacaatggaggtgtttgccattcccggtgggatgacttctcctgttcctgtcctgccctcacaagtgggaaagcctgtgaggaggttcagtggtgtggattcagcccgtgtcctcacggagcccagtgccagccggtgcttcaaggatttgaatgtattgcaaatgctgtttttaatggacaaagcggtcaaatattattcagaagcaatgggaatattaccagagaactcaccaatatcacatttggtttcagaacaagggatgcaaatgtaataatattgcatgcagaaaaagagcctgaatttcttaatattagcattcaagattccagattattctttcaattgcaaagtggcaacagcttttatatgctaagtctgacaagtttgcagtcagtgaatgatggcacatggcacgaagtgaccctttccatgacagacccactgtcccagacctccaggtggcaaatggaagtggacaacgaaacaccttttgtgaccagcacaattgctactggaagcctcaactttttgaaggataatacagatatttatgtgggagacagagctattgacaatataaagggcctgcaagggtgtctaagtacaatagaaatcggaggcatttatctctcttactttgaaaatgttcatggtttcattaataaacctcaggaagagcaatttctcaaaatctctaccaattcagtggtcactggctgtttgcagttaaatgtctgcaactccaacccctgtttgcatggaggaaactgtgaagacatctatagctcttatcattgctcctgtcccttgggatggtcagggaaacactgtgaactcaacatcgatgaatgcttttcaaacccctgtatccatggcaactgctctgacagagttgcagcctaccactgcacatgtgagcctggatacactggtgtgaactgtgaagtggatatagacaactgccagagtcaccagtgtgcaaatggagccacctgcattagtcatactaatggctattcttgcctctgttttggaaattttacaggaaaattttgcagacagagcagattaccctcaacagtctgtgggaatgagaagacaaatctcacttgctacaatggaggcaactgcacagagttccagactgaattaaaatgtatgtgccggccaggttttactggagaatggtgagtcacattagagccttctggaagagaattctgagctaaagaatgatgggattactcaaagttcattttctcctctaattttttatctcagttcccataggaaaatctatgctgaaatagaggttcagacagaatgaaacaataaaaaagaagaaaaactacagtttaggtcaaaggggagaacattttattagacaaaacttcaaatagggaaaaatgatttttaaaaaatgtataatgtgctatttttctttcttataagtacttctgaattcatgtctcttttttgttgctaactctaatacatgatgcaaatatggttgctgtcgaggtaaaataaattacaactaaaagattgcctcatagaattgcctacaacccaaaagtatatataccttatccatatgagtctacttttcccagagaaactcttcaactgttcttcacctcatacaggaattcttaaaatggagttggtcaatggcttcaggcaatctgtgacctgctgaaaatacaggaaaattagaatatgtatttgagtggctaggggtaagttcaggggtagaaataatgcatactgaatagcttttatcagctgcttaaagggatttatgtccccaaaacagttatgaactggggctctatagaatacagatactatataagcagataattgttaaccttttgttttagcactgtgccatgcaccttacaaataccatctctaattcttatagctctgtaaagaaggtttcatgatttttattttgcatatgtgtaaactgaggctgagaggttgagtgacgtataaagggcctatccacacgtttgctgcagtaaggttgagctgccttcaaagcctctgctcttctatttgatgtgccagcataactgtatgaataaatctttgctcaacacaatttctttttttttaatgagaaaggtgttcttccatctcatgtatcatcgagggtaagataagtgatctctgatcaaacttcctacattgaaaaaattaaataaactgagctcagacatatttgacaaagatattttgactgactcaatatttcccataagcatagttaataaaataatggatatgtgagtgctccctggcaagtgccctttggattaattggaattttctgttttctagctggcctcttttgcatcacaaagacacaggtcttttgccatttttacaaaacagcggggagtctagggtatacctgaatttgacccttttaacgttcattttcatttgcagcctgccttctgtggttggttctttgtggtacaggcattccaagtctatatgtgcatgaaaggagatagccttgagtcacattctgctttctgttgcaccaattttggttctgcaacttattaactgagatcgtttagttgtattccaattccatgtatctttcaaaatattgcaaatattttcttgtcattaattttgagtaatccaactattgtcaagggtgggttgcttcctggttgaacgtcacactttctgcctaatggcacaatgcatggaactcatccaaaaccctggattatttttctctgccactcacacattgtttctatttacaacaaatatctccctgtcttctgatatttattagtttacaaaatttatatttgacatttaaattcagatatatttgaaatatagaaagaaaagaaagcttagagttttccttcttttcccaggagacttttcaactggaaaaacttacatgatgctagatatttctaaaacattgaacctgtgttcagtagattctatgctttcaaagtccttaaccatcattacttaattgactagatgttaatggatttatttttacttttcatgcattaattaacctctaataaaaatgccaatgatgctgataatacatgtgtatctattgttgactgtttagttcaacagagaaataggtgagaaagtgatggagtagttagaggaagacagaaaatagtgggctatctcccatggcctagggaaatgtgacttccatcacatccaaggatattgaaaagctatcctcaaataaattggcttctctcctgccttggttaaaccttcagcttaatagtgtcatcctggcaggttttgaatgatggatggtgtgaacactctggcccacccaagaccgagaatgcttggcaggctcctgagggttgtcaagttttgctcagatctaatcagagaagtctccctccagtccagaagcataagccaaaaaaggaaaacaaaatgtctcagctatgcttggtatccaaagggataaggagctgtttttcttggaagaaatctttgttttcctttataccttgggctggccttgccccactacctcaccccctttcattttgagcctagtgattagtctctgacccatacgtgcaagttttacattttggaaggtgagggaaagaataagggaaaattaaaaattgtttacatacaatttcaacattataagctgcactatagagatcttggagctaagattttatataaattttcaaaagtaaaatagccgccttagttgctgttctatcccaaggtcttagcagagtgtttgtcacatagtatgtgttaaataaatatccactgtgtgactgaatacatgattggtgacttaatccatgaatatacagaaaaacaaattcttgctggaaaattagtttaaaaaaatgacaatatcccaggaagaagaaaacttcaatttacctgagacttgatgtcacttgtcttggaaaatttggcttttgaaagtcattctacctcaacatttcagaaattatgcttggctattggaacacagatttattagcaagtacaatcttctaattattgatttttgcttttgttataaaaaaaggatttccacagaaaataattcaaaatctctcagaataaacctctcctcttcctcctcctcctccttccctccttcttttttttttttttttttttttttggtttctctttggtgggctttttccttagcctgagggctctgatgcatgaggatcctgatagcctgaatgtaggtctgccctgcagactccagatggcaaaatacagcctctctccttgtgcccctaataaactgaacatttatataaggtggcaaccacactaatgctcttgagcattgacactggtgtaggcatggcccacttttctcttggtttctaaatatttgcatctattttctcattctaattaattccgtgtgtatatgtatatatatgtgtacagattatttccattaaaccccaaatgtgttaaagaaattttaagaaacatctccgacattatcaagtatgtataaagtatgtgtggatgggtagataagactgtgctgttccagagagataaggcaaactttttcttcccatttcacaaccaatgtattcaacagggacctgggtttctgctgttctgtttattttgaaggtgtgaaaaggacattgatgagtgtgcctctgatccgtgtgtcaatggaggtctgtgccaggacttactcaacaaattccagtgcctctgtgatgttgcctttgctggcgagcgctgcgaggtggacgtaagcagcctctccttttatgtctctctcttattctggcagaatctttttcagcttctttcttacctcattttgcgtatgaatgacgagccagttgttgagtggggtgaacaggaagattattaacatacatttgaacattcccaaatgaaaaaaaaagccattgaatttcaagaaatgccttgattcattttagatctctggggaagaaaaaggaaataaaaaccatctcaataattaaggtaaattcaaggcttattttaaacatatcagaagcactttgtctgtgtataaaatattttcctattctaactttaaatatgaaaaaagtgttcttaatataactagaaatatctccttattgtgtgtatttagtacaaacatattatcattctcaacacttctatatgtgaatgaccactgcaatttcttcccactccatttctgggtattttcacattttaagttgccctccatcactatgattctattttcatttctgttctttcattcttatctattatttatgacacaaaaattgagaattacaggccaggtgtggtggttcactcctataatcccagcactatgggaggctgaagtgggcggaacacctgaggccaggagtttgagaccagcctagccaacgtggtgaaaacctgtctctactaaaaatacaaaagtaactgggagtggtggcacatgcctgtaatcccagctactcaggagggtgaagcaggagacttgcttgaacccaggaggcggccgttgcaatgagccaagattgtgccactgcactccagcctgggcgacaggtgagattctgtctaaaaaaaaaaaaaaaaaaagagagaattaccgattaaaattactgattatattcatctatgtttttacatgaagctattcaaatgaattgttacgttttctctgatatatgattaaatatataaagagaaatcaggaatttacatcgagtccctaaattgtagaaaaacaattatctagtatcagtactcaaattatacctccctggtataatttctgattccataaaactgtctctctaacaaagttacaaataatcctttctctatttcctttcctgcaatactttcccttttcctaacaaatagaacaatttttctgttgtttctaaatttatgagctccttgacttttctatcaaatggactaatttcagttgcttttcaatgaatatttaataaaaataagcactgtagtttatacataaatttaaaagtatatattgtaaaacttgaattttcttagaagcatggttttctaagatttgcaagtaaatttattttcttaagtatctttcagaaaaaaatatgaaagcatagtatacatcataaccaaaatatatttgacattatgattttttaaaataaatgtatacctgaaataatggatctataaagtatactaagatatgcaaaaattaatatattctttattataaatatttcagagattataaaataataatttaaaaaaactttcttaatgtttttattgtttccaccagtacgttatcatttatgctaaatatctttgtgtagatatacccttccaaagaagacgttatttgtgttcatttaaaggaaaaatagtttgatcctatgaattaattcagaaagcaactaaaataacaatggcctgccaaatgtcattttgtaaatatacgtctatgactttaggagctgtcctggtttgaaaacatgaggacagtttatccattggatgccatctatttagtcccaattaagaaagttgtttttttgtgagaatgaccaaggtaaatttaaatataccattcaaacaaacaaggacaaaataatatccttgttatagagtacatgtagcatatagtatgaagtaatatactacaaaagcaaagaaagtgtattctatcttgcaatagtaatagacaatttttatatagcaaattcatatcctttggagtagtgacaatcatttcaaactgggagcaactaattgtgaagattttccttcttactcatccattttcttcacatccaaggctgaacgtgtgatgctgctgcttcagatgatttgttccaaagttaaattttgtgacaaaagacatggggaaaaccttcccatcaatatttacattcacaagtatttgcaataagcataaaatagattatagccagaccatatgtatagttttcacatttactcccttctagacatacctgtacttatgtacttacaggctgttccaaatgtaatatgttctctaccaaatgtggttaagaaatattcactcacaatttctttctgtgtacaattctgatgcctctgttgtcactgtaattgtcagttgcttttctgttttccaaatgtcttcttgtcataaggtatctgactttaaaaaatgttttcccttttctttttattcttctgtattttccagctgcatgtgtgtgactatggcttttacatatttgcacagaaaaataaaacctttgtttctg

SEQ ID NO: 122666 - DNA, 3885 bp, Homo sapiens
  Payload ID: 4033
  Gene Symbol: CRB1
  Gene Name: crumbs family member 1, photoreceptor morphogenesis associated
  Uniprot ID: P82279
  ENST ID: ENST00000367399
  CDS Start-End: 1-3885
atggcacttaagaacattaactaccttctcatcttctacctcagtttctcactgcttatctacataaaaaattccttttgcaataaaaacaacaccaggtgcctctcaaattcttgccaaaacaattctacatgcaaagatttttcaaaagacaatgattgttcttgttcagacacagccaataatttggacaaagactgtgacaacatgaaagacccttgcttctccaatccctgtcaaggaagtgccacttgtgtgaacaccccaggagaaaggagctttctgtgcaaatgtcctcctgggtacagtgggacaatctgtgaaactaccattggttcctgtggcaagaactcctgccaacatggaggtatttgccatcaggaccctatttatcctgtctgcatctgccctgctggatatgctggaagattctgtgagatagatcacgatgagtgtgcttccagcccttgccaaaatggggccgtgtgccaggatggaattgatggttactcctgcttctgtgtcccaggatatcaaggcagacactgcgacttggaagtggatgaatgtgcttcagatccctgcaagaacgaggctacatgcctcaatgaaataggaagatatacttgtatctgtccccacaattattctggatacacaggtgcccagtgtgagatcgacctcaatgaatgcaatagtaacccctgccagtccaatggggaatgtgtggagctgtcctcagagaaacaatatggacgcatcactggactgccttcttctttcagctaccatgaagcctcaggttatgtctgtatctgtcagcctggattcacaggaatccactgcgaagaagacgtcaatgaatgttcttcaaacccttgccaaaatggtggtacttgtgagaacttgcctgggaattatacttgccattgcccatttgataacctttctagaactttttatggaggaagggactgttctgatattctcctgggctgtacccatcagcaatgtctaaataatggaacatgcatccctcacttccaagatggccagcatggattcagctgcctatgtccatctggctacaccgggtccctgtgtgaaatcgcaaccacactttcatttgagggcgatggcttcctgtgggtcaaaagtggctcagtgacaaccaagggctcagtttgtaacatagccctcaggtttcagactgttcagccaatggctcttctacttttccgaagcaacagggatgtgtttgtgaagctggagctgctaagtggctacattcacttatcaattcaggtcaataatcagtcaaaggtgcttctgttcatttcccacaacaccagcgatggagagtggcatttcgtggaggtaatatttgcagaggctgtgacccttaccttaatcgacgactcctgtaaggagaaatgcatcgcgaaagctcctactccacttgaaagtgatcaatcaatatgtgcttttcagaactcctttttgggtggtttaccagtgggaatgaccagcaatggtgttgctctgcttaacttctataatatgccatccacaccttcgtttgtaggctgtctccaagacattaaaattgattggaatcacattaccctggagaacatctcgtctggctcatcattaaatgtcaaggcaggctgtgtgagaaaggattggtgtgaaagccaaccttgtcaaagcagaggacgctgcatcaacttgtggctgagttaccagtgtgactgccacaggccctatgaaggccccaactgtctgagagagtatgtggcaggcagatttggccaggatgactccactggttatgtcatctttactcttgatgagagctatggagacaccatcagcctctccatgtttgtccgaacgcttcaaccatcaggcttacttctagctttggaaaacagcacttatcaatatatccgtgtctggctagagcgcggcagactagcaatgctgactccaaactctcccaaattagtagtaaaatttgttcttaatgatggaaatgtccacttgatatctttgaaaatcaagccatataaaattgaactgtatcagtcttcacaaaacctaggatttatttctgcttctacgtggaaaatcgaaaagggagatgtcatctacattggtggcctacctgacaagcaagagactgaacttaatggtggattcttcaaaggctgtatccaagatgtaagactaaacaaccaaaatctggaattctttccaaatccaacaaacaatgcatctctcaatccagttcttgtcaatgtaacccaaggctgtgctggagacaacagctgcaagtccaacccctgtcacaatggaggtgtttgccattcccggtgggatgacttctcctgttcctgtcctgccctcacaagtgggaaagcctgtgaggaggttcagtggtgtggattcagcccgtgtcctcacggagcccagtgccagccggtgcttcaaggatttgaatgtattgcaaatgctgtttttaatggacaaagcggtcaaatattattcagaagcaatgggaatattaccagagaactcaccaatatcacatttggtttcagaacaagggatgcaaatgtaataatattgcatgcagaaaaagagcctgaatttcttaatattagcattcaagattccagattattctttcaattgcaaagtggcaacagcttttatatgctaagtctgacaagtttgcagtcagtgaatgatggcacatggcacgaagtgaccctttccatgacagacccactgtcccagacctccaggtggcaaatggaagtggacaacgaaacaccttttgtgaccagcacaattgctactggaagcctcaactttttgaaggataatacagatatttatgtgggagacagagctattgacaatataaagggcctgcaagggtgtctaagtacaatagaaatcggaggcatttatctctcttactttgaaaatgttcatggtttcattaataaacctcaggaagagcaatttctcaaaatctctaccaattcagtggtcactggctgtttgcagttaaatgtctgcaactccaacccctgtttgcatggaggaaactgtgaagacatctatagctcttatcattgctcctgtcccttgggatggtcagggaaacactgtgaactcaacatcgatgaatgcttttcaaacccctgtatccatggcaactgctctgacagagttgcagcctaccactgcacatgtgagcctggatacactggtgtgaactgtgaagtggatatagacaactgccagagtcaccagtgtgcaaatggagccacctgcattagtcatactaatggctattcttgcctctgttttggaaattttacaggaaaattttgcagacagagcagattaccctcaacagtctgtgggaatgagaagacaaatctcacttgctacaatggaggcaactgcacagagttccagactgaattaaaatgtatgtgccggccaggttttactggagaatggtgtgaaaaggacattgatgagtgtgcctctgatccgtgtgtcaatggaggtctgtgccaggacttactcaacaaattccagtgcctctgtgatgttgcctttgctggcgagcgctgcgaggtggacttggcagatgacttgatctccgacattttcaccactattggctcagtgactgtcgccttgttactgatcctcttgctggccattgttgcttctgttgtcacctccaacaaaagggcaactcagggaacctacagccccagccgtcaggagaaggagggctcccgagtggaaatgtggaacttgatgccaccccctgcaatggagagactgatttag

SEQ ID NO: 122667 - DNA, 4932 bp, Homo sapiens
  Payload ID: 4033
  Gene Symbol: CRB1
  Gene Name: crumbs family member 1, photoreceptor morphogenesis associated
  Uniprot ID: P82279
  ENST ID: ENST00000367400
  CDS Start-End: 136-4356
tgtaagtagggtgggacagagatggcacctgggggttctgaggcacccgctcctctctgagacagacagggatcaggagccggactgggaccagaccaccagcaacacaccagaggatgttctctaaataagaccatggcacttaagaacattaactaccttctcatcttctacctcagtttctcactgcttatctacataaaaaattccttttgcaataaaaacaacaccaggtgcctctcaaattcttgccaaaacaattctacatgcaaagatttttcaaaagacaatgattgttcttgttcagacacagccaataatttggacaaagactgtgacaacatgaaagacccttgcttctccaatccctgtcaaggaagtgccacttgtgtgaacaccccaggagaaaggagctttctgtgcaaatgtcctcctgggtacagtgggacaatctgtgaaactaccattggttcctgtggcaagaactcctgccaacatggaggtatttgccatcaggaccctatttatcctgtctgcatctgccctgctggatatgctggaagattctgtgagatagatcacgatgagtgtgcttccagcccttgccaaaatggggccgtgtgccaggatggaattgatggttactcctgcttctgtgtcccaggatatcaaggcagacactgcgacttggaagtggatgaatgtgcttcagatccctgcaagaacgaggctacatgcctcaatgaaataggaagatatacttgtatctgtccccacaattattctggtgtaaactgtgaattggaaattgacgaatgttggtcccagccttgtttaaatggtgcaacttgtcaggatgctctgggggcctatttctgcgactgtgcccctggattcctgggggatcactgtgaactcaacactgatgagtgtgccagtcaaccttgtctccatggagggctgtgtgtggatggagaaaacagatatagctgtaactgcacgggtagtggattcacagggacacactgtgagaccttgatgcctctttgttggtcaaaaccttgtcacaataatgctacatgtgaggacagtgttgacaattacacttgtcactgctggcctggatacacaggtgcccagtgtgagatcgacctcaatgaatgcaatagtaacccctgccagtccaatggggaatgtgtggagctgtcctcagagaaacaatatggacgcatcactggactgccttcttctttcagctaccatgaagcctcaggttatgtctgtatctgtcagcctggattcacaggaatccactgcgaagaagacgtcaatgaatgttcttcaaacccttgccaaaatggtggtacttgtgagaacttgcctgggaattatacttgccattgcccatttgataacctttctagaactttttatggaggaagggactgttctgatattctcctgggctgtacccatcagcaatgtctaaataatggaacatgcatccctcacttccaagatggccagcatggattcagctgcctatgtccatctggctacaccgggtccctgtgtgaaatcgcaaccacactttcatttgagggcgatggcttcctgtgggtcaaaagtggctcagtgacaaccaagggctcagtttgtaacatagccctcaggtttcagactgttcagccaatggctcttctacttttccgaagcaacagggatgtgtttgtgaagctggagctgctaagtggctacattcacttatcaattcaggtcaataatcagtcaaaggtgcttctgttcatttcccacaacaccagcgatggagagtggcatttcgtggaggtaatatttgcagaggctgtgacccttaccttaatcgacgactcctgtaaggagaaatgcatcgcgaaagctcctactccacttgaaagtgatcaatcaatatgtgcttttcagaactcctttttgggtggtttaccagtgggaatgaccagcaatggtgttgctctgcttaacttctataatatgccatccacaccttcgtttgtaggctgtctccaagacattaaaattgattggaatcacattaccctggagaacatctcgtctggctcatcattaaatgtcaaggcaggctgtgtgagaaaggattggtgtgaaagccaaccttgtcaaagcagaggacgctgcatcaacttgtggctgagttaccagtgtgactgccacaggccctatgaaggccccaactgtctgagagagtatgtggcaggcagatttggccaggatgactccactggttatgtcatctttactcttgatgagagctatggagacaccatcagcctctccatgtttgtccgaacgcttcaaccatcaggcttacttctagctttggaaaacagcacttatcaatatatccgtgtctggctagagcgcggcagactagcaatgctgactccaaactctcccaaattagtagtaaaatttgttcttaatgatggaaatgtccacttgatatctttgaaaatcaagccatataaaattgaactgtatcagtcttcacaaaacctaggatttatttctgcttctacgtggaaaatcgaaaagggagatgtcatctacattggtggcctacctgacaagcaagagactgaacttaatggtggattcttcaaaggctgtatccaagatgtaagactaaacaaccaaaatctggaattctttccaaatccaacaaacaatgcatctctcaatccagttcttgtcaatgtaacccaaggctgtgctggagacaacagctgcaagtccaacccctgtcacaatggaggtgtttgccattcccggtgggatgacttctcctgttcctgtcctgccctcacaagtgggaaagcctgtgaggaggttcagtggtgtggattcagcccgtgtcctcacggagcccagtgccagccggtgcttcaaggatttgaatgtattgcaaatgctgtttttaatggacaaagcggtcaaatattattcagaagcaatgggaatattaccagagaactcaccaatatcacatttggtttcagaacaagggatgcaaatgtaataatattgcatgcagaaaaagagcctgaatttcttaatattagcattcaagattccagattattctttcaattgcaaagtggcaacagcttttatatgctaagtctgacaagtttgcagtcagtgaatgatggcacatggcacgaagtgaccctttccatgacagacccactgtcccagacctccaggtggcaaatggaagtggacaacgaaacaccttttgtgaccagcacaattgctactggaagcctcaactttttgaaggataatacagatatttatgtgggagacagagctattgacaatataaagggcctgcaagggtgtctaagtacaatagaaatcggaggcatttatctctcttactttgaaaatgttcatggtttcattaataaacctcaggaagagcaatttctcaaaatctctaccaattcagtggtcactggctgtttgcagttaaatgtctgcaactccaacccctgtttgcatggaggaaactgtgaagacatctatagctcttatcattgctcctgtcccttgggatggtcagggaaacactgtgaactcaacatcgatgaatgcttttcaaacccctgtatccatggcaactgctctgacagagttgcagcctaccactgcacatgtgagcctggatacactggtgtgaactgtgaagtggatatagacaactgccagagtcaccagtgtgcaaatggagccacctgcattagtcatactaatggctattcttgcctctgttttggaaattttacaggaaaattttgcagacagagcagattaccctcaacagtctgtgggaatgagaagacaaatctcacttgctacaatggaggcaactgcacagagttccagactgaattaaaatgtatgtgccggccaggttttactggagaatggtgtgaaaaggacattgatgagtgtgcctctgatccgtgtgtcaatggaggtctgtgccaggacttactcaacaaattccagtgcctctgtgatgttgcctttgctggcgagcgctgcgaggtggacttggcagatgacttgatctccgacattttcaccactattggctcagtgactgtcgccttgttactgatcctcttgctggccattgttgcttctgttgtcacctccaacaaaagggcaactcagggaacctacagccccagccgtcaggagaaggagggctcccgagtggaaatgtggaacttgatgccaccccctgcaatggagagactgatttaggagcattgtgtcccttcgagatggggatccacacactgtgaatgtgatgactgtacttcaggtatctctgacatacctgacaatgttaatctgcaactgggattacactggaactacaggaatgattcctttgaccaccttaaaaactttcacagtggttccgctcgacaccattgttttattatattatatcagccaattgcaaaaaaagtctgtgccagtaatttcagccttataattagcaaaaacatcttccagagaataaagtcttctgtggctttagtggctatcactgaaactctttcctcttttcaacctgggaacaaattttagttttcattttaggtttctgtactttctgtagtttctgtgtaaactgccatatgtttacatggaaactacaggaaaaaattggctacatttctcacttctcctatcatgtggtcaaagttattgttgtataccagcgatgggatgtatacttttgtccttcattcatggattcagagaaagctctgggaatgacttatggtccaaaaaagtgacccaatggcaacaaataaaaattgaaatgca

SEQ ID NO: 122668 - DNA, 1031 bp, Homo sapiens
  Payload ID: 4033
  Gene Symbol: CRB1
  Gene Name: crumbs family member 1, photoreceptor morphogenesis associated
  ENST ID: ENST00000448952
  CDS Start-End: 1-129
gaaaaggacattgatgagtgtgcctctgatccgtgtgtcaatggaggtctgtgccaggacttactcaacaaattccagtgcctctgtgatgttgcctttgctggcgagcgctgcgaggtggactactgagtggtaccagcttgctctggttggtcttcattcctgagtagttccattgtcctgaatatttatttgcctttgctatagaattcgcatcccaatgatttcaatctttccagttggcagatgacttgatctccgacattttcaccactattggctcagtgactgtcgccttgttactgatcctcttgctggccattgttgcttctgttgtcacctccaacaaaagggcaactcagggaacctacagccccagccgtcaggagaaggagggctcccgagtggaaatgtggaacttgatgccaccccctgcaatggagagactgatttaggagcattgtgtcccttcgagatggggatccacacactgtgaatgtgatgactgtacttcaggtatctctgacatacctgacaatgttaatctgcaactgggattacactggaactacaggaatgattcctttgaccaccttaaaaactttcacagtggttccgctcgacaccattgttttattatattatatcagccaattgcaaaaaaagtctgtgccagtaatttcagccttataattagcaaaaacatcttccagagaataaagtcttctgtggctttagtggctatcactgaaactctttcctcttttcaacctgggaacaaattttagttttcattttaggtttctgtactttctgtagtttctgtgtaaactgccatatgtttacatggaaactacaggaaaaaattggctacatttctcacttctcctatcatgtggtcaaagttattgttgtataccagcgatgggatgtatacttttgtccttcattcatggattcagagaaagctctgggaatgacttatggtccaaaaaagtgacccaatggcaacaaataaaaattgaaatgca

SEQ ID NO: 122669 - DNA, 5174 bp, Homo sapiens
  Payload ID: 4033
  Gene Symbol: CRB1
  Gene Name: crumbs family member 1, photoreceptor morphogenesis associated
  Uniprot ID: P82279
  ENST ID: ENST00000484075
  CDS Start-End: 136-4266
tgtaagtagggtgggacagagatggcacctgggggttctgaggcacccgctcctctctgagacagacagggatcaggagccggactgggaccagaccaccagcaacacaccagaggatgttctctaaataagaccatggcacttaagaacattaactaccttctcatcttctacctcagtttctcactgcttatctacataaaaaattccttttgcaataaaaacaacaccaggtgcctctcaaattcttgccaaaacaattctacatgcaaagatttttcaaaagacaatgattgttcttgttcagacacagccaataatttggacaaagactgtgacaacatgaaagacccttgcttctccaatccctgtcaaggaagtgccacttgtgtgaacaccccaggagaaaggagctttctgtgcaaatgtcctcctgggtacagtgggacaatctgtgaaactaccattggttcctgtggcaagaactcctgccaacatggaggtatttgccatcaggaccctatttatcctgtctgcatctgccctgctggatatgctggaagattctgtgagatagatcacgatgagtgtgcttccagcccttgccaaaatggggccgtgtgccaggatggaattgatggttactcctgcttctgtgtcccaggatatcaaggcagacactgcgacttggaagtggatgaatgtgcttcagatccctgcaagaacgaggctacatgcctcaatgaaataggaagatatacttgtatctgtccccacaattattctggtgtaaactgtgaattggaaattgacgaatgttggtcccagccttgtttaaatggtgcaacttgtcaggatgctctgggggcctatttctgcgactgtgcccctggattcctgggggatcactgtgaactcaacactgatgagtgtgccagtcaaccttgtctccatggagggctgtgtgtggatggagaaaacagatatagctgtaactgcacgggtagtggattcacagggacacactgtgagaccttgatgcctctttgttggtcaaaaccttgtcacaataatgctacatgtgaggacagtgttgacaattacacttgtcactgctggcctggatacacaggtgcccagtgtgagatcgacctcaatgaatgcaatagtaacccctgccagtccaatggggaatgtgtggagctgtcctcagagaaacaatatggacgcatcactggactgccttcttctttcagctaccatgaagcctcaggttatgtctgtatctgtcagcctggattcacaggaatccactgcgaagaagacgtcaatgaatgttcttcaaacccttgccaaaatggtggtacttgtgagaacttgcctgggaattatacttgccattgcccatttgataacctttctagaactttttatggaggaagggactgttctgatattctcctgggctgtacccatcagcaatgtctaaataatggaacatgcatccctcacttccaagatggccagcatggattcagctgcctatgtccatctggctacaccgggtccctgtgtgaaatcgcaaccacactttcatttgagggcgatggcttcctgtgggtcaaaagtggctcagtgacaaccaagggctcagtttgtaacatagccctcaggtttcagactgttcagccaatggctcttctacttttccgaagcaacagggatgtgtttgtgaagctggagctgctaagtggctacattcacttatcaattcaggtcaataatcagtcaaaggtgcttctgttcatttcccacaacaccagcgatggagagtggcatttcgtggaggtaatatttgcagaggctgtgacccttaccttaatcgacgactcctgtaaggagaaatgcatcgcgaaagctcctactccacttgaaagtgatcaatcaatatgtgcttttcagaactcctttttgggtggtttaccagtgggaatgaccagcaatggtgttgctctgcttaacttctataatatgccatccacaccttcgtttgtaggctgtctccaagacattaaaattgattggaatcacattaccctggagaacatctcgtctggctcatcattaaatgtcaaggcaggctgtgtgagaaaggattggtgtgaaagccaaccttgtcaaagcagaggacgctgcatcaacttgtggctgagttaccagtgtgactgccacaggccctatgaaggccccaactgtctgagagagtatgtggcaggcagatttggccaggatgactccactggttatgtcatctttactcttgatgagagctatggagacaccatcagcctctccatgtttgtccgaacgcttcaaccatcaggcttacttctagctttggaaaacagcacttatcaatatatccgtgtctggctagagcgcggcagactagcaatgctgactccaaactctcccaaattagtagtaaaatttgttcttaatgatggaaatgtccacttgatatctttgaaaatcaagccatataaaattgaactgtatcagtcttcacaaaacctaggatttatttctgcttctacgtggaaaatcgaaaagggagatgtcatctacattggtggcctacctgacaagcaagagactgaacttaatggtggattcttcaaaggctgtatccaagatgtaagactaaacaaccaaaatctggaattctttccaaatccaacaaacaatgcatctctcaatccagttcttgtcaatgtaacccaaggctgtgctggagacaacagctgcaagtccaacccctgtcacaatggaggtgtttgccattcccggtgggatgacttctcctgttcctgtcctgccctcacaagtgggaaagcctgtgaggaggttcagtggtgtggattcagcccgtgtcctcacggagcccagtgccagccggtgcttcaaggatttgaatgtattgcaaatgctgtttttaatggacaaagcggtcaaatattattcagaagcaatgggaatattaccagagaactcaccaatatcacatttggtttcagaacaagggatgcaaatgtaataatattgcatgcagaaaaagagcctgaatttcttaatattagcattcaagattccagattattctttcaattgcaaagtggcaacagcttttatatgctaagtctgacaagtttgcagtcagtgaatgatggcacatggcacgaagtgaccctttccatgacagacccactgtcccagacctccaggtggcaaatggaagtggacaacgaaacaccttttgtgaccagcacaattgctactggaagcctcaactttttgaaggataatacagatatttatgtgggagacagagctattgacaatataaagggcctgcaagggtgtctaagtacaatagaaatcggaggcatttatctctcttactttgaaaatgttcatggtttcattaataaacctcaggaagagcaatttctcaaaatctctaccaattcagtggtcactggctgtttgcagttaaatgtctgcaactccaacccctgtttgcatggaggaaactgtgaagacatctatagctcttatcattgctcctgtcccttgggatggtcagggaaacactgtgaactcaacatcgatgaatgcttttcaaacccctgtatccatggcaactgctctgacagagttgcagcctaccactgcacatgtgagcctggatacactggtgtgaactgtgaagtggatatagacaactgccagagtcaccagtgtgcaaatggagccacctgcattagtcatactaatggctattcttgcctctgttttggaaattttacaggaaaattttgcagacagagcagattaccctcaacagtctgtgggaatgagaagacaaatctcacttgctacaatggaggcaactgcacagagttccagactgaattaaaatgtatgtgccggccaggttttactggagaatggtgtgaaaaggacattgatgagtgtgcctctgatccgtgtgtcaatggaggtctgtgccaggacttactcaacaaattccagtgcctctgtgatgttgcctttgctggcgagcgctgcgaggtggacgtaagcagcctctccttttatgtctctctcttattctggcagaatctttttcagcttctttcttacctcattttgcgtatgaatgacgagccagttgttgagtggggtgaacaggaagattattaacatacatttgaacattcccaaatgaaaaaaaaagccattgaatttcaagaaatgccttgattcattttagatctctggggaagaaaaaggaaataaaaaccatctcaataattaagttggcagatgacttgatctccgacattttcaccactattggctcagtgactgtcgccttgttactgatcctcttgctggccattgttgcttctgttgtcacctccaacaaaagggcaactcagggaacctacagccccagccgtcaggagaaggagggctcccgagtggaaatgtggaacttgatgccaccccctgcaatggagagactgatttaggagcattgtgtcccttcgagatggggatccacacactgtgaatgtgatgactgtacttcaggtatctctgacatacctgacaatgttaatctgcaactgggattacactggaactacaggaatgattcctttgaccaccttaaaaactttcacagtggttccgctcgacaccattgttttattatattatatcagccaattgcaaaaaaagtctgtgccagtaatttcagccttataattagcaaaaacatcttccagagaataaagtcttctgtggctttagtggctatcactgaaactctttcctcttttcaacctgggaacaaattttagttttcattttaggtttctgtactttctgtagtttctgtgtaaactgccatatgtttacatggaaactacaggaaaaaattggctacatttctcacttctcctatcatgtggtcaaagttattgttgtataccagcgatgggatgtatacttttgtccttcattcatggattcagagaaagctctgggaatgacttatggtccaaaaaagtgacccaatggcaacaaataaaaattgaaatgca

SEQ ID NO: 122670 - DNA, 3397 bp, Homo sapiens
  Payload ID: 4033
  Gene Symbol: CRB1
  Gene Name: crumbs family member 1, photoreceptor morphogenesis associated
  Uniprot ID: P82279
  ENST ID: ENST00000538660
  CDS Start-End: 210-2822
cctcccgtgtaagtgatgctaagaagcacaaactgcattttgaatctaagtccctgtattttctgtgaaggagctgtaagtagggtgggacagagatggcacctgggggttctgaggcacccgctcctctctgagacagacagggatcaggagccggactgggaccagaccaccagcaacacaccagaggatgttctctaaataagaccatggcacttaagaacattaactaccttctcatcttctacctcagtttctcactgcttatctacataaaaaattccttttgcaataaaaacaacaccaggtgcctctcaaattcttgccaaaacaattctacatgcaaagatttttcaaaagacaatgattgttcttgttcagacacagccaataatttggacaaagactgtgacaacatgaaagacccttgcttctccaatccctgtcaaggaagtgccacttgtgtgaacaccccaggagaaaggagctttctgtgcaaatgtcctcctgggtacagtgggacaatctgtgaaactaccattggttcctgtggcaagaactcctgccaacatggaggtatttgccatcaggaccctatttatcctgtctgcatctgccctgctggatatgctggaagattctgtgagatagatcacgatgagtgtgcttccagcccttgccaaaatggggccgtgtgccaggatggaattgatggttactcctgcttctgtgtcccaggatatcaaggcagacactgcgacttggaagtggatgaatgtgcttcagatccctgcaagaacgaggctacatgcctcaatgaaataggaagatatacttgtatctgtccccacaattattctggtgtaaactgtgaattggaaattgacgaatgttggtcccagccttgtttaaatggtgcaacttgtcaggatgctctgggggcctatttctgcgactgtgcccctggattcctgggggatcactgtgaactcaacactgatgagtgtgccagtcaaccttgtctccatggagggctgtgtgtggatggagaaaacagatatagctgtaactgcacgggtagtggattcacagggacacactgtgagaccttgatgcctctttgttggtcaaaaccttgtcacaataatgctacatgtgaggacagtgttgacaattacacttgtcactgctggcctggatacacaggtgcccagtgtgagatcgacctcaatgaatgcaatagtaacccctgccagtccaatggggaatgtgtggagctgtcctcagagaaacaatatggacgcatcactggactgccttcttctttcagctaccatgaagcctcaggttatgtctgtatctgtcagcctggattcacaggaatccactgcgaagaagacgtcaatgaatgttcttcaaacccttgccaaaatggtggtacttgtgagaacttgcctgggaattatacttgccattgcccatttgataacctttctagaactttttatggaggaagggactgttctgatattctcctgggctgtacccatcagcaatgtctaaataatggaacatgcatccctcacttccaagatggccagcatggattcagctgcctatgtccatctggctacaccgggtccctgtgtgaaatcgcaaccacactttcatttgagggcgatggcttcctgtgggtcaaaagtggctcagtgacaaccaagggctcagtttgtaacatagccctcaggtttcagactgttcagccaatggctcttctacttttccgaagcaacagggatgtgtttgtgaagctggagctgctaagtggctacattcacttatcaattcaggtcaataatcagtcaaaggtgcttctgttcatttcccacaacaccagcgatggagagtggcatttcgtggaggtaatatttgcagaggctgtgacccttaccttaatcgacgactcctgtaaggagaaatgcatcgcgaaagctcctactccacttgaaagtgatcaatcaatatgtgcttttcagaactcctttttgggtggtttaccagtgggaatgaccagcaatggtgttgctctgcttaacttctataatatgccatccacaccttcgtttgtaggctgtctccaagacattaaaattgattggaatcacattaccctggagaacatctcgtctggctcatcattaaatgtcaaggcaggctgtgtgagaaaggattggtgtgaaagccaaccttgtcaaagcagaggacgctgcatcaacttgtggctgagttaccagtgtgactgccacaggccctatgaaggccccaactgtctgagaggaaaattttgcagacagagcagattaccctcaacagtctgtgggaatgagaagacaaatctcacttgctacaatggaggcaactgcacagagttccagactgaattaaaatgtatgtgccggccaggttttactggagaatggtgtgaaaaggacattgatgagtgtgcctctgatccgtgtgtcaatggaggtctgtgccaggacttactcaacaaattccagtgcctctgtgatgttgcctttgctggcgagcgctgcgaggtggacttggcagatgacttgatctccgacattttcaccactattggctcagtgactgtcgccttgttactgatcctcttgctggccattgttgcttctgttgtcacctccaacaaaagggcaactcagggaacctacagccccagccgtcaggagaaggagggctcccgagtggaaatgtggaacttgatgccaccccctgcaatggagagactgatttaggagcattgtgtcccttcgagatggggatccacacactgtgaatgtgatgactgtacttcaggtatctctgacatacctgacaatgttaatctgcaactgggattacactggaactacaggaatgattcctttgaccaccttaaaaactttcacagtggttccgctcgacaccattgttttattatattatatcagccaattgcaaaaaaagtctgtgccagtaatttcagccttataattagcaaaaacatcttccagagaataaagtcttctgtggctttagtggctatcactgaaactctttcctcttttcaacctgggaacaaattttagttttcattttaggtttctgtactttctgtagtttctgtgtaaactgccatatgtttacatggaaactacaggaaaaaattggctacatttctcacttctcctatcatgtggtcaaagttattgttgtataccagcgatgggatgtatacttttgtccttcattcatggattcagagaaagctctgggaatgacttatggtccaaaaaagtgacccaatggcaacaaataaaaattgaaatgc

SEQ ID NO: 122671 - DNA, 5140 bp, Homo sapiens
  Payload ID: 4033
  Gene Symbol: CRB1
  Gene Name: crumbs family member 1, photoreceptor morphogenesis associated
  ENST ID: ENST00000535699
  CDS Start-End: 417-4565
cctcccgtgtaagtgatgctaagaagcacaaactgcattttgaatctaagtccctgtattttctgtgaaggagctgtaagtagggtgggacagagatggcacctgggggttctgaggcacccgctcctctctgagacagacagggatcaggagccggactgggaccagaccaccagcaacacaccagaggatgttctctaaataagaccatggcacttaagaacattaactaccttctcatcttctacctcagtttctcactgcttatctacataaaaaattccttttgcaataaaaacaacaccaggtgcctctcaaattcttgccaaaacaattctacatgcaaagatttttcaaaagacaatgattgttcttgttcagacacagccaataatttggacaaagactgtgacaacatgaaagacccttgcttctccaatccctgtcaaggaagtgccacttgtgtgaacaccccaggagaaaggagctttctgtgcaaatgtcctcctgggtacagtgggacaatctgtgaaactaccattggttcctgtggcaagaactcctgccaacatggaggtatttgccatcaggaccctatttatcctgtctgcatctgccctgctggatatgctggaagattctgtgagatagatcacgatgagtgtgcttccagcccttgccaaaatggggccgtgtgccaggatggaattgatggttactcctgcttctgtgtcccaggatatcaaggcagacactgcgacttggaagtggatgaatgtgcttcagatccctgcaagaacgaggctacatgcctcaatgaaataggaagatatacttgtatctgtccccacaattattctggtgtaaactgtgaattggaaattgacgaatgttggtcccagccttgtttaaatggtgcaacttgtcaggatgctctgggggcctatttctgcgactgtgcccctggattcctgggggatcactgtgaactcaacactgatgagtgtgccagtcaaccttgtctccatggagggctgtgtgtggatggagaaaacagatatagctgtaactgcacgggtagtggattcacagggacacactgtgagaccttgatgcctctttgttggtcaaaaccttgtcacaataatgctacatgtgaggacagtgttgacaattacacttgtcactgctggcctggatacacaggtgcccagtgtgagatcgacctcaatgaatgcaatagtaacccctgccagtccaatggggaatgtgtggagctgtcctcagagaaacaatatggacgcatcactggactgccttcttctttcagctaccatgaagcctcaggttatgtctgtatctgtcagcctggattcacaggaatccactgcgaagaagacgtcaatgaatgttcttcaaacccttgccaaaatggtggtacttgtgagaacttgcctgggaattatacttgccattgcccatttgataacctttctagaactttttatggaggaagggactgttctgatattctcctgggctgtacccatcagcaatgtctaaataatggaacatgcatccctcacttccaagatggccagcatggattcagctgcctatgtccatctggctacaccgggtccctgtgtgaaatcgcaaccacactttcatttgagggcgatggcttcctgtgggtcaaaagtggctcagtgacaaccaagggctcagtttgtaacatagccctcaggtttcagactgttcagccaatggctcttctacttttccgaagcaacagggatgtgtttgtgaagctggagctgctaagtggctacattcacttatcaattcaggtcaataatcagtcaaaggtgcttctgttcatttcccacaacaccagcgatggagagtggcatttcgtggaggtaatatttgcagaggctgtgacccttaccttaatcgacgactcctgtaaggagaaatgcatcgcgaaagctcctactccacttgaaagtgatcaatcaatatgtgcttttcagaactcctttttgggtggtttaccagtgggaatgaccagcaatggtgttgctctgcttaacttctataatatgccatccacaccttcgtttgtaggctgtctccaagacattaaaattgattggaatcacattaccctggagaacatctcgtctggctcatcattaaatgtcaaggcaggctgtgtgagaaaggattggtgtgaaagccaaccttgtcaaagcagaggacgctgcatcaacttgtggctgagttaccagtgtgactgccacaggccctatgaaggccccaactgtctgagagagtatgtggcaggcagatttggccaggatgactccactggttatgtcatctttactcttgatgagagctatggagacaccatcagcctctccatgtttgtccgaacgcttcaaccatcaggcttacttctagctttggaaaacagcacttatcaatatatccgtgtctggctagagcgcggcagactagcaatgctgactccaaactctcccaaattagtagtaaaatttgttcttaatgatggaaatgtccacttgatatctttgaaaatcaagccatataaaattgaactgtatcagtcttcacaaaacctaggatttatttctgcttctacgtggaaaatcgaaaagggagatgtcatctacattggtggcctacctgacaagcaagagactgaacttaatggtggattcttcaaaggctgtatccaagatgtaagactaaacaaccaaaatctggaattctttccaaatccaacaaacaatgcatctctcaatccagttcttgtcaatgtaacccaaggctgtgctggagacaacagctgcaagaggcagaccaatgtgggaagggcactcactgagttgggatccagaggacctaagtaccaagtttcactgtttcgcttctgtgtaggatcttgggcaactggaaacaccttctttttatcatctataaaaccaggatccaacccctgtcacaatggaggtgtttgccattcccggtgggatgacttctcctgttcctgtcctgccctcacaagtgggaaagcctgtgaggaggttcagtggtgtggattcagcccgtgtcctcacggagcccagtgccagccggtgcttcaaggatttgaatgtattgcaaatgctgtttttaatggacaaagcggtcaaatattattcagaagcaatgggaatattaccagagaactcaccaatatcacatttggtttcagaacaagggatgcaaatgtaataatattgcatgcagaaaaagagcctgaatttcttaatattagcattcaagattccagattattctttcaattgcaaagtggcaacagcttttatatgctaagtctgacaagtttgcagtcagtgaatgatggcacatggcacgaagtgaccctttccatgacagacccactgtcccagacctccaggtggcaaatggaagtggacaacgaaacaccttttgtgaccagcacaattgctactggaagcctcaactttttgaaggataatacagatatttatgtgggagacagagctattgacaatataaagggcctgcaagggtgtctaagtacaatagaaatcggaggcatttatctctcttactttgaaaatgttcatggtttcattaataaacctcaggaagagcaatttctcaaaatctctaccaattcagtggtcactggctgtttgcagttaaatgtctgcaactccaacccctgtttgcatggaggaaactgtgaagacatctatagctcttatcattgctcctgtcccttgggatggtcagggaaacactgtgaactcaacatcgatgaatgcttttcaaacccctgtatccatggcaactgctctgacagagttgcagcctaccactgcacatgtgagcctggatacactggtgtgaactgtgaagtggatatagacaactgccagagtcaccagtgtgcaaatggagccacctgcattagtcatactaatggctattcttgcctctgttttggaaattttacaggaaaattttgcagacagagcagattaccctcaacagtctgtgggaatgagaagacaaatctcacttgctacaatggaggcaactgcacagagttccagactgaattaaaatgtatgtgccggccaggttttactggagaatggtgtgaaaaggacattgatgagtgtgcctctgatccgtgtgtcaatggaggtctgtgccaggacttactcaacaaattccagtgcctctgtgatgttgcctttgctggcgagcgctgcgaggtggacttggcagatgacttgatctccgacattttcaccactattggctcagtgactgtcgccttgttactgatcctcttgctggccattgttgcttctgttgtcacctccaacaaaagggcaactcagggaacctacagccccagccgtcaggagaaggagggctcccgagtggaaatgtggaacttgatgccaccccctgcaatggagagactgatttaggagcattgtgtcccttcgagatggggatccacacactgtgaatgtgatgactgtacttcaggtatctctgacatacctgacaatgttaatctgcaactgggattacactggaactacaggaatgattcctttgaccaccttaaaaactttcacagtggttccgctcgacaccattgttttattatattatatcagccaattgcaaaaaaagtctgtgccagtaatttcagccttataattagcaaaaacatcttccagagaataaagtcttctgtggctttagtggctatcactgaaactctttcctcttttcaacctgggaacaaattttagttttcattttaggtttctgtactttctgtagtttctgtgtaaactgccatatgtttacatggaaactacaggaaaaaattggctacatttctcacttctcctatcatgtggtcaaagttattgttgtataccagcgatgggatgtatacttttgtccttcattcatggattcagagaaagctctgggaatgacttatggtccaaaaaagtgacccaatggcaacaaataaaaattgaaatgc

SEQ ID NO: 122672 - DNA, 3659 bp, Homo sapiens
  Payload ID: 4034
  Gene Symbol: CRB2
  Gene Name: crumbs family member 2
  Uniprot ID: Q5IJ48
  ENST ID: ENST00000359999
  CDS Start-End: 92-3622
agtgctggttggagggacgaggggggtgcggagccagccaggccgccctcccgttctcacagcagccgagcagagcgcagagcgggctgccatggcgctggccaggcctgggaccccggacccccaggccctggcctctgtcctgctactgctgctctgggcccctgccctttccctcctggctgggacggtgccttcagagccccccagtgcctgtgcctcagacccgtgcgctccagggaccgagtgccaggctaccgagagtggtggctatacctgtgggcccatggagccccggggctgtgccacccagccatgccaccacggcgctctgtgtgtgccccagggtccagatcccaccggcttccgctgctactgcgtgccgggtttccagggcccacgctgcgagctggacatcgatgagtgtgcatcccggccgtgccaccatggggccacctgccgcaacctggccgatcgctacgagtgccattgcccccttggctatgcaggcgtgacctgcgagatggaggtggacgagtgcgcctcagcgccctgcctgcacgggggctcgtgcctggacggcgtgggctccttccgctgtgtgtgcgcgccaggctacgggggcacccgttgccagctggacctcgacgagtgccagagccagccgtgcgcacatgggggcacgtgccacgacctggtcaacgggttccggtgcgactgcgcgggcaccggctacgagggcacgcactgcgagcgggaggtgctggagtgcgcatcggcgccctgcgagcacaacgcgtcctgcctcgagggcctcgggagcttccgctgcctctgttggccaggctacagcggcgagctgtgcgaggtggacgaggacgagtgtgcatcgagcccctgccagcatgggggccgatgcctgcagcgctctgacccggccctctacgggggtgtccaggccgccttccctggcgccttcagcttccgccatgctgcgggtttcctgtgccactgccctcctggctttgagggagccgactgcggtgtggaggtggacgagtgtgcctcacggccatgcctcaacggaggccactgccaggacctgcccaatggcttccagtgtcactgcccagatggctacgcagggccgacatgtgaggaagatgtggatgaatgcctgtcggatccctgcctgcacggcggaacctgcagtgacactgtggcaggctatatctgcaggtgcccagagacctggggtgggcgcgactgttctgtgcagctcactggctgccagggccacacctgcccgctggctgccacctgcatccctatcttcgagtctggggtccacagttacgtctgccactgcccacctggtacccatggaccgttctgtggccagaataccaccttctctgtgatggctgggagccccattcaggcatcagtgccagctggtggccccctgggtctggcactgaggtttcgcaccacactgcccgctgggaccttggccactcgcaatgacaccaaggaaagcttggagctggcattggtggcagccacacttcaggccacactctggagctacagcaccactgtgcttgtcctgagactgccggacctggccctaaacgatggccattggcaccaggtggaggttgtgctccatctagcgaccctggagctacggctctggcatgagggctgccctgcccggctctgtgtggcctctggtcctgtggccctggcttccacggcttcggcaactccgctgcctgccgggatctcctctgcccagctgggggacgcgacctttgcaggctgcctccaggacgtgcgtgtggatggccacctcctgctgcctgaggatctcggtgagaacgtcctcctgggctgtgagcgccgagagcagtgccggcctctgccttgtgtccacggagggtcctgtgtggatctgtggactcatttccgttgcgactgtgcccggccccatagaggtcccacgtgcgctgatgagattcctgctgccacctttggcttgggaggcgccccaagctctgcctcctttctgctccaagagctgccaggtcccaacctcacagtgtctttccttctccgcactcgggagtccgctggcctgttgctccagtttgccaatgactccgcagctggcctaacagtattcctgagtgagggtcggatccgggctgaggtgccgggcagtcctgctgtagtgctccctgggcgctgggatgatgggctccgtcacctggtgatgctcagcttcgggcctgaccagctgcaggacctggggcagcacgtgcacgtgggtgggaggctccttgctgccgacagccagccctggggtgggcccttccgaggctgcctccaggacctgcgactcgatggctgccacctccccttctttcctctgccactggataactcaagccagcccagcgagctcggcggcaggcagtcctggaacctcactgcgggctgcgtctccgaggacatgtgcagtcctgacccctgtttcaatggtgggacttgcctcgtcacctggaatgacttccactgtacctgccctgccaatttcacggggcctacgtgtgcccagcagctgtggtgtcccggccagccctgtctcccacctgccacgtgtgaggaggtccctgatggctttgtgtgtgtggcggaggccacgttccgcgagggtccccccgccgcgttcagcgggcacaacgcgtcgtcagggcgcttgctcggcggcctgtcgctggcctttcgcacgcgcgactccgaggcctggctgctgcgtgccgcggcgggcgccctggaaggcgtgtggctggcggtgcgcaatggctcgctggcggggggcgtgcgcggaggccatggcctgcccggcgctgtgctgcccataccggggccgcgcgtggccgatggtgcctggcaccgcgtgcgtctggccatggagcgcccggcggccaccacctcgcgctggctgctgtggctggatggtgccgccaccccggtggcgctgcgcggcctggccagtgacctgggcttcctgcagggcccgggtgctgtgcgcatcctgctggctgagaacttcaccggctgcttgggccgcgtggcgctgggcggcctgcccctgcccttggcgcggccccggcccggcgcggcccctggcgcccgagagcacttcgcgtcttggcctgggacgccggccccgatcctcggctgccgcggcgcgcccgtgtgtgcgccctcgccctgtctgcacgacggtgcctgccgtgacctcttcgacgcctttgcctgcgcctgcggcccggggtgggaaggcccgcgctgcgaagcccacgtcgacccctgtcactccgccccctgcgcccgtggccgctgtcacacgcaccccgacggccgcttcgagtgccgctgcccgcctggcttcgggggcccgcgctgcaggtgggatggctgggcaggggggtgggctgcgaatgccccctggggctatggtggggcagagaagtctgccaggtctgtggatgagtcgcttcccttccctggtcctcatgtccttatctgtgacatgaggaggacagtttaatttgataaatttcctgataaaatacagatcaaaacac

SEQ ID NO: 122673 - DNA, 5550 bp, Homo sapiens
  Payload ID: 4034
  Gene Symbol: CRB2
  Gene Name: crumbs family member 2
  Uniprot ID: Q5IJ48
  ENST ID: ENST00000373631
  CDS Start-End: 2-3859
catggcgctggccaggcctgggaccccggacccccaggccctggcctctgtcctgctactgctgctctgggcccctgccctttccctcctggctgggacggtgccttcagagccccccagtgcctgtgcctcagacccgtgcgctccagggaccgagtgccaggctaccgagagtggtggctatacctgtgggcccatggagccccggggctgtgccacccagccatgccaccacggcgctctgtgtgtgccccagggtccagatcccaccggcttccgctgctactgcgtgccgggtttccagggcccacgctgcgagctggacatcgatgagtgtgcatcccggccgtgccaccatggggccacctgccgcaacctggccgatcgctacgagtgccattgcccccttggctatgcaggcgtgacctgcgagatggaggtggacgagtgcgcctcagcgccctgcctgcacgggggctcgtgcctggacggcgtgggctccttccgctgtgtgtgcgcgccaggctacgggggcacccgttgccagctggacctcgacgagtgccagagccagccgtgcgcacatgggggcacgtgccacgacctggtcaacgggttccggtgcgactgcgcgggcaccggctacgagggcacgcactgcgagcgggaggtgctggagtgcgcatcggcgccctgcgagcacaacgcgtcctgcctcgagggcctcgggagcttccgctgcctctgttggccaggctacagcggcgagctgtgcgaggtggacgaggacgagtgtgcatcgagcccctgccagcatgggggccgatgcctgcagcgctctgacccggccctctacgggggtgtccaggccgccttccctggcgccttcagcttccgccatgctgcgggtttcctgtgccactgccctcctggctttgagggagccgactgcggtgtggaggtggacgagtgtgcctcacggccatgcctcaacggaggccactgccaggacctgcccaatggcttccagtgtcactgcccagatggctacgcagggccgacatgtgaggaagatgtggatgaatgcctgtcggatccctgcctgcacggcggaacctgcagtgacactgtggcaggctatatctgcaggtgcccagagacctggggtgggcgcgactgttctgtgcagctcactggctgccagggccacacctgcccgctggctgccacctgcatccctatcttcgagtctggggtccacagttacgtctgccactgcccacctggtacccatggaccgttctgtggccagaataccaccttctctgtgatggctgggagccccattcaggcatcagtgccagctggtggccccctgggtctggcactgaggtttcgcaccacactgcccgctgggaccttggccactcgcaatgacaccaaggaaagcttggagctggcattggtggcagccacacttcaggccacactctggagctacagcaccactgtgcttgtcctgagactgccggacctggccctaaacgatggccattggcaccaggtggaggttgtgctccatctagcgaccctggagctacggctctggcatgagggctgccctgcccggctctgtgtggcctctggtcctgtggccctggcttccacggcttcggcaactccgctgcctgccgggatctcctctgcccagctgggggacgcgacctttgcaggctgcctccaggacgtgcgtgtggatggccacctcctgctgcctgaggatctcggtgagaacgtcctcctgggctgtgagcgccgagagcagtgccggcctctgccttgtgtccacggagggtcctgtgtggatctgtggactcatttccgttgcgactgtgcccggccccatagaggtcccacgtgcgctgatgagattcctgctgccacctttggcttgggaggcgccccaagctctgcctcctttctgctccaagagctgccaggtcccaacctcacagtgtctttccttctccgcactcgggagtccgctggcctgttgctccagtttgccaatgactccgcagctggcctaacagtattcctgagtgagggtcggatccgggctgaggtgccgggcagtcctgctgtagtgctccctgggcgctgggatgatgggctccgtcacctggtgatgctcagcttcgggcctgaccagctgcaggacctggggcagcacgtgcacgtgggtgggaggctccttgctgccgacagccagccctggggtgggcccttccgaggctgcctccaggacctgcgactcgatggctgccacctccccttctttcctctgccactggataactcaagccagcccagcgagctcggcggcaggcagtcctggaacctcactgcgggctgcgtctccgaggacatgtgcagtcctgacccctgtttcaatggtgggacttgcctcgtcacctggaatgacttccactgtacctgccctgccaatttcacggggcctacgtgtgcccagcagctgtggtgtcccggccagccctgtctcccacctgccacgtgtgaggaggtccctgatggctttgtgtgtgtggcggaggccacgttccgcgagggtccccccgccgcgttcagcgggcacaacgcgtcgtcagggcgcttgctcggcggcctgtcgctggcctttcgcacgcgcgactccgaggcctggctgctgcgtgccgcggcgggcgccctggaaggcgtgtggctggcggtgcgcaatggctcgctggcggggggcgtgcgcggaggccatggcctgcccggcgctgtgctgcccataccggggccgcgcgtggccgatggtgcctggcaccgcgtgcgtctggccatggagcgcccggcggccaccacctcgcgctggctgctgtggctggatggtgccgccaccccggtggcgctgcgcggcctggccagtgacctgggcttcctgcagggcccgggtgctgtgcgcatcctgctggctgagaacttcaccggctgcttgggccgcgtggcgctgggcggcctgcccctgcccttggcgcggccccggcccggcgcggcccctggcgcccgagagcacttcgcgtcttggcctgggacgccggccccgatcctcggctgccgcggcgcgcccgtgtgtgcgccctcgccctgtctgcacgacggtgcctgccgtgacctcttcgacgcctttgcctgcgcctgcggcccggggtgggaaggcccgcgctgcgaagcccacgtcgacccctgtcactccgccccctgcgcccgtggccgctgtcacacgcaccccgacggccgcttcgagtgccgctgcccgcctggcttcgggggcccgcgctgcaggttgcctgtcccatccaaggagtgcagcctgaatgtcacctgcctcgatggcagcccatgtgagggtggctctcccgctgccaactgcagctgcctggagggtcttgctggccagaggtgtcaggtccccactctcccctgtgaagccaacccctgcttgaatgggggcacctgccgggcagctggaggggtgtctgaatgtatctgcaatgccagattctccggccagttctgtgaagtggcgaagggcctgcccctgccgctgccattcccactgctggaggtggccgtacctgcagcctgtgcctgcctcctcctcctcctcctgggcctcctttcagggatcctggcagcccgaaagcgccgccagtctgagggcacctacagcccaagccagcaggaggtggctggggcccggctggagatggacagtgtcctcaaggtgccaccggaggagagactcatctaggccagcctggctgctggcaccagcacctggaggtcctgaatggtttctacctggagacccaaggaagctgcttccagggctcgggacattgctacggaagtgtccccttggctggcagcctctgcctctgcctctgccccatcctggatggaggacgaggggagcaactcagggaaacagaggcctagagaggctgcggacttctccatcccaccctcggggttccgccttggcaggtgtacggctgtgcgtgggagggcacacgtgggttcacagtgtgttcaggagtgtgtgtatctggaggagtgtgtgtgtgagtgtgtacctgggcctgtgttagtctgcagatgctagtgtgagtgtgtcctgacatggctccagggcgtgtctgccgtgtttactgtgtgtctatgactgtgatgggtgtagctgatcccaggaggtggcggctgcgccatggggtcaaccattacagtcctagggcaggggcggcccaaggctgcatgttctccaggaggccaggccggggttgcccaggcacctccttccccgcctctgggggctgctcctgctgtggaggcagctgggaagtcagggaaggccactagcagaggctgagtgggcttctggctcctagaacaaatgtcccttcaggcaggtctgtctgccagaagccagagccagtcatgcgagggaaccacagacccacccgccccctcagccggagcagcccgagggagcagaggaggggctgcctggagcttcccaccctgctgtggtcatttgtcaaagggggaaggcacccactgcctacctcacagggctgttgtgaggatcagagaggacgacagtggggaaagaatctggaagtcttcaactgccgtctgatgggaaggaccgtctgggtgtccttctgggatgaggatgacagagcaacccttctcctgccctgaacccccccagctcacctgaccacctctggttctccagctccggtccttcctagcagcctggtgagctcactccttcccctgatgactggctgcctctacacagactcggcgagaggacttgaaggaagccctctgggttgtctgctgagtacaggggctcagtgaacactggcgctgcctctgagtcggggctgggcctgcagaggccgactcagaggagactctgctgcttgctcccagccccttccccggcgatgcccatcacactgtgacctcccatccctgaagggcacctgcctgagggcctggcctccttccagcttcatggacctggagatgtgccctttcatccttcctgcttcccaggccagtagatccgtttacacttttgggtcgacagtcagcttttccttttggttttggcgggtcccagaggcatgggtgtccagtccaatgtggggagccacgtgacaacgtgggggactgggacatgggactgggaagtcagcagacgctgggatagagagggccctgaacaccaggctcaggggcttgcttggtccttatcctgtaggaggtgggaccacctttccctgaactttctctacaacccttgggagcgtggggaggaggcggctggttccagggtcagtttactaagttagagatttggaaaacctgtgtcagctgtaactcctaggatattttatgtggaacctaacatgcagatgaaagctg

SEQ ID NO: 122674 - DNA, 3947 bp, Homo sapiens
  Payload ID: 4034
  Gene Symbol: CRB2
  Gene Name: crumbs family member 2
  Uniprot ID: Q5IJ48
  ENST ID: ENST00000460253
  CDS Start-End: 111-2972
attcctgagcaggctccgaaggaggcagctgggccaggcagggagctctgcctcctccccacttccccagcctcagtgcccgcccaccactctcaacctgtctggagggcatggcaatggagccgggggctctgtggaccttcctgggccacctgtggctcctggcagggccgacatgtgaggaagatgtggatgaatgcctgtcggatccctgcctgcacggcggaacctgcagtgacactgtggcaggctatatctgcaggtgcccagagacctggggtgggcgcgactgttctgtgcagctcactggctgccagggccacacctgcccgctggctgccacctgcatccctatcttcgagtctggggtccacagttacgtctgccactgcccacctggtacccatggaccgttctgtggccagaataccaccttctctgtgatggctgggagccccattcaggcatcagtgccagctggtggccccctgggtctggcactgaggtttcgcaccacactgcccgctgggaccttggccactcgcaatgacaccaaggaaagcttggagctggcattggtggcagccacacttcaggccacactctggagctacagcaccactgtgcttgtcctgagactgccggacctggccctaaacgatggccattggcaccaggtggaggttgtgctccatctagcgaccctggagctacggctctggcatgagggctgccctgcccggctctgtgtggcctctggtcctgtggccctggcttccacggcttcggcaactccgctgcctgccgggatctcctctgcccagctgggggacgcgacctttgcaggctgcctccaggacgtgcgtgtggatggccacctcctgctgcctgaggatctcggtgagaacgtcctcctgggctgtgagcgccgagagcagtgccggcctctgccttgtgtccacggagggtcctgtgtggatctgtggactcatttccgttgcgactgtgcccggccccatagaggtcccacgtgcgctgatgagattcctgctgccacctttggcttgggaggcgccccaagctctgcctcctttctgctccaagagctgccaggtcccaacctcacagtgtctttccttctccgcactcgggagtccgctggcctgttgctccagtttgccaatgactccgcagctggcctaacagtattcctgagtgagggtcggatccgggctgaggtgccgggcagtcctgctgtagtgctccctgggcgctgggatgatgggctccgtcacctggtgatgctcagcttcgggcctgaccagctgcaggacctggggcagcacgtgcacgtgggtgggaggctccttgctgccgacagccagccctggggtgggcccttccgaggctgcctccaggacctgcgactcgatggctgccacctccccttctttcctctgccactggataactcaagccagcccagcgagctcggcggcaggcagtcctggaacctcactgcgggctgcgtctccgaggacatgtgcagtcctgacccctgtttcaatggtgggacttgcctcgtcacctggaatgacttccactgtacctgccctgccaatttcacggggcctacgtgtgcccagcagctgtggtgtcccggccagccctgtctcccacctgccacgtgtgaggaggtccctgatggctttgtgtgtgtggcggaggccacgttccgcgagggtccccccgccgcgttcagcgggcacaacgcgtcgtcagggcgcttgctcggcggcctgtcgctggcctttcgcacgcgcgactccgaggcctggctgctgcgtgccgcggcgggcgccctggaaggcgtgtggctggcggtgcgcaatggctcgctggcggggggcgtgcgcggaggccatggcctgcccggcgctgtgctgcccataccggggccgcgcgtggccgatggtgcctggcaccgcgtgcgtctggccatggagcgcccggcggccaccacctcgcgctggctgctgtggctggatggtgccgccaccccggtggcgctgcgcggcctggccagtgacctgggcttcctgcagggcccgggtgctgtgcgcatcctgctggctgagaacttcaccggctgcttgggccgcgtggcgctgggcggcctgcccctgcccttggcgcggccccggcccggcgcggcccctggcgcccgagagcacttcgcgtcttggcctgggacgccggccccgatcctcggctgccgcggcgcgcccgtgtgtgcgccctcgccctgtctgcacgacggtgcctgccgtgacctcttcgacgcctttgcctgcgcctgcggcccggggtgggaaggcccgcgctgcgaagcccacgtcgacccctgtcactccgccccctgcgcccgtggccgctgtcacacgcaccccgacggccgcttcgagtgccgctgcccgcctggcttcgggggcccgcgctgcaggttgcctgtcccatccaaggagtgcagcctgaatgtcacctgcctcgatggcagcccatgtgagggtggctctcccgctgccaactgcagctgcctggagggtcttgctggccagaggtgtcaggtccccactctcccctgtgaagccaacccctgcttgaatgggggcacctgccgggcagctggaggggtgtctgaatgtatctgcaatgccagattctccggccagttctgtgaagtggcgaagggcctgcccctgccgctgccattcccactgctggaggtggccgtacctgcagcctgtgcctgcctcctcctcctcctcctgggcctcctttcagggatcctggcagcccgaaagcgccgccagtctgagggcacctacagcccaagccagcaggaggtggctggggcccggctggagatggacagtgtcctcaaggtgccaccggaggagagactcatctaggccagcctggctgctggcaccagcacctggaggtcctgaatggtttctacctggagacccaaggaagctgcttccagggctcgggacattgctacggaagtgtccccttggctggcagcctctgcctctgcctctgccccatcctggatggaggacgaggggagcaactcagggaaacagaggcctagagaggctgcggacttctccatcccaccctcggggttccgccttggcaggtgtacggctgtgcgtgggagggcacacgtgggttcacagtgtgttcaggagtgtgtgtatctggaggagtgtgtgtgtgagtgtgtacctgggcctgtgttagtctgcagatgctagtgtgagtgtgtcctgacatggctccagggcgtgtctgccgtgtttactgtgtgtctatgactgtgatgggtgtagctgatcccaggaggtggcggctgcgccatggggtcaaccattacagtcctagggcaggggcggcccaaggctgcatgttctccaggaggccaggccggggttgcccaggcacctccttccccgcctctgggggctgctcctgctgtggaggcagctgggaagtcagggaaggccactagcagagcccattcctgagccagacaggtcacggttgacccaggaagagccatgtgccaggatggccgccaagcctcactgagcatgtgcagcagtggcagcctctcagacatagagggggctccctgggtgacatctccagagacccccttgtcccccagacacccctgggtagactgtgtctgacccttcacaaataggaaatgagagctcgggtcgaaatgctcacaatttcctgcgtgtctcagatggttgttttcttaaatggtcgggccatactttaacttggtttatggaaatgaatccatttcaagattcatcaaatcaataaggtaaaaaggaaaaagaaagataataaacattcaatct

SEQ ID NO: 122675 - DNA, 631 bp, Homo sapiens
  Payload ID: 4035
  Gene Symbol: CRB3
  Gene Name: crumbs family member 3
  Uniprot ID: Q9BUF7
  ENST ID: ENST00000308243
  CDS Start-End: 172-534
gttgtctctcctgtgggcctgcgccggggtccccaccccgatcccaacgcctgggcctctccttctcctgtccccaggtgccccgtcgcaggtgcccctggccggagatgcggtaggaggggcgagcgcgagaagccccttcctcggcgctgccaacccgccacccagcccatggcgaaccccgggctggggctgcttctggcgctgggcctgccgttcctgctggcccgctggggccgagcctgggggcaaatacagaccacttctgcaaatgagaatagcactgttttgccttcatccaccagctccagctccgatggcaacctgcgtccagaagccatcactgctatcatcgtggtcttctccctcttggctgccttgctcctggctgtggggctggcactgttggtgcggaagcttcgggagaagcggcagacggagggcacctaccggcccagtagcgaggagcaggtgggtgcccgcgtgccaccgacccccaacctcaagttgccgccggaagagcggctcatctgaacgctggggcctgctgcagccaccaacactgcccaggactgcgggttgctggcttgtacaccgcagctgccaccgagacaccagcctctgatggctc

SEQ ID NO: 122676 - DNA, 733 bp, Homo sapiens
  Payload ID: 4035
  Gene Symbol: CRB3
  Gene Name: crumbs family member 3
  Uniprot ID: Q9BUF7
  ENST ID: ENST00000356762
  CDS Start-End: 163-534
acggaccgagggttcgagggagggacacggaccaggaacctgagctaggtcaaagacgcccgggccaggtgccccgtcgcaggtgcccctggccggagatgcggtaggaggggcgagcgcgagaagccccttcctcggcgctgccaacccgccacccagcccatggcgaaccccgggctggggctgcttctggcgctgggcctgccgttcctgctggcccgctggggccgagcctgggggcaaatacagaccacttctgcaaatgagaatagcactgttttgccttcatccaccagctccagctccgatggcaacctgcgtccagaagccatcactgctatcatcgtggtcttctccctcttggctgccttgctcctggctgtggggctggcactgttggtgcggaagcttcgggagaagcggcagacggagggcacctaccggcccagtagcgaggagcagttctcccatgcagccgaggcccgggcccctcaggactccaaggagacggtgcagggctgcctgcccatctaggtcccctctcctgcatctgtctcccttcattgctgtgtgaccttggggaaaggcagtgccctctctgggcagtcagatccacccagtgcttaatagcagggaagaaggtacttcaaagactctgcccctgaggtcaagagaggatggggctattcacttttatatatttatataaaattagtagtgagatgtaacaaaa

SEQ ID NO: 122677 - DNA, 1443 bp, Homo sapiens
  Payload ID: 4035
  Gene Symbol: CRB3
  Gene Name: crumbs family member 3
  Uniprot ID: Q9BUF7
  ENST ID: ENST00000598494
  CDS Start-End: 532-894
ttatttatttatttattttttgtagagaatgaggcctcgctgtgttgcccaggctggtctcggactcctggcctcaagcaatcctcttgcctcggcctctcaaagtgttgggattacaggcgtgagccattgcgcctgggcaggtattttttctcattaagcgctccccatccaagtctgccctaggcaggagtgcctagtgcacgggtacatacataccccgtgcgtctccacacctgtgcgctcccacagatatgctcgcaatgcaggtgtaaggtccccctcacacctgcgcgcttccgcggtctccctccccgcatccccattaagggactggggtcccgttacaggtgcgcccacagcgcggccccgcccccttcttgactccgccctctcagcgaggctcaggtgcacaagccggaagtgcgctctcccaggtgccccgtcgcaggtgcccctggccggagatgcggtaggaggggcgagcgcgagaagccccttcctcggcgctgccaacccgccacccagcccatggcgaaccccgggctggggctgcttctggcgctgggcctgccgttcctgctggcccgctggggccgagcctgggggcaaatacagaccacttctgcaaatgagaatagcactgttttgccttcatccaccagctccagctccgatggcaacctgcgtccagaagccatcactgctatcatcgtggtcttctccctcttggctgccttgctcctggctgtggggctggcactgttggtgcggaagcttcgggagaagcggcagacggagggcacctaccggcccagtagcgaggagcaggtgggtgcccgcgtgccaccgacccccaacctcaagttgccgccggaagagcggctcatctgaacgctggggcctgctgcagccaccaacactgcccaggactgcgggttgctggcttgtacaccgcagctgccaccgagacaccagcctctgatggctcaggaggacttgtggggagaggctgggggcacccatgtggtgggctctgtgcagcatgttgcctctgcttggctgtgcctgcagctcagggtgctggggctcgggacccacccccctgcttgcggaaccaacttttctctgtgtgtccagcaggccccacaaccccctctcctttctttcagttctcccatgcagccgaggcccgggcccctcaggactccaaggagacggtgcagggctgcctgcccatctaggtcccctctcctgcatctgtctcccttcattgctgtgtgaccttggggaaaggcagtgccctctctgggcagtcagatccacccagtgcttaatagcagggaagaaggtacttcaaagactctgcccctgaggtcaagagaggatggggctattcacttttatatatttatataaaattagtagtgagatgtaacaaaa

SEQ ID NO: 122678 - DNA, 1078 bp, Homo sapiens
  Payload ID: 4035
  Gene Symbol: CRB3
  Gene Name: crumbs family member 3
  Uniprot ID: Q9BUF7
  ENST ID: ENST00000600229
  CDS Start-End: 167-529
accgacggaccgagggttcgagggagggacacggaccaggaacctgagctaggtcaaagacgcccgggccaggtgccccgtcgcaggtgcccctggccggagatgcggtaggaggggcgagcgcgagaagccccttcctcggcgctgccaacccgccacccagcccatggcgaaccccgggctggggctgcttctggcgctgggcctgccgttcctgctggcccgctggggccgagcctgggggcaaatacagaccacttctgcaaatgagaatagcactgttttgccttcatccaccagctccagctccgatggcaacctgcgtccagaagccatcactgctatcatcgtggtcttctccctcttggctgccttgctcctggctgtggggctggcactgttggtgcggaagcttcgggagaagcggcagacggagggcacctaccggcccagtagcgaggagcaggtgggtgcccgcgtgccaccgacccccaacctcaagttgccgccggaagagcggctcatctgaacgctggggcctgctgcagccaccaacactgcccaggactgcgggttgctggcttgtacaccgcagctgccaccgagacaccagcctctgatggctcaggaggacttgtggggagaggctgggggcacccatgtggtgggctctgtgcagcatgttgcctctgcttggctgtgcctgcagctcagggtgctggggctcgggacccacccccctgcttgcggaaccaacttttctctgtgtgtccagcaggccccacaaccccctctcctttctttcagttctcccatgcagccgaggcccgggcccctcaggactccaaggagacggtgcagggctgcctgcccatctaggtcccctctcctgcatctgtctcccttcattgctgtgtgaccttggggaaaggcagtgccctctctgggcagtcagatccacccagtgcttaatagcagggaagaaggtacttcaaagactctgcccctgaggtcaagagaggatggggctattcacttttatatatttatataaaattagtagtgagatgtaacaaaa

SEQ ID NO: 122679 - DNA, 3267 bp, Homo sapiens
  Payload ID: 4036
  Gene Symbol: CRY1
  Gene Name: cryptochrome circadian clock 1
  Uniprot ID: Q16526
  ENST ID: ENST00000008527
  CDS Start-End: 869-2629
ggggcctgtggtcaacgcgatttgcttccaagggacggccaccagtcggcacaggaaaggggcagaggcagtgagttcagcgtgtggacgagggtcaacaagtttgggatcaagcggctgccgctcctccaaaagcgaccgaagcgcgagcagattacccctccgagccagtgtagtaaacacacttcagaaacgtgaggtgccggtggtcacgaggggagcgcgccctccaatgaggagccgggggcggggccgaggccgctgacgcggcggcggcggcagagtcacccgggcagcctcgggaccggtcaccggccggcaaccgtccagcggcctcgaccaccgcctctagcctccgttcccggtcctttctcccgggccgagagacagcgtcgccgacaggggctcattcccctccggttctcctcggtgactcacctcgggcgggccgttttgtctttaggggccgccttggtggggcgaggtttccgtgacgaatctcctggggccgtccgtgccggctcgggccgtcgtggcggctcgagctcctggaacttgctcaggctccggaggtccgaggccctcgaagttatgcgtcgcctccaggcggttgcggcgggcgcgggctcctaaagggcgtcacacccggactccgccgactaggcaacctccattcatctttccactgcgcctccggcgcccccgccttctccggtcccctcctcggagtcattttttcctgttccccctctgccgccctttcctcacgccccgggtgaggcaattctcttggaagcgaaggtgtcggctatgagccggagcctccttccttgaatttctccgtggaggacccgccgcgccccccggcatgggggtgaacgccgtgcactggttccgaaaggggctccggctccacgacaaccccgccctgaaggagtgcattcagggcgccgacaccatccgctgcgtctacatcctggacccctggttcgccggctcctccaatgtgggcatcaacaggtggcgatttttgcttcagtgtcttgaggatcttgatgccaatctacgaaaattaaactcccgtctgtttgtgattcgtggacaaccagcagatgtgtttcccaggcttttcaaggaatggaacattactaaactttcaattgagtatgattctgagccctttggaaaggaacgagacgcagctattaagaaactggcaactgaagctggagtagaagtcattgtaagaatttcacatacattatatgacctagacaagatcatagaactcaatggtggacaaccgcctctaacttataaaagattccagactctcatcagcaaaatggaaccactagagataccagtagagacaattacttcagaagtgatagaaaagtgcacaactcctctgtctgatgaccatgatgagaaatatggagtcccttcactggaagagctaggttttgatacagatggcttatcctctgcagtgtggccaggtggagaaactgaagcacttactcgtttggaaaggcatttggaaagaaaagcttgggtggcaaattttgaaagacctcgaatgaatgcgaattctctgcttgcaagccctactggacttagtccttatctccgatttggttgtttgtcatgtcgactgttttacttcaaactaacagatctctacaaaaaggtaaagaagaacagttcccctcccctttccctttatgggcaactgttatggcgtgaatttttctatacagcagcaacaaataatccacgctttgataaaatggaaggaaaccctatctgtgttcagattccttgggataaaaatcctgaggctttagccaaatgggcggaaggccggacaggctttccatggattgatgccatcatgacacagcttcgtcaggagggttggattcatcatctagccaggcatgcagttgcttgcttcctgacacgaggggacctgtggattagttgggaagaaggaatgaaggtatttgaagaattattgcttgatgcagattggagcataaatgctggaagttggatgtggctgtcttgtagttccttttttcaacagttttttcactgctattgccctgttggttttggtaggagaacagatcccaatggagactatatcaggcgttatttgcctgtcctaagaggcttccctgcaaaatatatctatgatccctggaatgcaccagaaggtatccaaaaggtagccaaatgtttgataggagttaattatcctaaaccaatggtgaaccatgctgaggcaagccgtttgaatatcgaaaggatgaaacagatctatcagcagctttcacgatatagaggactaggtcttctggcatcagtaccttctaatcctaatgggaatggaggcttcatgggatattctgcagaaaatatcccaggttgtagcagcagtggaagttgctctcaagggagtggtattttacactatgctcatggcgacagtcagcaaactcacctgttgaagcaaggaagaagctccatgggcactggtctcagtggtgggaaacgtcctagtcaggaagaggacacacagagtattggtcctaaagtccagagacagagcactaattagaaaacattcaggaggaatactgttgcagctgaaattggtggggagttcaatacttttcaattaagttatttaaaaatattcttcattgatggaaagcagttacatattgaaatatgttgtttctaatgacatttctgtggtttttaactttttaatgaatttcacagaggacaattggtaatttgtatataaagaacttggcaagagaatttgcttaatgtaaatataaacagtcacaattagtatagacccatcgatatatttttgataatttttcatgtatggtaaagttaaaatgacaaattgatattctgatataaaactcaaagttttgaagtcagtgggaaaaaaggaggtttttagactttcttaaaagacgttaaaattttaggacagaattttcttgatgttgtttgatctaactttgcactctttgataataatgttttagataatgtgcgtaatccaaattggtattgtagcctctgttaacacagacagtatatgttttaaactttgatgtaaacctttttagacccaaacttgtggaagtatcatgtgttaagttctctgtctctgtttctttgttcatttattactaaaatgaacttgttattaaagtatatgcaaatatgaaa

SEQ ID NO: 122680 - DNA, 621 bp, Homo sapiens
  Payload ID: 4036
  Gene Symbol: CRY1
  Gene Name: cryptochrome circadian clock 1
  ENST ID: ENST00000549356
  CDS Start-End: 1-321
atcgaaaggatgaaacagatctatcagcagctttcacgatatagaggactaggtcttctggcatcagtaccttctaatcctaatgggaatggaggcttcatgggatattctgcagaaaatatcccaggttgtagcagcagtggaagttgctctcaagggagtggtattttacactatgctcatggcgacagtcagcaaactcacctgttgaagcaaggaagaagctccatgggcactggtctcagtggtgggaaacgtcctagtcaggaagaggacacacagagtattggtcctaaagtccagagacagagcactaattaggtaaatattttagagctgtatttcttgctttagaagagtatataattaacataaattaagataatttcaaaaatggagcaaatctctattttcaaaccagaaaatcttgaggcattaatttttaagcaatttttacaaactcagttaatttttggtcaagagacatgcatctgtactggagaaattgttgcaccagttttatattcatctgaaccaatgctctttaaattagagatgtttatgattttgtggtcaagttttttcttagaaaaagacaacttttttatttccttactatgt

SEQ ID NO: 122681 - DNA, 2053 bp, Homo sapiens
  Payload ID: 4037
  Gene Symbol: CRY2
  Gene Name: cryptochrome circadian clock 2
  Uniprot ID: Q49AN0
  ENST ID: ENST00000417225
  CDS Start-End: 133-1731
agcttcttctagaagcaggccctgaacaggacgtgggtaagagatccgctgtcccttgagacttggcctactcccggcactccgcggacagccccagcctgcggacagccccagcctgcgtcacttgtccgcatgccagctccacccgggcggacccacacatggttcctacttcagtctctggaagatttggacacaagtttaaggaaactgaactcccgcctgtttgtagtccggggacagccagccgacgtgttcccaaggctgttcaaggaatggggagtgacccgcttgacctttgaatatgactctgaaccctttgggaaagaacgggatgcagccatcatgaagatggccaaggaggctggtgtggaagtagtgacggagaattctcataccctctatgacctggacaggatcattgagctgaatgggcagaagccaccccttacatacaagcgctttcaggccatcatcagccgcatggagctgcccaagaagccagtgggcttggtgaccagccagcagatggagagctgcagggccgagatccaggagaaccacgacgagacctacggcgtgccctccctggaggagctggggttccccactgaaggacttggtccagctgtctggcagggaggagagacagaagctctggcccgcctggataagcacttggaacggaaggcctgggttgccaactatgagagaccccgaatgaacgccaactccctcctggccagccccacaggcctcagcccctacctgcgctttggttgtctctcctgccgcctcttctactaccgcctgtgggacctgtataaaaaggtgaagcggaacagcacacctcccctctccctatttgggcaactcctatggcgagagttcttctacacggcagctaccaacaaccccaggtttgaccgcatggaggggaaccccatctgcatccagatcccctgggaccgcaatcctgaggccctggccaagtgggctgagggcaagacaggcttcccttggattgatgccatcatgacccaactgaggcaggagggctggatccaccacctggcccggcatgccgtggcctgcttcctgacccgcggggacctctgggtcagctgggagagcggggtccgggtatttgatgagctgctcctggatgcagatttcagcgtgaacgcaggcagctggatgtggctgtcctgcagtgctttcttccagcagttcttccactgctactgccctgtgggctttggccgtcgcacggaccccagtggggactacatcaggcgatacctgcccaaattgaaagcgttcccctctcgatacatctatgagccctggaatgccccagagtcaattcagaaggcagccaagtgcatcattggtgtggactacccacggcccatcgtcaaccatgccgagaccagccggcttaacattgaacgaatgaagcagatttaccagcagctttcgcgctaccggggactctgtctactggcatctgtcccttcctgtgtggaagacctcagtcaccctgtggcagagcccagctcgagccaggctggcagcatgagcagtgcaggcccaagaccactacccagtggcccagcatcccccaaacgcaagctggaagcagccgaggaaccacctggtgaagaactcagcaaacgggcccgggtggcagagttgccaaccccagagctgccgagcaaggatgcctgagactgcagagcccttgctccgtgagcaaagcctgggtgcccaagcagccaccgcagcagcagagtacaacctgcagagaagctgatcaccgggcagagatagagcgagcatgtgtgtgtgtgtgcgcgtgtgcagaggagggagtggtgtgcctgtttgtgtgtgcatgcatctgttgacactcatgattctgaatgttgcctgggctgggggagtacctgtagcacgccagtgctgtttcccggcctccagacacaaggctcgaggttatggcagtgactttcagctgagacctgttcctgcaagccagctgccttgtctg

SEQ ID NO: 122682 - DNA, 4203 bp, Homo sapiens
  Payload ID: 4037
  Gene Symbol: CRY2
  Gene Name: cryptochrome circadian clock 2
  ENST ID: ENST00000443527
  CDS Start-End: 23-1867
gtcataggtcactgggcgggctatgggcggggtccacgtcgcctaccggggcggagcgggggtggctggagcagtctggacagtcatggcggcgactgtggcgacggcggcagctgtggccccggcgccagcgcccggcacggacagcgcctcttcggtgcactggttccgcaaagggctgcgactccacgacaacccggcgttgctggcggccgtgcgcggggcgcgctgcgtgcgctgcgtttacattctcgacccgtggttcgcggcctcctcctcagtcgggatcaaccgatggaggttcctacttcagtctctggaagatttggacacaagtttaaggaaactgaactcccgcctgtttgtagtccggggacagccagccgacgtgttcccaaggctgttcaaggaatggggagtgacccgcttgacctttgaatatgactctgaaccctttgggaaagaacgggatgcagccatcatgaagatggccaaggaggctggtgtggaagtagtgacggagaattctcataccctctatgacctggacaggatcattgagctgaatgggcagaagccaccccttacatacaagcgctttcaggccatcatcagccgcatggagctgcccaagaagccagtgggcttggtgaccagccagcagatggagagctgcagggccgagatccaggagaaccacgacgagacctacggcgtgccctccctggaggagctggggttccccactgaaggacttggtccagctgtctggcagggaggagagacagaagctctggcccgcctggataagcacttggaacggaaggcctgggttgccaactatgagagaccccgaatgaacgccaactccctcctggccagccccacaggcctcagcccctacctgcgctttggttgtctctcctgccgcctcttctactaccgcctgtgggacctgtataaaaaggtgaagcggaacagcacacctcccctctccctatttgggcaactcctatggcgagagttcttctacacggcagctaccaacaaccccaggtttgaccgcatggaggggaaccccatctgcatccagatcccctgggaccgcaatcctgaggccctggccaagtgggctgagggcaagacaggcttcccttggattgatgccatcatgacccaactgaggcaggagggctggatccaccacctggcccggcatgccgtggcctgcttcctgacccgcggggacctctgggtcagctgggagagcggggtccgggtatttgatgagctgctcctggatgcagatttcagcgtgaacgcaggcagctggatgtggctgtcctgcagtgctttcttccagcagttcttccactgctactgccctgtgggctttggccgtcgcacggaccccagtggggactacatcaggcgatacctgcccaaattgaaagcgttcccctctcgatacatctatgagccctggaatgccccagagtcaattcagaaggcagccaagtgcatcattggtgtggactacccacggcccatcgtcaaccatgccgagaccagccggcttaacattgaacgaatgaagcagatttaccagcagctttcgcgctaccggggactctgtctactggcatctgtcccttcctgtgtggaagacctcagtcaccctgtggcagagcccagctcgagccaggctggcagcatgagcagtgcaggcccaagaccactacccagtggcccagcatcccccaaacgcaagctggaagcagccgaggaaccacctggtgaagaactcagcaaacgggcccgggtggcagagttgccaaccccagagctgccgagcaaggatgcctgagactgcagagcccttgctccgtgagcaaagcctgggtgcccaagcagccaccgcagcagcagagtacaacctgcagagaagctgatcaccgggcagagatagagcgagcatgtgtgtgtgtgtgcgcgtgtgcagaggagggagtggtgtgcctgtttgtgtgtgcatgcatctgttgacactcatgattctgaatgttgcctgggctgggggagtacctgtagcacgccagtgctgtttcccggcctccagacacaaggctcgaggttatggcagtgactttcagctgagacctgttcctgcaagccagctgccttgtctgaacagaacgtagtggtaggaccctagctgggattctggcatctgcctccctagacctccttccctccctcctcacgtcaggctgtggagcaggagcacagcagttctggctgttgtccaaagcatgggattctggaggcagccagagccctgctgagttcctgctttctgacctggaggctgagcaggccggagtggatggatgctgtccagacgtagccacctggcctctgtttcttattttaaaattctctgctactgggctcagtcccaggcccttccttgggcttctgggactgagcatgaggccatagacagatctaaaaagtttccaccaccctacagaagtacacacagatacctgactggtgtggggtatgcctggtactgtaataggagcctaagacagcacacctaccttttcaggatttagaacctaaaattagaaagagaatcccagctgtcattgttccttccccagaagctaagagccagcctcagagcctacccaggagctgtgaaggggcaagggtcaaactgactcactctaccaggaggagaccaggttgcagtggcgtaaggccccctggtttctctggccacactccaaggcaccacagtgctgccagtgaggacagctgacacccagccagggaaaccattctagtctttattctgttggcttccagggcctgtcctggacttgtcagcatccagactgccatgtcagctatcccagtagctgagctccaaggactcaggcagagggactcagggatggggactgccaggggcagttggcaaaagtccaagtagagattacacccagaacaccattccttccaggagcagtaggtgggaggtttgacccagagaagccaatccttgcattccaggagtggcctgtgcctcccacctcttccttcccactgccaaaggcctgtgttgagaaagatgtcatgcaaaaggacgacggtggccaactaaagcaagtcttccttccaccctgtggcctgcacttgagccacaaagtgtgtgtgtgtgtgtgcgtgtgtggtacgtgtgtgtgtgtgtggctatgaggctgattcctgtttggatttttgtcctcacgtgtatcattaagctggcctttgggccttttcctttctacctcccctgtgacctttcctagcctcagatctgttaattcttttggccccagccctgtccctcactgtcctctgtccttggaccagaaccctggggtcagacccatctcctgtagctgtccatcacactgacaggcttcttcctgagatatcctcaggttttctcagccagagagctgcctttagagtccaactgttgtacgtatgtcaccttcactagaaatgtcccatcatcgtgggaggggagcagggcacaggggatggtgtgcattcagagcattgggttgggggcttccctgttccctcagccccagtcgagaggaaagagaatcgggccactgccagaaagagagtcaagcaaacctggaagggcaaatctgagagtgggaaggccaaaggccgaggcccagatttagtattcactagcagcgccttcgggtagcaggatgattccttttcctgcctgtctgctgctggctctcttccctaaggtacaggttggcaggaccacctccgcctacttctccaccatccctagcatgtcagcccgttcccagatcaacctgccagtggagtcaggcagtgcactcctggagccaagagggaagggcagggtagagagggtatgtccagtagcctggagctccatggtggcttcatgcctcccttctcccagctcaggtggccctgagggctccctcggaacagtgcctcaaatcctgacccaagggccagcatggggaagagatggttgcaggcaaaatgcactttatagagattttctattgctgggaaggtgtgtttctcccacaatttgtttgtgaatattcacttgttttataaatgtctgacctgtcttgagta

SEQ ID NO: 122683 - DNA, 4204 bp, Homo sapiens
  Payload ID: 4037
  Gene Symbol: CRY2
  Gene Name: cryptochrome circadian clock 2
  ENST ID: ENST00000616623
  CDS Start-End: 23-1867
gtcataggtcactgggcgggctatgggcggggtccacgtcgcctaccggggcggagcgggggtggctggagcagtctggacagtcatggcggcgactgtggcgacggcggcagctgtggccccggcgccagcgcccggcacggacagcgcctcttcggtgcactggttccgcaaagggctgcgactccacgacaacccggcgttgctggcggccgtgcgcggggcgcgctgcgtgcgctgcgtttacattctcgacccgtggttcgcggcctcctcctcagtcgggatcaaccgatggaggttcctacttcagtctctggaagatttggacacaagtttaaggaaactgaactcccgcctgtttgtagtccggggacagccagccgacgtgttcccaaggctgttcaaggaatggggagtgacccgcttgacctttgaatatgactctgaaccctttgggaaagaacgggatgcagccatcatgaagatggccaaggaggctggtgtggaagtagtgacggagaattctcataccctctatgacctggacaggatcattgagctgaatgggcagaagccaccccttacatacaagcgctttcaggccatcatcagccgcatggagctgcccaagaagccagtgggcttggtgaccagccagcagatggagagctgcagggccgagatccaggagaaccacgacgagacctacggcgtgccctccctggaggagctggggttccccactgaaggacttggtccagctgtctggcagggaggagagacagaagctctggcccgcctggataagcacttggaacggaaggcctgggttgccaactatgagagaccccgaatgaacgccaactccctcctggccagccccacaggcctcagcccctacctgcgctttggttgtctctcctgccgcctcttctactaccgcctgtgggacctgtataaaaaggtgaagcggaacagcacacctcccctctccctatttgggcaactcctatggcgagagttcttctacacggcagctaccaacaaccccaggtttgaccgcatggaggggaaccccatctgcatccagatcccctgggaccgcaatcctgaggccctggccaagtgggctgagggcaagacaggcttcccttggattgatgccatcatgacccaactgaggcaggagggctggatccaccacctggcccggcatgccgtggcctgcttcctgacccgcggggacctctgggtcagctgggagagcggggtccgggtatttgatgagctgctcctggatgcagatttcagcgtgaacgcaggcagctggatgtggctgtcctgcagtgctttcttccagcagttcttccactgctactgccctgtgggctttggccgtcgcacggaccccagtggggactacatcaggcgatacctgcccaaattgaaagcgttcccctctcgatacatctatgagccctggaatgccccagagtcaattcagaaggcagccaagtgcatcattggtgtggactacccacggcccatcgtcaaccatgccgagaccagccggcttaacattgaacgaatgaagcagatttaccagcagctttcgcgctaccggggactctgtctactggcatctgtcccttcctgtgtggaagacctcagtcaccctgtggcagagcccagctcgagccaggctggcagcatgagcagtgcaggcccaagaccactacccagtggcccagcatcccccaaacgcaagctggaagcagccgaggaaccacctggtgaagaactcagcaaacgggcccgggtggcagagttgccaaccccagagctgccgagcaaggatgcctgagactgcagagcccttgctccgtgagcaaagcctgggtgcccaagcagccaccgcagcagcagagtacaacctgcagagaagctgatcaccgggcagagatagagcgagcatgtgtgtgtgtgtgcgcgtgtgcagaggagggagtggtgtgcctgtttgtgtgtgcatgcatctgttgacactcatgattctgaatgttgcctgggctgggggagtacctgtagcacgccagtgctgtttcccggcctccagacacaaggctcgaggttatggcagtgactttcagctgagacctgttcctgcaagccagctgccttgtctgaacagaacgtagtggtaggaccctagctgggattctggcatctgcctccctagacctccttccctccctcctcacgtcaggctgtggagcaggagcacagcagttctggctgttgtccaaagcatgggattctggaggcagccagagccctgctgagttcctgctttctgacctggaggctgagcaggccggagtggatggatgctgtccagacgtagccacctggcctctgtttcttattttaaaattctctgctactgggctcagtcccaggcccttccttgggcttctgggactgagcatgaggccatagacagatctaaaaagtttccaccaccctacagaagtacacacagatacctgactggtgtggggtatgcctggtactgtaataggagcctaagacagcacacctaccttttcaggatttagaacctaaaattagaaagagaatcccagctgtcattgttccttccccagaagctaagagccagcctcagagcctacccaggagctgtgaaggggcaagggtcaaactgactcactctaccaggaggagaccaggttgcagtggcgtaaggccccctggtttctctggccacactccaaggcaccacagtgctgccagtgaggacagctgacacccagccagggaaaccattctagtctttattctgttggcttccagggcctgtcctggacttgtcagcatccagactgccatgtcagctatcccagtagctgagctccaaggactcaggcagagggactcagggatggggactgccaggggcagttggcaaaagtccaagtagagattacacccagaacaccattccttccaggagcagtaggtgggaggtttgacccagagaagccaatccttgcattccaggagtggcctgtgcctcccacctcttccttcccactgccaaaggcctgtgttgagaaagatgtcatgcaaaaggacgacggtggccaactaaagcaagtcttccttccaccctgtggcctgcacttgagccacaaagtgtgtgtgtgtgtgtgcgtgtgtggtacgtgtgtgtgtgtgtggctatgaggctgattcctgtttggatttttgtcctcacgtgtatcattaagctggcctttgggccttttcctttctacctcccctgtgacctttcctagcctcagatctgttaattcttttggccccagccctgtccctcactgtcctctgtccttggaccagaaccctggggtcagacccatctcctgtagctgtccatcacactgacaggcttcttcctgagatatcctcaggttttctcagccagagagctgcctttagagtccaactgttgtacgtatgtcaccttcactagaaatgtcccatcatcgtgggaggggagcagggcacaggggatggtgtgcattcagagcattgggttgggggcttccctgttccctcagccccagtcgagaggaaagagaatcgggccactgccagaaagagagtcaagcaaacctggaagggcaaatctgagagtgggaaggccaaaggccgaggcccagatttagtattcactagcagcgccttcgggtagcaggatgattccttttcctgcctgtctgctgctggctctcttccctaaggtacaggttggcaggaccacctccgcctacttctccaccatccctagcatgtcagcccgttcccagatcaacctgccagtggagtcaggcagtgcactcctggagccaagagggaagggcagggtagagagggtatgtccagtagcctggagctccatggtggcttcatgcctcccttctcccagctcaggtggccctgagggctccctcggaacagtgcctcaaatcctgacccaagggccagcatggggaagagatggttgcaggcaaaatgcactttatagagattttctattgctgggaaggtgtgtttctcccacaatttgtttgtgaatattcacttgttttataaatgtctgacctgtcttgagtaa

SEQ ID NO: 122684 - DNA, 1936 bp, Homo sapiens
  Payload ID: 4037
  Gene Symbol: CRY2
  Gene Name: cryptochrome circadian clock 2
  Uniprot ID: Q49AN0
  ENST ID: ENST00000616080
  CDS Start-End: 17-1798
agcagtctggacagtcatggcggcgactgtggcgacggcggcagctgtggccccggcgccagcgcccggcacggacagcgcctcttcggtgcactggttccgcaaagggctgcgactccacgacaacccggcgttgctggcggccgtgcgcggggcgcgctgcgtgcgctgcgtttacattctcgacccgtggttcgcggcctcctcctcagtcgggatcaaccgatggaggttcctacttcagtctctggaagatttggacacaagtttaaggaaactgaactcccgcctgtttgtagtccggggacagccagccgacgtgttcccaaggctgttcaaggaatggggagtgacccgcttgacctttgaatatgactctgaaccctttgggaaagaacgggatgcagccatcatgaagatggccaaggaggctggtgtggaagtagtgacggagaattctcataccctctatgacctggacaggatcattgagctgaatgggcagaagccaccccttacatacaagcgctttcaggccatcatcagccgcatggagctgcccaagaagccagtgggcttggtgaccagccagcagatggagagctgcagggccgagatccaggagaaccacgacgagacctacggcgtgccctccctggaggagctggggttccccactgaaggacttggtccagctgtctggcagggaggagagacagaagctctggcccgcctggataagcacttggaacggaaggcctgggttgccaactatgagagaccccgaatgaacgccaactccctcctggccagccccacaggcctcagcccctacctgcgctttggttgtctctcctgccgcctcttctactaccgcctgtgggacctgtataaaaaggtgaagcggaacagcacacctcccctctccctatttgggcaactcctatggcgagagttcttctacacggcagctaccaacaaccccaggtttgaccgcatggaggggaaccccatctgcatccagatcccctgggaccgcaatcctgaggccctggccaagtgggctgagggcaagacaggcttcccttggattgatgccatcatgacccaactgaggcaggagggctggatccaccacctggcccggcatgccgtggcctgcttcctgacccgcggggacctctgggtcagctgggagagcggggtccgggtatttgatgagctgctcctggatgcagatttcagcgtgaacgcaggcagctggatgtggctgtcctgcagtgctttcttccagcagttcttccactgctactgccctgtgggctttggccgtcgcacggaccccagtggggactacatcaggcgatacctgcccaaattgaaagcgttcccctctcgatacatctatgagccctggaatgccccagagtcaattcagaaggcagccaagtgcatcattggtgtggactacccacggcccatcgtcaaccatgccgagaccagccggcttaacattgaacgaatgaagcagatttaccagcagctttcgcgctaccggggactctgtctactggcatctgtcccttcctgtgtggaagacctcagtcaccctgtggcagagcccagctcgagccaggctggcagcatgagcagtgcaggcccaagaccactacccagtggcccagcatcccccaaacgcaagctggaagcagccgaggaaccacctggtgaagaactcagcaaacgggcccgggtggcagagttgccaaccccagagctgccgagcaaggatgcctgagactgcagagcccttgctccgtgagcaaagcctgggtgcccaagcagccaccgcagcagcagagtacaacctgcagagaagctgatcaccgggcagagatagagcgagcatgtgtgtgtgtgtgcgcgtgtgcagagg

SEQ ID NO: 122685 - DNA, 1139 bp, Homo sapiens
  Payload ID: 4038
  Gene Symbol: CRYAA
  Gene Name: crystallin, alpha A
  Uniprot ID: P02489
  ENST ID: ENST00000291554
  CDS Start-End: 93-614
agggagggctcggccttggctccacactgcgctgcccagaggccccgctgactcctgccagcctccaggtccccgtggtaccaaagctgaacatggacgtgaccatccagcacccctggttcaagcgcaccctggggcccttctaccccagccggctgttcgaccagtttttcggcgagggcctttttgagtatgacctgctgcccttcctgtcgtccaccatcagcccctactaccgccagtccctcttccgcaccgtgctggactccggcatctctgaggttcgatccgaccgggacaagttcgtcatcttcctcgatgtgaagcacttctccccggaggacctcaccgtgaaggtgcaggacgactttgtggagatccacggaaagcacaacgagcgccaggacgaccacggctacatttcccgtgagttccaccgccgctaccgcctgccgtccaacgtggaccagtcggccctctcttgctccctgtctgccgatggcatgctgaccttctgtggccccaagatccagactggcctggatgccacccacgccgagcgagccatccccgtgtcgcgggaggagaagcccacctcggctccctcgtcctaagcaggcattgcctcggctggctcccctgcagccctggcccatcatggggggagcaccctgagggcggggtgtctgtcttcctttgcttcccttttttcctttccaccttctcacatggaatgagggtttgagagagcagccaggagagcttagggtctcagggtgtcccagaccccgacaccggccagtggcggaagtgaccgcacctcacactcctttagatagcagcctggctcccctggggtgcaggcgcctcaactctgctgagggtccagaaggagggggtgacctccggccaggtgcctcctgacacacctgcagcctccctccgcggcgggccctgcccacacctcctggggcgcgtgaggcccgtggggccggggcttctgtgcacctgggctctcgcggcctcttctctcagaccgtcttcctccaacccctctatgtagtgccgctcttggggacatgggtcgcccatgagagcgcagcccgcggcaatcaataaacagcaggtgatacaagcaa

SEQ ID NO: 122686 - DNA, 826 bp, Homo sapiens
  Payload ID: 4038
  Gene Symbol: CRYAA
  Gene Name: crystallin, alpha A
  ENST ID: ENST00000398132
  CDS Start-End: 177-587
ctaacggaccaaccaacccgtaacgacccctcctaccataaccagtagccagccagcccataaccagccaacttatctataaccagccacctgaccatagccaaacaaccagccggcccaccagtagcattcagcccctcagctggccctgagggtttggagacaggtcgagggtcatgcctgtctgtccaggagacagtcacaggcccccgaaagctctgccccacttggtgtgtgggagaagaggccggcaggttcgatccgaccgggacaagttcgtcatcttcctcgatgtgaagcacttctccccggaggacctcaccgtgaaggtgcaggacgactttgtggagatccacggaaagcacaacgagcgccaggacgaccacggctacatttcccgtgagttccaccgccgctaccgcctgccgtccaacgtggaccagtcggccctctcttgctccctgtctgccgatggcatgctgaccttctgtggccccaagatccagactggcctggatgccacccacgccgagcgagccatccccgtgtcgcgggaggagaagcccacctcggctccctcgtcctaagcaggcattgcctcggctggctcccctgcagccctggcccatcatggggggagcaccctgagggcggggtgtctgtcttcctttgcttcccttttttcctttccaccttctcacatggaatgagggtttgagagagcagccaggagagcttagggtctcagggtgtcccagaccccgacaccggccagtggcggaagtgaccgcacctcacactcctttagatagcagcctggctcccc

SEQ ID NO: 122687 - DNA, 600 bp, Homo sapiens
  Payload ID: 4038
  Gene Symbol: CRYAA
  Gene Name: crystallin, alpha A
  ENST ID: ENST00000398133
  CDS Start-End: 125-586
gcatgcgtggtggcgaatgccagctcccgggttcctctggtctcctgagtcccggagacctgggagcaggtgggggtcatagtcctgaaagccagagagcagggcgttcctagcacctcctccaatgagctcggcctgcccacggctagcaaagctcttggcaagtttacttaggtgccctgccaaggctaaaaggacaggcaatggacgcccccccccccacccaaccacaggcctcctctctgagccacgggttcgatccgaccgggacaagttcgtcatcttcctcgatgtgaagcacttctccccggaggacctcaccgtgaaggtgcaggacgactttgtggagatccacggaaagcacaacgagcgccaggacgaccacggctacatttcccgtgagttccaccgccgctaccgcctgccgtccaacgtggaccagtcggccctctcttgctccctgtctgccgatggcatgctgaccttctgtggccccaagatccagactggcctggatgccacccacgccgagcgagccatccccgtgtcgcgggaggagaagcccacctcggctccctcgtcctaagcaggcattgcctc

SEQ ID NO: 122688 - DNA, 848 bp, Homo sapiens
  Payload ID: 4039
  Gene Symbol: CRYAB
  Gene Name: crystallin, alpha B
  Uniprot ID: P02511
  ENST ID: ENST00000227251
  CDS Start-End: 186-713
gccattgggtgtggacagaaagctagtgaaacaagaccatgacaagtcactggccggctcagacgtgtttgtgtctctcttttcttagctcaaagcttcacaagactgcatatataaggggctggctgtagctgcagctgaaggagctgaccagccagctgacccctcacactcacctagccaccatggacatcgccatccaccacccctggatccgccgccccttctttcctttccactcccccagccgcctctttgaccagttcttcggagagcacctgttggagtctgatcttttcccgacgtctacttccctgagtcccttctaccttcggccaccctccttcctgcgggcacccagctggtttgacactggactctcagagatgcgcctggagaaggacaggttctctgtcaacctggatgtgaagcacttctccccagaggaactcaaagttaaggtgttgggagatgtgattgaggtgcatggaaaacatgaagagcgccaggatgaacatggtttcatctccagggagttccacaggaaataccggatcccagctgatgtagaccctctcaccattacttcatccctgtcatctgatggggtcctcactgtgaatggaccaaggaaacaggtctctggccctgagcgcaccattcccatcacccgtgaagagaagcctgctgtcaccgcagcccccaagaaatagatgccctttcttgaattgcattttttaaaacaagaaagtttccccaccagtgaatgaaagtcttgtgactagtgctgaagcttattaatgctaagggcaggcccaaattatcaagctaataaaatatcattcagc

SEQ ID NO: 122689 - DNA, 695 bp, Homo sapiens
  Payload ID: 4039
  Gene Symbol: CRYAB
  Gene Name: crystallin, alpha B
  ENST ID: ENST00000529647
  CDS Start-End: 307-695
agaaatgcctggaacttgccctcactgagcctaagctcggaggcccctgccctgctgccctccccagctggggcggcccgaggccggacatagtagccatggtagagtctcagtgagtactgggtatgtgtcacattgccaaatcccggatcacaagtctccatgaactgctggtgagctaggataataaaacccctgacatcaccattccagaagcttcacaagactgcatatataaggggctggctgtagctgcagctgaaggagctgaccagccagctgacccctcacactcacctagccaccatggacatcgccatccaccacccctggatccgccgccccttctttcctttccactcccccagccgcctctttgaccagttcttcggagagcacctgttggagtctgatcttttcccgacgtctacttccctgagtcccttctaccttcggccaccctccttcctgcgggcacccagctggtttgacactggactctcagagatgcgcctggagaaggacaggttctctgtcaacctggatgtgaagcacttctccccagaggaactcaaagttaaggtgttgggagatgtgattgaggtgcatggaaaacatgaagagcgccaggatgaacatggtttcatctccagggagttccacaggaaataccggatcccagctgatgtagaccc

SEQ ID NO: 122690 - DNA, 624 bp, Homo sapiens
  Payload ID: 4039
  Gene Symbol: CRYAB
  Gene Name: crystallin, alpha B
  ENST ID: ENST00000528628
  CDS Start-End: 393-624
ataccttctccgaagcgctgctcacccaggcggctcgggttggcaaattcgtactcggcggtggccgggtgggcatgtggcactgagcggcccgacatggctgcagatgcagcagaagccctggtccgaggtgcagccccaacaggcgcagcgcgacccctccagctgcccggagagccagggctcgataggagctcagtgagtactgggtatgtgtcacattgccaaatcccggatcacaagtctccatgaactgctggtgagctaggataataaaacccctgacatcaccattccagaagcttcacaagactgcatatataaggggctggctgtagctgcagctgaaggagctgaccagccagctgacccctcacactcacctagccaccatggacatcgccatccaccacccctggatccgccgccccttctttcctttccactcccccagccgcctctttgaccagttcttcggagagcacctgttggagtctgatcttttcccgacgtctacttccctgagtcccttctaccttcggccaccctccttcctgcgggcacccagctggtttgacactggactctcagagatgcgcctggagaaggacaggttctctgtca

SEQ ID NO: 122691 - DNA, 464 bp, Homo sapiens
  Payload ID: 4039
  Gene Symbol: CRYAB
  Gene Name: crystallin, alpha B
  ENST ID: ENST00000524660
  CDS Start-End: 1-319
aggcccagccaacattgatctaaacctttgggaaatacccctaaacatatctatgcctcagggtttgaaaaacaatgaagtgttggactgtttcagacttctcagattctcactggatgaacatggtttcatctccagggagttccacaggaaataccggatcccagctgatgtagaccctctcaccattacttcatccctgtcatctgatggggtcctcactgtgaatggaccaaggaaacaggtctctggccctgagcgcaccattcccatcacccgtgaagagaagcctgctgtcaccgcagcccccaagaaatagatgccctttcttgaattgcattttttaaaacaagaaagtttccccaccagtgaatgaaagtcttgtgactagtgctgaagcttattaatgctaagggcaggcccaaattatcaagctaataaaatatcattcagcaacagataac

SEQ ID NO: 122692 - DNA, 1119 bp, Homo sapiens
  Payload ID: 4039
  Gene Symbol: CRYAB
  Gene Name: crystallin, alpha B
  Uniprot ID: P02511
  ENST ID: ENST00000533475
  CDS Start-End: 451-978
ggcgcagggagcagggagatgtagacctcattgacctctgtgtccaaatgtcggccaccccgaggtgcttccaggtttaagatgccatcatgggagagagcagctcggactcgccaggggtcgacatcagcaggcaggacataggtgcggcagaactctcgggacacgaagccgtggcggtccaggcgctgggggtgccgggcagacacctccagcaggttatccacagtcctcacagtcacctcgtctgggctcagtgagtactgggtatgtgtcacattgccaaatcccggatcacaagtctccatgaactgctggtgagctaggataataaaacccctgacatcaccattccagaagcttcacaagactgcatatataaggggctggctgtagctgcagctgaaggagctgaccagccagctgacccctcacactcacctagccaccatggacatcgccatccaccacccctggatccgccgccccttctttcctttccactcccccagccgcctctttgaccagttcttcggagagcacctgttggagtctgatcttttcccgacgtctacttccctgagtcccttctaccttcggccaccctccttcctgcgggcacccagctggtttgacactggactctcagagatgcgcctggagaaggacaggttctctgtcaacctggatgtgaagcacttctccccagaggaactcaaagttaaggtgttgggagatgtgattgaggtgcatggaaaacatgaagagcgccaggatgaacatggtttcatctccagggagttccacaggaaataccggatcccagctgatgtagaccctctcaccattacttcatccctgtcatctgatggggtcctcactgtgaatggaccaaggaaacaggtctctggccctgagcgcaccattcccatcacccgtgaagagaagcctgctgtcaccgcagcccccaagaaatagatgccctttcttgaattgcattttttaaaacaagaaagtttccccaccagtgaatgaaagtcttgtgactagtgctgaagcttattaatgctaagggcaggcccaaattatcaagctaataaaatatcattcagcaacaga

SEQ ID NO: 122693 - DNA, 1013 bp, Homo sapiens
  Payload ID: 4039
  Gene Symbol: CRYAB
  Gene Name: crystallin, alpha B
  Uniprot ID: P02511
  ENST ID: ENST00000531198
  CDS Start-End: 368-895
aaacggcctgggtggatagaagggggacaaggaggcacacccaggccggcaaagagcaggtatcagcactgcaagcaccaagtgtgtcttgagggggtggggtctttctgcccagatgtgggatcctctcctaaacccaggtcaacccagggcacgaggcagatggctgctcagtgagtactgggtatgtgtcacattgccaaatcccggatcacaagtctccatgaactgctggtgagctaggataataaaacccctgacatcaccattccagaagcttcacaagactgcatatataaggggctggctgtagctgcagctgaaggagctgaccagccagctgacccctcacactcacctagccaccatggacatcgccatccaccacccctggatccgccgccccttctttcctttccactcccccagccgcctctttgaccagttcttcggagagcacctgttggagtctgatcttttcccgacgtctacttccctgagtcccttctaccttcggccaccctccttcctgcgggcacccagctggtttgacactggactctcagagatgcgcctggagaaggacaggttctctgtcaacctggatgtgaagcacttctccccagaggaactcaaagttaaggtgttgggagatgtgattgaggtgcatggaaaacatgaagagcgccaggatgaacatggtttcatctccagggagttccacaggaaataccggatcccagctgatgtagaccctctcaccattacttcatccctgtcatctgatggggtcctcactgtgaatggaccaaggaaacaggtctctggccctgagcgcaccattcccatcacccgtgaagagaagcctgctgtcaccgcagcccccaagaaatagatgccctttcttgaattgcattttttaaaacaagaaagtttccccaccagtgaatgaaagtcttgtgactagtgctgaagcttattaatgctaagggcaggcccaaattatcaagcta

SEQ ID NO: 122694 - DNA, 981 bp, Homo sapiens
  Payload ID: 4039
  Gene Symbol: CRYAB
  Gene Name: crystallin, alpha B
  ENST ID: ENST00000533971
  CDS Start-End: 93-560
agcttcacaagactgcatatataaggggctggctgtagctgcagctgaaggagctgaccagccagctgacccctcacactcacctagccaccatggacatcgccatccaccacccctggatccgccgccccttctttcctttccactcccccagccgcctctttgaccagttcttcggagagcacctgttggagtctgatcttttcccgacgtctacttccctgagtcccttctaccttcggccaccctccttcctgcgggcacccagctggtttgacactggactctcagagatgcgcctggagaaggacaggttctctgtcaacctggatgtgaagcacttctccccagaggaactcaaagttaaggtgttgggagatgtgattgaggtgcatggaaaacatgaagagcgccaggtatgtagcttgtttttttgttttctgctcattcattcagtgcatactgtaatagtccaggtagtgctatcagctttggaggctggctacattccagtcccaagccataacagtcgggatcaggggttacaaatcaatgtctagaagactaagttaggatagacatattgctgttgttactattatggccagagatgtggcctttgatttgatcgccttagatgggatgatgggatgctgatgccccatttaagccagtggttctgaatctgggccacattagaatcaccaggggaactttcaaaaaacctaatgctcgggcatactccagaccaattagcatatgtgctgccgaagcgagcactactccagaccaattaaatcagcatttttaagggtgggacccaggcatcagcaatttttaaggtaattctaatctacagtcaaggttgagaaccactgattaggtatagggctgtcagacacctagttgctttgcataattacattaactacaggtaccctaaaagcacttgagttgtgacttctcttttagctgtgcaag

SEQ ID NO: 122695 - DNA, 517 bp, Homo sapiens
  Payload ID: 4039
  Gene Symbol: CRYAB
  Gene Name: crystallin, alpha B
  ENST ID: ENST00000526167
  CDS Start-End: 198-517
gggtggaaaactggcaaagagacctgagccagaagaagaggcctttgtctcacagacaaaccacaaagccaggcattggagtcagagaggcagcagatgccaggcttgcacccatccttgcgactggtcccctgggtgatctgtcttcttctctgtccctgtaaataaagtttgggtctgatcaccatgagccttagatgcgcctggagaaggacaggttctctgtcaacctggatgtgaagcacttctccccagaggaactcaaagttaaggtgttgggagatgtgattgaggtgcatggaaaacatgaagagcgccaggatgaacatggtttcatctccagggagttccacaggaaataccggatcccagctgatgtagaccctctcaccattacttcatccctgtcatctgatggggtcctcactgtgaatggaccaaggaaacaggtctctggccctgagcgcaccattcccatcacccgtgaagagaagcctgctgtcaccgcagcccccaa

SEQ ID NO: 122696 - DNA, 545 bp, Homo sapiens
  Payload ID: 4039
  Gene Symbol: CRYAB
  Gene Name: crystallin, alpha B
  ENST ID: ENST00000533280
  CDS Start-End: 75-401
gaggcagcagatgccaggcttgcacccatccttgcgactggtcccctgggtgatctgtcttcttctctgtccctatgcgcctggagaaggacaggttctctgtcaacctggatgtgaagcacttctccccagaggaactcaaagttaaggtgttgggagatgtgattgaggtgcatggaaaacatgaagagcgccaggatgaacatggtttcatctccagggagttccacaggaaataccggatcccagctgatgtagaccctctcaccattacttcatccctgtcatctgatggggtcctcactgtgaatggaccaaggaaacaggtctctggccctgagcgcaccattcccatcacccgtgaagagaagcctgctgtcaccgcagcccccaagaaatagatgccctttcttgaattgcattttttaaaacaagaaagtttccccaccagtgaatgaaagtcttgtgactagtgctgaagcttattaatgctaagggcaggcccaaattatcaagctaataaaatatcattcagcaacagataa

SEQ ID NO: 122697 - DNA, 915 bp, Homo sapiens
  Payload ID: 4039
  Gene Symbol: CRYAB
  Gene Name: crystallin, alpha B
  ENST ID: ENST00000525823
  CDS Start-End: 445-771
ggagctgagtgggcaagggctttggaaggacaagcaggaccagcagaacattccagattgggtgggtggaaaactggcaaagagacctgagccagaagaagaggcctttgtctcacagacaaaccacaaagccaggcattggagtcagagaggcagcagatgccaggcttgcacccatccttgcgactggtcccctgggtgatctgtcttcttctctgtccctgtaaataaagtttgggtctgatcaccatgagccttaggtatcactgtggtggctccctgaagcagacagctatgtttatttaaaaaggagattttttaagcagagaagagaaggatgaattacccggacagaaagcagctctgcagaataagacagcacctgtgtaatcagtatttttgccctctttctcccatcccattcccttaccttgctatttctagatgcgcctggagaaggacaggttctctgtcaacctggatgtgaagcacttctccccagaggaactcaaagttaaggtgttgggagatgtgattgaggtgcatggaaaacatgaagagcgccaggatgaacatggtttcatctccagggagttccacaggaaataccggatcccagctgatgtagaccctctcaccattacttcatccctgtcatctgatggggtcctcactgtgaatggaccaaggaaacaggtctctggccctgagcgcaccattcccatcacccgtgaagagaagcctgctgtcaccgcagcccccaagaaatagatgccctttcttgaattgcattttttaaaacaagaaagtttccccaccagtgaatgaaagtcttgtgactagtgctgaagcttattaatgctaagggcaggcccaaattatcaagctaataaaatatcattcagcaacagataa

SEQ ID NO: 122698 - DNA, 479 bp, Homo sapiens
  Payload ID: 4039
  Gene Symbol: CRYAB
  Gene Name: crystallin, alpha B
  ENST ID: ENST00000533879
  CDS Start-End: 274-479
aggaggaggaggcaccaaacggcctgggtggatagaagggggacaaggaggcacacccaggccggcaaagagcagctcagtgagtactgggtatgtgtcacattgccaaatcccggatcacaagtctccatgaactgctggtgagctaggataataaaacccctgacatcaccattccagaagcttcacaagactgcatatataaggggctggctgtagctgcagctgaaggagctgaccagccagctgacccctcacactcacctagccaccatggacatcgccatccaccacccctggatccgccgccccttctttcctttccactcccccagccgcctctttgaccagttcttcggagagcacctgttggagtctgatcttttcccgacgtctacttccctgagtcccttctaccttcggccaccctccttcctgcgggcacccagctggtttgacactggactctcagagatgcg

SEQ ID NO: 122699 - DNA, 353 bp, Homo sapiens
  Payload ID: 4039
  Gene Symbol: CRYAB
  Gene Name: crystallin, alpha B
  ENST ID: ENST00000528961
  CDS Start-End: 29-353
gcaggaccagcagaacattccagattggatgcgcctggagaaggacaggttctctgtcaacctggatgtgaagcacttctccccagaggaactcaaagttaaggtgttgggagatgtgattgaggtgcatggaaaacatgaagagcgccaggatgaacatggtttcatctccagggagttccacaggaaataccggatcccagctgatgtagaccctctcaccattacttcatccctgtcatctgatggggtcctcactgtgaatggaccaaggaaacaggtctctggccctgagcgcaccattcccatcacccgtgaagagaagcctgctgtcaccgcagcccccaagaaat

SEQ ID NO: 122700 - DNA, 1017 bp, Homo sapiens
  Payload ID: 4039
  Gene Symbol: CRYAB
  Gene Name: crystallin, alpha B
  Uniprot ID: P02511
  ENST ID: ENST00000526180
  CDS Start-End: 291-818
gggtgccattgggtgtggacagaaagctagtgaaacaagaccatgacaagtcactggccggctcagacgtgtttgtgtctctcttttcttagctcagtgagtactgggtatgtgtcacattgccaaatcccggatcacaagtctccatgaactgctggtgagctaggataataaaacccctgacatcaccattccagaagcttcacaagactgcatatataaggggctggctgtagctgcagctgaaggagctgaccagccagctgacccctcacactcacctagccaccatggacatcgccatccaccacccctggatccgccgccccttctttcctttccactcccccagccgcctctttgaccagttcttcggagagcacctgttggagtctgatcttttcccgacgtctacttccctgagtcccttctaccttcggccaccctccttcctgcgggcacccagctggtttgacactggactctcagagatgcgcctggagaaggacaggttctctgtcaacctggatgtgaagcacttctccccagaggaactcaaagttaaggtgttgggagatgtgattgaggtgcatggaaaacatgaagagcgccaggatgaacatggtttcatctccagggagttccacaggaaataccggatcccagctgatgtagaccctctcaccattacttcatccctgtcatctgatggggtcctcactgtgaatggaccaaggaaacaggtctctggccctgagcgcaccattcccatcacccgtgaagagaagcctgctgtcaccgcagcccccaagaaatagatgccctttcttgaattgcattttttaaaacaagaaagtttccccaccagtgaatgaaagtcttgtgactagtgctgaagcttattaatgctaagggcaggcccaaattatcaagctaataaaatatcattcagcaacagataactgtcttgtgtttgaatattccacacacttttaaataaatatacagataccacag

SEQ ID NO: 122701 - DNA, 965 bp, Homo sapiens
  Payload ID: 4039
  Gene Symbol: CRYAB
  Gene Name: crystallin, alpha B
  ENST ID: ENST00000527899
  CDS Start-End: 442-965
agcaagaggggagtcaggaggagtagggaacgggagggaggccacactgtagctaggaggagaaggcagctcggaagaggggaaagagaacggaaaggaaagggaggaggaggaggagaaggaggaggagggggaggaggaggaggcaccaaacggcctgggtggatagaagggggacaaggaggcacacccaggccggcaaagagcaggtatcagcactgcaagcaccaagtgtgtcttgagctcagtgagtactgggtatgtgtcacattgccaaatcccggatcacaagtctccatgaactgctggtgagctaggataataaaacccctgacatcaccattccagaagcttcacaagactgcatatataaggggctggctgtagctgcagctgaaggagctgaccagccagctgacccctcacactcacctagccaccatggacatcgccatccaccacccctggatccgccgccccttctttcctttccactcccccagccgcctctttgaccagttcttcggagagcacctgttggagtctgatcttttcccgacgtctacttccctgagtcccttctaccttcggccaccctccttcctgcgggcacccagctggtttgacactggactctcagagatgcgcctggagaaggacaggttctctgtcaacctggatgtgaagcacttctccccagaggaactcaaagttaaggtgttgggagatgtgattgaggtgcatggaaaacatgaagagcgccaggatgaacatggtttcatctccagggagttccacaggaaataccggatcccagctgatgtagaccctctcaccattacttcatccctgtcatctgatggggtcctcactgtgaatggaccaaggaaacaggtctctggccctgagcgcaccattcccatcacccgtgaagagaagcctgctgtcaccgcagcccccaagaa

SEQ ID NO: 122702 - DNA, 887 bp, Homo sapiens
  Payload ID: 4039
  Gene Symbol: CRYAB
  Gene Name: crystallin, alpha B
  Uniprot ID: P02511
  ENST ID: ENST00000527950
  CDS Start-End: 219-746
aacagggagcactgaatttgctcagtgagtactgggtatgtgtcacattgccaaatcccggatcacaagtctccatgaactgctggtgagctaggataataaaacccctgacatcaccattccagaagcttcacaagactgcatatataaggggctggctgtagctgcagctgaaggagctgaccagccagctgacccctcacactcacctagccaccatggacatcgccatccaccacccctggatccgccgccccttctttcctttccactcccccagccgcctctttgaccagttcttcggagagcacctgttggagtctgatcttttcccgacgtctacttccctgagtcccttctaccttcggccaccctccttcctgcgggcacccagctggtttgacactggactctcagagatgcgcctggagaaggacaggttctctgtcaacctggatgtgaagcacttctccccagaggaactcaaagttaaggtgttgggagatgtgattgaggtgcatggaaaacatgaagagcgccaggatgaacatggtttcatctccagggagttccacaggaaataccggatcccagctgatgtagaccctctcaccattacttcatccctgtcatctgatggggtcctcactgtgaatggaccaaggaaacaggtctctggccctgagcgcaccattcccatcacccgtgaagagaagcctgctgtcaccgcagcccccaagaaatagatgccctttcttgaattgcattttttaaaacaagaaagtttccccaccagtgaatgaaagtcttgtgactagtgctgaagcttattaatgctaagggcaggcccaaattatcaagctaataaaatatcattcagcaacaga

SEQ ID NO: 122703 - DNA, 977 bp, Homo sapiens
  Payload ID: 4039
  Gene Symbol: CRYAB
  Gene Name: crystallin, alpha B
  Uniprot ID: P02511
  ENST ID: ENST00000616970
  CDS Start-End: 308-835
aggaggaggaggcaccaaacggcctgggtggatagaagggggacaaggaggcacacccaggccggcaaagagcaggtatcagcactgcaagcaccaagtgtgtcttgagctcagtgagtactgggtatgtgtcacattgccaaatcccggatcacaagtctccatgaactgctggtgagctaggataataaaacccctgacatcaccattccagaagcttcacaagactgcatatataaggggctggctgtagctgcagctgaaggagctgaccagccagctgacccctcacactcacctagccaccatggacatcgccatccaccacccctggatccgccgccccttctttcctttccactcccccagccgcctctttgaccagttcttcggagagcacctgttggagtctgatcttttcccgacgtctacttccctgagtcccttctaccttcggccaccctccttcctgcgggcacccagctggtttgacactggactctcagagatgcgcctggagaaggacaggttctctgtcaacctggatgtgaagcacttctccccagaggaactcaaagttaaggtgttgggagatgtgattgaggtgcatggaaaacatgaagagcgccaggatgaacatggtttcatctccagggagttccacaggaaataccggatcccagctgatgtagaccctctcaccattacttcatccctgtcatctgatggggtcctcactgtgaatggaccaaggaaacaggtctctggccctgagcgcaccattcccatcacccgtgaagagaagcctgctgtcaccgcagcccccaagaaatagatgccctttcttgaattgcattttttaaaacaagaaagtttccccaccagtgaatgaaagtcttgtgactagtgctgaagcttattaatgctaagggcaggcccaaattatcaagctaataaaatatcattcagcaacagat

SEQ ID NO: 122704 - DNA, 783 bp, Homo sapiens
  Payload ID: 4040
  Gene Symbol: CRYBA1
  Gene Name: crystallin, beta A1
  Uniprot ID: P05813
  ENST ID: ENST00000225387
  CDS Start-End: 2-649
gatggagacccaggctgagcagcaggagctggaaacccttccaaccaccaagatggctcagaccaaccctacgccggggtccctggggccatggaagataaccatctatgatcaggagaactttcagggcaagaggatggagttcaccagctcctgtccaaatgtctctgagcgcagttttgataatgtccggtccctgaaggtggaaagtggcgcctggattggttatgagcataccagcttctgtgggcaacagtttatcctggagagaggagaataccctcgctgggatgcctggagtgggagtaatgcctaccacattgagcgtctcatgtccttccgccccatctgttcagctaatcataaggagtctaagatgaccatctttgagaaggaaaactttattggacgccagtgggagatctctgacgactacccctccttgcaagccatgggctggttcaacaacgaagtcggctccatgaagatacaaagtggggcctgggtttgctaccaatatcctggatatcgtgggtatcagtatatcttggaatgtgaccatcatggaggagactataaacattggagagagtggggctctcatgcccagacttcgcagatccaatcgattcgccgaatccaacagtagctgattaaaagctccaagtacgataattcctcaagcatgagaccttgctaagcactctagaataagttttatgttctgctcacagacattgctttcaaatgttagctgctgaaatccacaataaacgtcattta

SEQ ID NO: 122705 - DNA, 641 bp, Homo sapiens
  Payload ID: 4040
  Gene Symbol: CRYBA1
  Gene Name: crystallin, beta A1
  ENST ID: ENST00000484605
  CDS Start-End: 1-227
aggctgagcagcaggagctggaaacccttccaaccaccaagatggctcagaccaaccctacgccggggtccctggggccatggaagataaccatctatgatcaggagaactttcagggcaagaggatggagttcaccagctcctgtccaaatgtctctgagcgcagttttgataatgtccggtccctgaaggtggaaagtggcgcaatcataaggagtctaagatgaccatctttgagaaggaaaactttattggacgccagtgggagatctctgacgactacccctccttgcaagccatgggctggttcaacaacgaagtcggctccatgaagatacaaagtggggcctgggtttgctaccaatatcctggatatcgtgggtatcagtatatcttggaatgtgaccatcatggaggagactataaacattggagagagtggggctctcatgcccagacttcgcagatccaatcgattcgccgaatccaacagtagctgattaaaagctccaagtacgataattcctcaagcatgagaccttgctaagcactctagaataagttttatgttctgctcacagacattgctttcaaatgttagctgctgaaatccacaataaacgtcatttaaaaaaaaaaaa

SEQ ID NO: 122706 - DNA, 893 bp, Homo sapiens
  Payload ID: 4041
  Gene Symbol: CRYBA2
  Gene Name: crystallin, beta A2
  Uniprot ID: P53672
  ENST ID: ENST00000295728
  CDS Start-End: 238-831
gccggtccatttccctcgcgtgccgcgctcacccacccggtgaatgccctctgctggggtggggaagggaggggagcgcgggaagactgcgagcccctggcagccgggtccagagctaggccgggtccagcccccgggttcttcatccgctacccaggttgggcaggctgtgtgtggctcgaaacggggctcttgagacgctgagcgcgtggtgccacccttcctgtccgcagcggcatgagcagcgcccccgcgccgggcccggcgcccgccagcctcacgctctgggacgaggaggacttccagggccgtcgctgtcggctgctaagcgactgtgcgaacgtctgcgagcgcggaggcctgcccagggtgcgctcggtcaaggtggaaaacggcgtttgggtggcctttgagtaccccgacttccagggacagcagttcattctggagaagggagactatcctcgctggagcgcctggagtggcagcagcagccacaacagcaaccagctgctgtccttccggccagtgctctgcgcgaaccacaatgacagccgtgtgacactgtttgagggggacaacttccaaggctgcaagtttgacctcgttgatgactacccatccctgccctccatgggctgggccagcaaggatgtgggttccctcaaagtcagctccggagcgtgggtggcctaccagtacccaggctaccgaggctaccagtatgtgttggagcgggaccggcacagcggagagttctgtacttacggtgagctcggcacacaggcccacactgggcagctgcagtccatccggagagtccagcactaggctccacggccccagacaccttccctgaggacactcaataaaggttcctgaatcttcctgcc

SEQ ID NO: 122707 - DNA, 708 bp, Homo sapiens
  Payload ID: 4041
  Gene Symbol: CRYBA2
  Gene Name: crystallin, beta A2
  Uniprot ID: P53672
  ENST ID: ENST00000392096
  CDS Start-End: 52-645
gcctcgcagccggtccatttccctcgcgtgccgcgctcacccacccgcggcatgagcagcgcccccgcgccgggcccggcgcccgccagcctcacgctctgggacgaggaggacttccagggccgtcgctgtcggctgctaagcgactgtgcgaacgtctgcgagcgcggaggcctgcccagggtgcgctcggtcaaggtggaaaacggcgtttgggtggcctttgagtaccccgacttccagggacagcagttcattctggagaagggagactatcctcgctggagcgcctggagtggcagcagcagccacaacagcaaccagctgctgtccttccggccagtgctctgcgcgaaccacaatgacagccgtgtgacactgtttgagggggacaacttccaaggctgcaagtttgacctcgttgatgactacccatccctgccctccatgggctgggccagcaaggatgtgggttccctcaaagtcagctccggagcgtgggtggcctaccagtacccaggctaccgaggctaccagtatgtgttggagcgggaccggcacagcggagagttctgtacttacggtgagctcggcacacaggcccacactgggcagctgcagtccatccggagagtccagcactaggctccacggccccagacaccttccctgaggacactcaataaaggttcctgaatcttcctgccc

SEQ ID NO: 122708 - DNA, 493 bp, Homo sapiens
  Payload ID: 4041
  Gene Symbol: CRYBA2
  Gene Name: crystallin, beta A2
  ENST ID: ENST00000453769
  CDS Start-End: 108-493
ccctcgcgtgccgcgctcacccacccggttgggcaggctgtgtgtggctcgaaacggggctcttgagacgctgagcgcgtggtgccacccttcctgtccgcagcggcatgagcagcgcccccgcgccgggcccggcgcccgccagcctcacgctctgggacgaggaggacttccagggccgtcgctgtcggctgctaagcgactgtgcgaacgtctgcgagcgcggaggcctgcccagggtgcgctcggtcaaggtggaaaacggcgtttgggtggcctttgagtaccccgacttccagggacagcagttcattctggagaagggagactatcctcgctggagcgcctggagtggcagcagcagccacaacagcaaccagctgctgtccttccggccagtgctctgcgcgaaccacaatgacagccgtgtgacactgtttgagggggacaacttccaaggctgcaagtttgacctcgttgatgactacccatc

SEQ ID NO: 122709 - DNA, 811 bp, Homo sapiens
  Payload ID: 4042
  Gene Symbol: CRYBA4
  Gene Name: crystallin, beta A4
  Uniprot ID: P53673
  ENST ID: ENST00000354760
  CDS Start-End: 36-626
acatgttccctgggcctatctcggaaggggccacaatgaccctgcaatgcacaaagtcagcgggaccctggaagatggtggtgtgggatgaggacggcttccagggccggcggcacgagttcacggccgagtgccccagcgtgctggagcttggcttcgagactgtgcgatctttgaaagtgctgagtggagcgtgggtgggctttgagcatgctggcttccaagggcagcagtacattctggaacgaggcgaatatccaagctgggatgcctggggcggcaacacggcctaccccgccgagaggctcacctccttccggcctgcggcctgtgctaaccaccgtgactcgaggctgacaatcttcgagcaagagaacttcctgggcaagaaaggagagctgagcgatgactatccttccctccaggccatgggatgggaaggcaatgaagtagggtccttccacgtccactctggggcctgggtttgctcccagtttccgggctaccgaggatttcagtatgtgctggaatgcgatcaccattccggtgactacaaacatttccgggagtggggctctcatgccccgaccttccaggtgcagagcatccgcaggatccagcagtgaacaggggtgcggcacggaggagcgcatgcgtgcttatctgcaatggaggcgctctggaggctgtggtgtgttctctccttctgcctccccctgtaacctgtgtgaacccagcacccatgtgaactggtccgtgcacagtcagcacaaaaaactcaaacgaataaaaaagagaaagtctggtatta

SEQ ID NO: 122710 - DNA, 1102 bp, Homo sapiens
  Payload ID: 4043
  Gene Symbol: CRYBB1
  Gene Name: crystallin, beta B1
  Uniprot ID: P53674
  ENST ID: ENST00000215939
  CDS Start-End: 132-890
acagactatagggcctgatgtctgccagactataaaatggggggtcggactctagtcacccatagcacctgcccgcctgcctgtcctccagcaggaagtagcaagtccccagacttttgcaggcgggaaccatgtctcaggctgcaaaggcctcggcctcggccacagtggcggtgaacccagggcctgacaccaaggggaagggggccccacctgcaggaacatcccctagtcccggcactaccctggccccaacaaccgtgcctattaccagcgccaaggcggcggaactgcctcctgggaactacaggctggtggtcttcgaactggaaaacttccagggccgtcgagcagaattctcgggggagtgctcaaatctggcagaccgtggcttcgaccgtgtgcgcagcatcattgtctccgcgggaccctgggtcgcctttgagcagtccaacttccgcggggagatgttcatcctggagaagggcgagtaccctcgctggaacacatggtcgagcagctaccgcagtgatcggctcatgtccttccggcccatcaaaatggatgcccaggagcacaaaatctccctgtttgaaggggccaacttcaagggcaacaccatagagatccagggggacgacgcacccagtctctgggtctacggcttcagtgaccgcgtgggcagcgtgaaggtctccagtggaacatgggttggctatcagtatcctggctaccgcgggtaccagtacctcctagagcctggtgacttccggcactggaatgagtggggagccttccagccacagatgcagtccctgcgtcgcctgcgtgacaagcagtggcacctcgaggggtccttccctgtcctggccacagagccccccaagtgagtccacacctcactctgctaccttgccccaacccttcttcatgttcaattatttcccccatttttcccaggcaaataaaattccctaaagccaaaatttctcctggatctgtaaacagatgtgtgccttgaggtcccccatagttactgggatgtgacttcctcgctcttaataattacaacgataataaaagcagcaaacactgaaaagtt

SEQ ID NO: 122711 - DNA, 886 bp, Homo sapiens
  Payload ID: 4044
  Gene Symbol: CRYBB2
  Gene Name: crystallin, beta B2
  Uniprot ID: P43320
  ENST ID: ENST00000398215
  CDS Start-End: 172-789
ggtgagagcttaatccagcattctcaccctgcttttcgcaggagcacagcggtcactcatcttggcaccggcacttctggggaaggtataaatgccacctcccgctggccgagcttcacggcactcgcaggggctggtgtcactggtcattcctgcacaggacagtccaccatggcctcagatcaccagacccaggcgggcaagccacagtccctcaaccccaagatcatcatctttgagcaggaaaactttcaaggccactcgcatgagctcaatgggccctgccccaacctgaaggaaactggcgtggagaaggcaggttctgtcctagtgcaggctggaccctgggtgggctatgaacaggccaactgcaagggcgagcagtttgtgtttgagaagggtgagtacccccgctgggactcatggaccagcagccgaaggacggactccctcagctccctgaggcccatcaaagtggacagccaagagcacaagatcatcctctatgaaaaccccaacttcaccgggaagaagatggaaatcatagatgacgatgtacccagcttccacgcccatggctaccaggagaaggtgtcatctgtgcgggtgcagagtggcacgtgggttggctaccagtaccccggctaccgtgggctgcagtacctgctggagaagggagactacaaggacagcagcgactttggggcccctcacccccaggtgcagtccgtgcgccgtatccgcgacatgcagtggcaccaacgtggtgccttccacccctccaactagtgccctccccaccatgcctccttcccaggacccaggtctgctgcccaggaaccctccagacctcccagagagtgaataaagtgtgacttgcaacttg

SEQ ID NO: 122712 - DNA, 867 bp, Homo sapiens
  Payload ID: 4045
  Gene Symbol: CRYBB3
  Gene Name: crystallin, beta B3
  Uniprot ID: P26998
  ENST ID: ENST00000215855
  CDS Start-End: 81-716
agacaggcgagtctgcagacggccgtggctcctctgttcttcccgaggctacagcaacagccagaggtgttcctggggagatggcggaacagcacggagcacccgaacaggctgcagctggcaagagccatggagaccttgggggcagctacaaggtgatcttgtacgaactagagaacttccaaggcaaacgctgcgagctctcggccgagtgccccagcctgaccgacagcctgctggagaaggtgggctccatccaagtggagtccgggccgtggctggcatttgagtccagggccttccgcggggagcagtttgttctggagaagggggattatcctcgctgggatgcctggtccaacagccgtgatagtgacagccttctgtccctccggcctctgaatattgatagtccacatcacaagctgcatctgtttgagaacccagctttcagtggccgcaagatggagatagtggatgatgacgtgcccagcctgtgggctcatggcttccaggaccgtgtggcgagtgtccgtgccatcaacgggacgtgggttggctatgagttccccggctaccgtgggcgccagtacgtgtttgagcggggcgagtaccgccactggaatgagtgggacgccagccagccgcagctgcagtctgtgcgccgcatccgtgaccagaagtggcacaagcggggccgcttccccagcagctgaaaggcacccagacttcaaggacccagacccaccctggggggctgcaagggcaagaagaggaggctccagggttggggcgagggccgacctgtccacccttccctggaatctgctcaataaagcctggggttggtcccccacccgccacgtt

SEQ ID NO: 122713 - DNA, 601 bp, Homo sapiens
  Payload ID: 4045
  Gene Symbol: CRYBB3
  Gene Name: crystallin, beta B3
  ENST ID: ENST00000404334
  CDS Start-End: 54-395
cgtggctcctctgttcttcccgaggctacagcaacagaggtgttcctggggagatggcggaacagcacggagcacccgaacaggctgcagctggcaagagccatggagaccttgggggcagctacaaggtgatcttgtacgaactagagaacttccaaggcaaacgctgcgagctctcggccgagtgccccagcctgaccgacagcctgctggagaaggtgggctccatccaagtggagtccgggccgtggctggcatttgagtccagggccttccgcggggagcagtttgttctggagaagggggattatcctcgctgggatgcctggtccaacagccgtgatagtgacagccttctgtccctccggcctctgaatattgtgggttggctatgagttccccggctaccgtgggcgccagtacgtgtttgagcggggcgagtaccgccactggaatgagtgggacgccagccagccgcagctgcagtctgtgcgccgcatccgtgaccagaagtggcacaagcggggccgcttccccagcagctgaaaggcacccagacttcaaggacccagacccaccctggggggctgcaagggcaaga

SEQ ID NO: 122714 - DNA, 609 bp, Homo sapiens
  Payload ID: 4046
  Gene Symbol: CRYGA
  Gene Name: crystallin, gamma A
  Uniprot ID: P11844
  ENST ID: ENST00000304502
  CDS Start-End: 21-545
atcaccctctgtcaacaaccatggggaagatcaccttctacgaggaccgagactttcagggtcgctgctacaattgcatcagtgactgccccaacctgcgggtctacttcagccgctgcaactccatccgagtagacagcggctgctggatgctctatgagcgtcccaattaccagggccaccagtacttcctgcgccgaggcaagtaccccgactatcagcactggatgggcctcagcgactcggtccaatcctgccgtataattcctcataccagctcgcacaagttaaggctgtacgagagagatgactaccgaggccttatgtctgagctcactgatgactgcgcctgtgttccagaactgttccgtctccctgagatctattccctccacgtactggagggctgctgggtcctctatgaaatgcccaactaccgggggcggcagtatctgctgaggcctggggactacagaaggtaccacgactgggggggtgcagatgccaaagtcggctctttgagacgggtcaccgatttgtactaagctgtgcctgccttgttgtgatccccatagaaacataataaatatacaagttgtgttccctgca

SEQ ID NO: 122715 - DNA, 641 bp, Homo sapiens
  Payload ID: 4047
  Gene Symbol: CRYGB
  Gene Name: crystallin, gamma B
  Uniprot ID: P07316
  ENST ID: ENST00000260988
  CDS Start-End: 49-576
ccgcagtcccacacagcaaccagaaaacatctgctcacttccttcaaaatgggaaagatcaccttctacgaggacagggccttccagggccgcagctacgaatgcaccactgactgccccaacctacaaccctatttcagccgctgcaactccatcagggtggagagcggctgctggatgatctatgagcgccccaactaccagggccaccagtacttcctgcggcgtggggagtaccctgactaccagcaatggatgggcctcagcgactccatccgctcctgctgcctcatccccccgcactctggcgcttacagaatgaagatctacgacagagatgaattgaggggacaaatgtcagagctcacagacgactgtatctctgttcaggaccgcttccacctcactgaaattcactccctcaatgtgctggagggcagctggatcctctatgagatgcccaactacagggggaggcagtatctgctgaggccgggggagtacaggaggtttcttgattggggggctccaaatgccaaagttggctctcttagacgagtcatggatttgtactgaagtatttacgttttccacttttctcctttaaaatctaataaaatatttagcttgtgtttctggca

SEQ ID NO: 122716 - DNA, 629 bp, Homo sapiens
  Payload ID: 4048
  Gene Symbol: CRYGC
  Gene Name: crystallin, gamma C
  Uniprot ID: P07315
  ENST ID: ENST00000282141
  CDS Start-End: 39-563
ccatcacactgaactcgcatcatccgtgtcaaccagccatggggaagatcaccttctatgaggacagggccttccagggccgcagctacgaaaccaccactgactgccccaacctgcagccgtatttcagccgctgcaactccatccgggtggagagcggctgctggatgctctatgagcgtcccaactaccaaggtcaacaatacttgctgcggcgaggggagtaccccgactaccagcaatggatgggcctcagcgactccatccgctcctgttgtctcatcccccaaacagtctcccacaggctgcggctgtacgagagggaagaccacaaaggcctcatgatggagctgagtgaagactgccccagcatccaggaccgcttccacctcagcgagatccgttccctccacgtgctggagggctgctgggtcctctacgagctgcccaactaccgggggcggcaatacctgctgaggccccaagagtacaggcggtgccaggactggggggccatggatgctaaggcaggctctttgcggagagtggtggatttgtattaaaatagcttaacactaccaatttcccattttggaacctaataaatatttagtctgcattgctggcaa

SEQ ID NO: 122717 - DNA, 619 bp, Homo sapiens
  Payload ID: 4049
  Gene Symbol: CRYGD
  Gene Name: crystallin, gamma D
  Uniprot ID: P07320
  ENST ID: ENST00000264376
  CDS Start-End: 29-553
ctcagcaccgccgtgcgcccagccagccatggggaagatcaccctctacgaggaccggggcttccagggccgccactatgaatgcagcagcgaccaccccaacctgcagccctacttgagccgctgcaactcggcgcgcgtggacagcggctgctggatgctctatgagcagcccaactactcgggcctccagtacttcctgcgccgcggcgactatgccgaccaccagcagtggatgggcctcagcgactcggtccgctcctgccgcctcatcccccactctggctctcacaggatcagactctatgagagagaggactacagaggccagatgatagagttcactgaggactgctcctgtcttcaggaccgcttccgcttcaatgaaatccactccctcaacgtgctggagggctcctgggtcctctacgagctgtccaactaccgaggacggcagtacctgctgatgccaggggactataggcgctaccaggactggggggccacgaatgccagagtgggctctctgaggagagtcatagatttctcctgaaatatgtcctcttttgttgtttcttaatttggaaactaataaaatattttctgtgtgttcctggca

SEQ ID NO: 122718 - DNA, 754 bp, Homo sapiens
  Payload ID: 4050
  Gene Symbol: CRYGN
  Gene Name: crystallin, gamma N
  Uniprot ID: Q8WXF5
  ENST ID: ENST00000337323
  CDS Start-End: 128-676
ggcttagcacgcccgacagcactaacgctccggggccggcccagcaaatcttttgtccggggcggcgctgagccagcagggcgctgcccggtgtaaacggggacccgcggaaggggcggggcgcaccatggcgcagcgctcggggaagatcactctctatgaaggcaagcacttcacagggcagaagctggaggtcttcggggactgtgacaacttccaggaccggggctttatgaaccgagtgaactccatccacgtggagagcggagcctgggtctgcttcaatcaccccgacttccggggccagcagttcatcttggagcacggcgactaccccgacttcttccgctggaacagccacagtgaccacatgggctcctgtcggcctgtaggaatgcacggagaacatttccgcctagaaatcttcgagggttgcaacttcacgggccagtgcctggagttcctggaggacagccccttcctccagagcaggggctgggtcaagaactgtgtgaacaccatcaaggtgtacggggacggagcagcatggagccctagaagcttcggagctgaggacttccagctgagcagctctcttcaatcagatcaaggaccggaagaggccaccacaaaaccagcaacaacccagccacctttcctgactgcaaacctctgagcctggaaccgattgacatgtaaatgcacctgcaccgtttctgagccgggagagtgtttacttaaaatcatgccctca

SEQ ID NO: 122719 - DNA, 698 bp, Homo sapiens
  Payload ID: 4050
  Gene Symbol: CRYGN
  Gene Name: crystallin, gamma N
  Uniprot ID: Q8WXF5
  ENST ID: ENST00000491928
  CDS Start-End: 92-469
cggcccagcaaatcttttgtccggggcggcgctgagccagcagggcgctgcccggtgtaaacggggacccgcggaaggggcggggcgcaccatggcgcagcgctcggggaagatcactctctatgaaggcaagcacttcacagggcagaagctggaggtcttcggggactgtgacaacttccaggaccggggctttatgaaccgagtgaactccatccacgtggagagcggagcctgggtctgcttcaatcaccccgacttccggggccagcagttcatcttggagcacggcgactaccccgacttcttccgctggaacagccacagtgaccacatgggctcctgtcggcctgtaggaatggtgagtgggcccgtccaccgaaggctgagtcttcctgctggagggaccgagggtcagccctggcagacagtggcaaggaatcggggagcgtggtcctcccggctttaaagtctgtaagactgaaggagctatacccagagccacctgctggcatgagagcatggagccctagaagcttcggagctgaggacttccagctgagcagctctcttcaatcagatcaaggaccggaagaggccaccacaaaaccagcaacaacccagccacctttcctgactgcaaacctctgagcctggaaccgattgacatgtaaatgcacctgcaccgtttctgagcc

SEQ ID NO: 122720 - DNA, 759 bp, Homo sapiens
  Payload ID: 4051
  Gene Symbol: CRYGS
  Gene Name: crystallin, gamma S
  Uniprot ID: P22914
  ENST ID: ENST00000307944
  CDS Start-End: 126-662
ctattctcatgactaagcaaatgtttgactgaaaccagcccatataaatgtcactgtgcctctaactctctgtagccattcctgaatttctttcagcactgggaaaaccagtctatgcaccaaaaatgtctaaaactggaaccaagattactttctatgaagacaaaaattttcaaggccgtcgctatgactgtgattgcgactgtgcagatttccacacatacctaagtcgctgcaactccattaaagtggaaggaggcacctgggctgtttatgaaaggcccaactttgctgggtacatgtacatcttaccacagggagagtaccctgaataccagcgttggatgggcctcaacgaccgcctcagctcctgcagagctgttcatctgcctagtggaggccagtataagattcagatctttgagaaaggggattttagtggtcagatgtatgaaaccaccgaagattgcccttccatcatggagcaatttcacatgcgagagatccactcctgtaaggtgctggagggtgtctggattttctatgagctacccaactaccgtggcaggcagtacctcctggacaagaaggagtaccggaagcccatcgattggggtgcagcctccccagctgtccagtctttccgccgcattgtggagtaatgacatgaatggggccatattcttcctggggcccaaatgctggctggccttgtggtccaaataggcatcatcaataaaacagttggcatgcatccca

SEQ ID NO: 122721 - DNA, 1132 bp, Homo sapiens
  Payload ID: 4051
  Gene Symbol: CRYGS
  Gene Name: crystallin, gamma S
  Uniprot ID: P22914
  ENST ID: ENST00000392499
  CDS Start-End: 341-877
cccgccaccacgcccggccaattttttttgtatttttagtagagacggggtttcaccgtgttagtcaggatggtctcgatttcctgacctcgtgatccgcccatctcggcctcccaaagtgctgggattacaggcgtgagccaccgtgcccagccttctgttctatttaagaactttgatttccattccattttcatttattactgtttaggccgaattttcgctaaacttctgactttcatataaacatattgcttatagaacatcagaagactcgtctttgtgatgcccaaatgaaaaagttggtgaagcactgggaaaaccagtctatgcaccaaaaatgtctaaaactggaaccaagattactttctatgaagacaaaaattttcaaggccgtcgctatgactgtgattgcgactgtgcagatttccacacatacctaagtcgctgcaactccattaaagtggaaggaggcacctgggctgtttatgaaaggcccaactttgctgggtacatgtacatcttaccacagggagagtaccctgaataccagcgttggatgggcctcaacgaccgcctcagctcctgcagagctgttcatctgcctagtggaggccagtataagattcagatctttgagaaaggggattttagtggtcagatgtatgaaaccaccgaagattgcccttccatcatggagcaatttcacatgcgagagatccactcctgtaaggtgctggagggtgtctggattttctatgagctacccaactaccgtggcaggcagtacctcctggacaagaaggagtaccggaagcccatcgattggggtgcagcctccccagctgtccagtctttccgccgcattgtggagtaatgacatgaatggggccatattcttcctggggcccaaatgctggctggccttgtggtccaaataggcatcatcaataaaacagttggcatgcatcccactgctgactataatgcctctccttaaatgcttctagggaccagcaatacagtgctcgccacagtgggcagtcacacaaagctacccatctgccagatcaccaatctagatctttgtgccaaacaaaatgagatctcattaaaaggttagaaagtcata

SEQ ID NO: 122722 - DNA, 1485 bp, Homo sapiens
  Payload ID: 4052
  Gene Symbol: CRYL1
  Gene Name: crystallin, lambda 1
  Uniprot ID: Q9Y2S2
  ENST ID: ENST00000298248
  CDS Start-End: 64-1023
agagctcgcagctccgccggcgcctggtcccagcgcccgcggcgccgcgtccccggcccaaccatggcgtcctccgcggccggctgcgtggtgatcgttggcagtggagtcattgggcgaagctgggccatgctgtttgccagtggaggcttccaggtgaaactctatgacattgagcaacagcagataaggaacgccctggaaaacatcagaaaggagatgaagttgctggagcaggcaggttctctgaaaggctccctgagtgtggaagagcagctgtcactcatcagtggttgtcccaatatccaagaagcagtagagggtgccatgcacattcaggaatgtgttccagaagatctagaactgaagaagaagatttttgctcagttagattccatcattgatgatcgagtgatcttaagcagttccacttcttgtctcatgccttccaagttgtttgctggcttggtccatgtgaagcaatgcatcgtggctcatcctgtgaatccgccatactacatcccgctggttgagctggtcccccacccggagacggcccctacgacagtggacagaacccacgccctgatgaagaagattggacagtgccccatgcgagtccagaaggaggtggccggcttcgttctgaaccgcctgcaatatgcaatcatcagcgaggcctggcggctagtggaggaaggaatcgtgtctcctagtgacctggaccttgtcatgtcagaagggttgggcatgcggtatgcattcattggacccctggaaaccatgcatctcaatgcagaaggtatgttaagctactgcgacagatacagcgaaggcataaaacatgtcctacagacttttggacccattccagagttttccagggccactgctgagaaggttaaccaggacatgtgcatgaaggtccctgatgacccggagcacttagctgccaggaggcagtggagggacgagtgcctcatgagactcgccaagttgaagagtcaagtgcagccccagtgaatttcttgtaatgcagcttccactcctctcattggaggccctatttgggaacactgcaagcccttaatcagccctctgtgacataggtagcagcccacggagatcctaagctggctgtcttgtgtgcagcctgagtggggtggtgcaggccggtagtctgcccgtcactttggatcatagccctgggcctggcggcacagcagcacttgcgttctcggggctgtcgatttcctgccacctgggcagataacctggagattttcaccttttcttttcagcttgattgcatttgactatattttacagccagtgattgtagtttcatgttaatatgtggcaaaatatttttgtaattattttctaatccctttctgagtactctggggccctgcatttatgaggcacctaccttcattttgctaacgcttattctgaataaaagtttttgattccttaaagaca

SEQ ID NO: 122723 - DNA, 1581 bp, Homo sapiens
  Payload ID: 4052
  Gene Symbol: CRYL1
  Gene Name: crystallin, lambda 1
  Uniprot ID: Q9Y2S2
  ENST ID: ENST00000382812
  CDS Start-End: 230-1123
agagctcgcagctccgccggcgcctggtcccagcgcccgcggcgccgcgtccccggcccaaccatggcgtcctccgcggccggctgcgtggtgatcgttggcagaattaaaactctgtacccattgaacaacagctgctcatttcccccagccccagcccctggcatccacccttctagctttctgtctctatgggtacctcagtggagtcattgggcgaagctgggccatgctgtttgccagtggaggcttccaggtgaaactctatgacattgagcaacagcagataaggaacgccctggaaaacatcagaaaggagatgaagttgctggagcaggcaggttctctgaaaggctccctgagtgtggaagagcagctgtcactcatcagtggttgtcccaatatccaagaagcagtagagggtgccatgcacattcaggaatgtgttccagaagatctagaactgaagaagaagatttttgctcagttagattccatcattgatgatcgagtgatcttaagcagttccacttcttgtctcatgccttccaagttgtttgctggcttggtccatgtgaagcaatgcatcgtggctcatcctgtgaatccgccatactacatcccgctggttgagctggtcccccacccggagacggcccctacgacagtggacagaacccacgccctgatgaagaagattggacagtgccccatgcgagtccagaaggaggtggccggcttcgttctgaaccgcctgcaatatgcaatcatcagcgaggcctggcggctagtggaggaaggaatcgtgtctcctagtgacctggaccttgtcatgtcagaagggttgggcatgcggtatgcattcattggacccctggaaaccatgcatctcaatgcagaaggtatgttaagctactgcgacagatacagcgaaggcataaaacatgtcctacagacttttggacccattccagagttttccagggccactgctgagaaggttaaccaggacatgtgcatgaaggtccctgatgacccggagcacttagctgccaggaggcagtggagggacgagtgcctcatgagactcgccaagttgaagagtcaagtgcagccccagtgaatttcttgtaatgcagcttccactcctctcattggaggccctatttgggaacactgcaagcccttaatcagccctctgtgacataggtagcagcccacggagatcctaagctggctgtcttgtgtgcagcctgagtggggtggtgcaggccggtagtctgcccgtcactttggatcatagccctgggcctggcggcacagcagcacttgcgttctcggggctgtcgatttcctgccacctgggcagataacctggagattttcaccttttcttttcagcttgattgcatttgactatattttacagccagtgattgtagtttcatgttaatatgtggcaaaatatttttgtaattattttctaatccctttctgagtactctggggccctgcatttatgaggcacctaccttcattttgctaacgcttattctgaataaaagtttttgattccttaaa

SEQ ID NO: 122724 - DNA, 1035 bp, Homo sapiens
  Payload ID: 4052
  Gene Symbol: CRYL1
  Gene Name: crystallin, lambda 1
  ENST ID: ENST00000480748
  CDS Start-End: 1-445
gcagctgtcactcatcagtggttgtcccaatatccaagaagcagtagagggtgccatgcacattcaggaatgtgttccagaagatctagaactgaagaagaagatttttgctcagttagattccatcattgatgatcgagtgatcttaagcagttccacttcttgtctcatgccttccaagttgtttgctggcttggtccatgtgaagcaatgcatcgtggctcatcctgtgaatccgccatactacatcccgctggttgagctggtcccccacccggagacggcccctacgacagtggacagaacccacgccctgatgaagaagattggacagtgccccatgcgagtccagaaggaggtggccggcttcgttctgaaccgcctgcaatatgcaatcatcagcgaggcctggcggctagtggagttggcttcagttttgggatgaagcagccctgtggtcttggaaatgccagatggacatgtctggccacaatctactgacacttacttcccctgccggaggcgtgctccctgggtcacgtgatcttattggctgggatgtcatttcaagtctacatttttaaggcattagcataatgaaggacattgtgttgtgacaatagacttttggctggacagtagctaagtttgttgcctgtaaattctttcccatgagggcagggtatgtggaggtgcctgggaatgaatctgcaaccctcggcaggttctcagcctgctggtgtgagttggtggtgatgagcttcggaaattgctgaccttgggttctgcctgtccttcggaatgatgtcatccctgtgctggactgctgtccttagggcctgggccgcagagattgagttcttggtctcttgatttgtcagggtgggtgtggtctggggcatctggatggggccctgagattccagaacttcatcgttgagctttacttcagacatgtctgccaactgttaggagacattgttttagttaatgaagtgtatctcaaagatcatgtagtaaaattgacagatgagg

SEQ ID NO: 122725 - DNA, 1471 bp, Homo sapiens
  Payload ID: 4053
  Gene Symbol: CRYM
  Gene Name: crystallin, mu
  Uniprot ID: Q14894
  ENST ID: ENST00000219599
  CDS Start-End: 267-1211
cttgtctgccactatgtgagatatacctttcaccttctgccgtgattgtgaggcctcctcagccacgtggaactgtaaaaactcctggaagaaaagatcctgcaatttggctttttgtgagatggaaaagattacaccttgccctgcaaacttcccccctttaaaggcgaaggtttgttagagcagcgggcgcgctcataaagggcacagccgagggtacgtggatcgcggtgcggagactgaggttagaaggcacaggtggcgagatgagccgggtaccagcgttcctgagcgcggccgaggtggaggaacacctccgcagctccagcctcctcatcccgcctctagagacggccctggccaacttctccagcggtcccgaaggaggggtcatgcagcccgtgcgcaccgtggtgccggtgaccaagcacaggggctacctgggggtcatgcccgcctacagtgctgcagaggatgcactgaccaccaagttggtcaccttctacgaggaccgcggcatcacctcggtcgtcccttcccaccaggctactgtgctactctttgagcccagcaatggcaccctgctggcggtcatggatggaaatgtcataactgcaaagagaacagctgcagtttctgccattgccaccaagtttctgaaacctcccagcagtgaagtgctgtgcatccttggggctggggtccaggcctacagccattatgagatcttcacagagcagttctcctttaaggaggtgaggatatggaaccgcaccaaagaaaatgcagagaagtttgcagacacagtgcaaggagaggtacgggtctgttcttcggtccaggaggctgtggcaggtgcagatgtgatcatcacagtcaccctggcaacagagcccattttgtttggtgaatgggtgaagccaggggctcacatcaatgctgttggagccagcagacctgactggagagaactggatgatgagctcatgaaagaagctgtgctgtacgtggattcccaggaggctgccctgaaggagtctggagatgtcctgctgtcaggggccgagatctttgctgagctgggagaagtgattaagggagtgaaaccagcccactgtgagaagaccaccgtgttcaagtctttgggaatggcagtggaagacacagttgcagccaaactcatctatgattcctggtcatctggtaaataaaacaaaggaacttgatgttgagatggatgcttgaggaatattgctgctggttctcataatttctagagtaaatgagggagtccagtccccagtgaactctccttttgtgcttatcatgttttaccttaaatgctgagatcctcatttatgtttgtagttggaaagcaaagctaggtagccatttcttctgttctaccaagttataatagcattcatttccctttatatttccctgaaataaagcacattccaattgtgca

SEQ ID NO: 122726 - DNA, 1400 bp, Homo sapiens
  Payload ID: 4053
  Gene Symbol: CRYM
  Gene Name: crystallin, mu
  Uniprot ID: Q14894
  ENST ID: ENST00000543948
  CDS Start-End: 193-1137
gtaaaaactcctggaagaaaagatcctgcaatttggctttttgtgagatggaaaagattacaccttgccctgcaaacttcccccctttaaaggcgaaggtttgttagagcagcgggcgcgctcataaagggcacagccgagggtacgtggatcgcggtgcggagactgaggttagaaggcacaggtggcgagatgagccgggtaccagcgttcctgagcgcggccgaggtggaggaacacctccgcagctccagcctcctcatcccgcctctagagacggccctggccaacttctccagcggtcccgaaggaggggtcatgcagcccgtgcgcaccgtggtgccggtgaccaagcacaggggctacctgggggtcatgcccgcctacagtgctgcagaggatgcactgaccaccaagttggtcaccttctacgaggaccgcggcatcacctcggtcgtcccttcccaccaggctactgtgctactctttgagcccagcaatggcaccctgctggcggtcatggatggaaatgtcataactgcaaagagaacagctgcagtttctgccattgccaccaagtttctgaaacctcccagcagtgaagtgctgtgcatccttggggctggggtccaggcctacagccattatgagatcttcacagagcagttctcctttaaggaggtgaggatatggaaccgcaccaaagaaaatgcagagaagtttgcagacacagtgcaaggagaggtacgggtctgttcttcggtccaggaggctgtggcaggtgcagatgtgatcatcacagtcaccctggcaacagagcccattttgtttggtgaatgggtgaagccaggggctcacatcaatgctgttggagccagcagacctgactggagagaactggatgatgagctcatgaaagaagctgtgctgtacgtggattcccaggaggctgccctgaaggagtctggagatgtcctgctgtcaggggccgagatctttgctgagctgggagaagtgattaagggagtgaaaccagcccactgtgagaagaccaccgtgttcaagtctttgggaatggcagtggaagacacagttgcagccaaactcatctatgattcctggtcatctggtaaataaaacaaaggaacttgatgttgagatggatgcttgaggaatattgctgctggttctcataatttctagagtaaatgagggagtccagtccccagtgaactctccttttgtgcttatcatgttttaccttaaatgctgagatcctcatttatgtttgtagttggaaagcaaagctaggtagccatttcttctgttctaccaagttataatagcattcatttccctttatatttccctgaaataaagcacattccaattgtgcagtg

SEQ ID NO: 122727 - DNA, 1191 bp, Homo sapiens
  Payload ID: 4053
  Gene Symbol: CRYM
  Gene Name: crystallin, mu
  ENST ID: ENST00000574448
  CDS Start-End: 25-522
aggttagaaggcacaggtggcgagatgagccgggtaccagcgttcctgagcgcggccgaggtggaggaacacctccgcagctccagcctcctcatcccgcctctagagacggccctggccaacttctccagcggtcccgaaggaggggtcatgcagcccgtgcgcaccgtggtgccggtgaccaagcacaggggctacctgggggtcatgcccgcctacagtgctgcagaggatgcactgaccaccaagttggtcaccttctacgaggaccgcggcatcacctcggtcgtcccttcccaccaggctactgtgctactctttgagcccagcaatggcaccctgctggcggtcatggatggaaatgtcataactgcaaagagaacagctgcagtttctgccattgccaccaagtttctgaaacctcccagcagtgaagtgctgtgcatccttggggctggggtccaggcctacagccattatgagatcttcacagagcagttctcctttaaggaggttatctaatttttgcataaaatttgcatagtcttctatcaagaagggtgaagaggttaaccatgcacttccggccgggcaaaatgtcctgtttttcaccttgcttggtgaacttgcttagacataaagtttgtttccgtgaggatatggaaccgcaccaaagaaaatgcagagaagtttgcagacacagtgcaaggagaggtacgggtctgttcttcggtccaggaggctgtggcaggtgcagatgtgatcatcacagtcaccctggcaacagagcccattttgtttggtgaatgggtgaagccaggggctcacatcaatgctgttggagccagcagacctgactggagagaactggatgatgagctcatgaaagaagctgtgctgtacgtggattcccaggaggctgccctgaaggagtctggagatgtcctgctgtcaggggccgagatctttgctgagctgggagaagtgattaagggagtgaaaccagcccactgtgagaagaccaccgtgttcaagtctttggctgcacccatttcactgaatcttaaatgatgctttcaagacagaaggaagaacagtacacctgagatgaccccaaagcctacatcaggcctgctcaacacagcagatcccagatgcttttgagggcaatgaaacaaatctgagatgtac

SEQ ID NO: 122728 - DNA, 874 bp, Homo sapiens
  Payload ID: 4053
  Gene Symbol: CRYM
  Gene Name: crystallin, mu
  ENST ID: ENST00000576703
  CDS Start-End: 151-874
tttcaaatggggagtttccctgcacaagctttcttgtctgccactatgtgagatatacctttcaccttctgccgtgattgtgaggcctcctcagccacgtggaactagacggccctggccaacttctccagcggtcccgaaggaggggtcatgcagcccgtgcgcaccgtggtgccggtgaccaagcacaggggctacctgggggtcatgcccgcctacagtgctgcagaggatgcactgaccaccaagttggtcaccttctacgaggaccgcggcatcacctcggtcgtcccttcccaccaggctactgtgctactctttgagcccagcaatggcaccctgctggcggtcatggatggaaatgtcataactgcaaagagaacagctgcagtttctgccattgccaccaagtttctgaaacctcccagcagtgaagtgctgtgcatccttggggctggggtccaggcctacagccattatgagatcttcacagagcagttctcctttaaggaggtgaggatatggaaccgcaccaaagaaaatgcagagaagtttgcagacacagtgcaaggagaggtacgggtctgttcttcggtccaggaggctgtggcaggtgcagatgtgatcatcacagtcaccctggcaacagagcccattttgtttggtgaatgggtgaagccaggggctcacatcaatgctgttggagccagcagacctgactggagagaactggatgatgagctcatgaaagaagctgtgctgtacgtggattcccaggaggctgccctgaaggagtctggagatgtcctgctgtcaggggccgagatctttgctgagctgggagaagtgattaagggagtgaaaccagcccact

SEQ ID NO: 122729 - DNA, 457 bp, Homo sapiens
  Payload ID: 4053
  Gene Symbol: CRYM
  Gene Name: crystallin, mu
  ENST ID: ENST00000571358
  CDS Start-End: 381-457
tttgttagaggcgcgcgctttcgagctccgcgcgccgaccacgggcagcgggtgggccccctggcgtctggagcagcggccagcgcagaggacgcaggcagaaggaggaagggctggccggggctcccgagcactcactgctcaagcctcgccgccgcctccgccgctgcggggtgcgcgtccatctggttggggctcctcatcccaacaccctccccaacggcccgccgcgcagccgcccgcgggcgagtctgtagcctgatcctgcgcggacccgccagaggcacaccaggagagcagcgggcgcgctcataaagggcacagccgagggtacgtggatcgcggtgcggagactgaggttagaaggcacaggtggcgagatgagccgggtaccagcgttcctgagcgcggccgaggtggaggaacacctccgcagctccagcctcctcatcccgcc

SEQ ID NO: 122730 - DNA, 461 bp, Homo sapiens
  Payload ID: 4053
  Gene Symbol: CRYM
  Gene Name: crystallin, mu
  ENST ID: ENST00000570401
  CDS Start-End: 1-293
ctgttggagccagcagacctgactggagagaactggatgatgagctcatgaaagaagctgtgctgtacgtggattcccaggaggctgccctgaaggagtctggagatgtcctgctgtcaggggccgagatctttgctgagctgggagaagtgattaagggagtgaaaccagcccactgtgagaagaccaccgtgttcaagtctttgggaatggcagtggaagacacagttgcagccaaactcatctatgattcctggtcatctgctgcacccatttcactgaatcttaaatgatgctttcaagacagaaggaagaacagtacacctgagatgaccccaaaggtgggccttcttttgagaaaatttcaaatgcaaaattccagatttacagatgaaactgtcagtaagacaattcatgggttttcctagtggctttaagctattaaaacttgcaaaactttg

SEQ ID NO: 122731 - DNA, 696 bp, Homo sapiens
  Payload ID: 4053
  Gene Symbol: CRYM
  Gene Name: crystallin, mu
  ENST ID: ENST00000572914
  CDS Start-End: 275-696
tggaccaaacaatattgactcccagcacgccaccgcgatgtccatcttggggaatccgttgctggaagggacccatctcgcccacccttaggggtcgaggtgggcgaagggggaggagagggctggcggggcggggcggggttgctccgcccccggaggctgggctgtgaccagcaggcggctccacagagcagcgggcgcgctcataaagggcacagccgagggtacgtggatcgcggtgcggagactgaggttagaaggcacaggtggcgagatgagccgggtaccagcgttcctgagcgcggccgaggtggaggaacacctccgcagctccagcctcctcatcccgcctctagagacggccctggccaacttctccagcggtcccgaaggaggggtcatgcagcccgtgcgcaccgtggtgccggtgaccaagcacaggggctacctgggggtcatgcccgcctacagtgctgcagaggatgcactgaccaccaagttggtcaccttctacgaggaccgcggcatcacctcggtcgtcccttcccaccaggctactgtgctactctttgagcccagcaatggcaccctgctggcggtcatggatggaaatgtcataactgcaaagagaacagctgcagtttctgccattgccaccaagtttctgaaacctcccagcagtgaagtgctgtgcat

SEQ ID NO: 122732 - DNA, 1888 bp, Homo sapiens
  Payload ID: 4054
  Gene Symbol: CRYZ
  Gene Name: crystallin, zeta (quinone reductase)
  Uniprot ID: Q08257
  ENST ID: ENST00000340866
  CDS Start-End: 89-1078
agaaggtgtggcagtcctcatttctgtggaatctgaagaagcccacgcagattttaattcccactctagattctgtatctagatcaccatggcgactggacagaagttgatgagagctgttagagtttttgaatttggtgggccagaagtcctgaaattgcgatcagatattgcagtaccgattccaaaagaccatcaggttctaatcaaggtccatgcatgtggtgtcaaccccgtggagacatacattcgctctggtacttatagtagaaaaccactcttaccctatactcctggctcagatgtggctggggtgatagaagctgttggagataatgcatctgctttcaagaaaggtgacagagttttcactagcagcacgatctctgggggttatgcagagtatgctcttgcagcagaccacactgtttacaaactacctgaaaaactggactttaaacaaggagctgccatcggcattccatattttactgcttatcgagctctgatccacagtgcctgtgtgaaagctggagagagtgttctggttcatggggcaagtggaggagttggattagcagcatgccaaattgctagagcttatggcttaaagattttgggcactgctggtactgaggaaggacaaaagattgttttgcaaaatggagcccatgaagtgttcaatcacagagaagtgaattacattgataaaattaagaagtatgttggtgagaaaggaattgatataattattgaaatgttagctaatgtaaatcttagtaaagacttgagtcttctgtcacatggaggacgagtgatagttgttggcagcagaggtactattgaaataaacccacgagacaccatggcaaaggagtcgagtataattggagttactctcttttcctcaaccaaggaggaatttcagcaatatgcagcagcccttcaagctggaatggaaattggctggttgaaacctgtgataggttctcaatatccattggagaaggtggccgaggctcatgaaaatatcattcatggtagtggggctactggaaaaatgattcttctcttatgatgattaattctttcatggatttcctatgtaattagaggtactgtctttcccccagttgtacttaccctatcttttctttaattaacattcgattccatgagcttcttatgtgaaaaaataagatttttctttagagagcagaagcagaagagtaaaatttattgtatagctagcaatatttttttatgccatctgtctcaaatcaaagagtcatcatagtaggaaataacatgttagttgtcatttggcatgagtgtgcattccagtaattcttaattgatatttgattaattccatacctttgattaaaacatgctagttcaaaataagactgctcagtttccaagggttttcaagcctacttacctttataaaggttctctagtctctgattagccatgactgtattggactttgaacattttctgaactaaaaacctctattctaaactaatctcatttggatgtgtaagtcttttgtaaaggcaagaataaataatatccaggacaatttattagttttctcagtattttcccaaatattagaatatttacttcattattggttggctgccaatgaccccatatgttctgtgagaatagtagctttatctttgatataatacatagtctccaaataggtaatacttcgcaattgattagattttcagagtagatttagagttatctgtttttctggtgagggtcaaatatttttgttaattaagctcacaaatttgataaattaagaattatctgcatttgtctcgtaacataataatgtgtaataaagtctatagaaaattaaaa

SEQ ID NO: 122733 - DNA, 888 bp, Homo sapiens
  Payload ID: 4054
  Gene Symbol: CRYZ
  Gene Name: crystallin, zeta (quinone reductase)
  ENST ID: ENST00000370870
  CDS Start-End: 159-888
gcacatcctgggtggagcctgcaaaagttggagaaggtgtggcagtcctcatttctgtggaatctgaagaagcccacgcagattttaattcccactctagattctggcttcatcgttatgaagcatatgatgatcccgtggatagtatctagatcaccatggcgactggacagaagttgatgagagctgttagagtttttgaatttggtgggccagaagtcctgaaattgcgatcagatattgcagtaccgattccaaaagaccatcaggttctaatcaaggtccatgcatgtggtgtcaaccccgtggagacatacattcgctctggtacttatagtagaaaaccactcttaccctatactcctggctcagatgtggctggggtgatagaagctgttggagataatgcatctgctttcaagaaaggtgacagagttttcactagcagcacgatctctgggggttatgcagagtatgctcttgcagcagaccacactgtttacaaactacctgaaaaactggactttaaacaaggagctgccatcggcattccatattttactgcttatcgagctctgatccacagtgcctgtgtgaaagctggagagagtgttctggttcatggggcaagtggaggagttggattagcagcatgccaaattgctagagcttatggcttaaagattttgggcactgctggtactgaggaaggacaaaagattgttttgcaaaatggagcccatgaagtgttcaatcacagagaagtgaattacattgataaaattaagaagtatgttggtgagaaaggaattgatataattattgaaatgttagctaatgtaaatcttagtaaagacttgagtcttctgtcacatggaggacgagtga

SEQ ID NO: 122734 - DNA, 1292 bp, Homo sapiens
  Payload ID: 4054
  Gene Symbol: CRYZ
  Gene Name: crystallin, zeta (quinone reductase)
  Uniprot ID: Q08257
  ENST ID: ENST00000370871
  CDS Start-End: 81-968
tggcagtcctcatttctgtggaatctgaagaagcccacgcagattttaattcccactctagattctgtatctagatcaccatggcgactggacagaagttgatgagagctgttagagtttttgaatttggtgggccagaagtcctgaaattgcgatcagatattgcagtaccgattccaaaagaccatcaggttctaatcaaggtccatgcatgtggtgtcaaccccgtggagacatacattcgctctggtacttatagtagaaaaccactcttaccctatactcctggctcagatgtggctggggtgatagaagctgttggagataatgcatctgctttcaagaaaggtgacagagttttcactagcagcacgatctctgggggttatgcagagtatgctcttgcagcagaccacactgtttacaaactacctgaaaaactggactttaaacaaggagctgccatcggcattccatattttactgcttatcgagctctgatccacagtgcctgtgtgaaagctggagagagtgttctggttcatggggcaagtggaggagttggattagcagcatgccaaattgctagagcttatggcttaaagattttgggcactgctggtactgaggaaggacaaaagattgttttgcaaaatggagcccatgaagtgttcaatcacagagaagtgaattacattgataaaattaaggttgttggcagcagaggtactattgaaataaacccacgagacaccatggcaaaggagtcgagtataattggagttactctcttttcctcaaccaaggaggaatttcagcaatatgcagcagcccttcaagctggaatggaaattggctggttgaaacctgtgataggttctcaatatccattggagaaggtggccgaggctcatgaaaatatcattcatggtagtggggctactggaaaaatgattcttctcttatgatgattaattctttcatggatttcctatgtaattagaggtactgtctttcccccagttgtacttaccctatcttttctttaattaacattcgattccatgagcttcttatgtgaaaaaataagatttttctttagagagcagaagcagaagagtaaaatttattgtatagctagcaatatttttttatgccatctgtctcaaatcaaagagtcatcatagtaggaaataacatgttagttgtcatttggcatgagtgtgcattccagtaattcttaattgatatttgattaattccatacctttgattaaaacatgctagttcaa

SEQ ID NO: 122735 - DNA, 1592 bp, Homo sapiens
  Payload ID: 4054
  Gene Symbol: CRYZ
  Gene Name: crystallin, zeta (quinone reductase)
  Uniprot ID: Q08257
  ENST ID: ENST00000370872
  CDS Start-End: 200-778
agtcctcatttctgtggaatctgaagaagcccacgcagattttaattcccactctagattctggttctaatcaaggtccatgcatgtggtgtcaaccccgtggagacatacattcgctctggtacttatagtagaaaaccactcttaccctatactcctggctcagatgtggctggggtgatagaagctgttggagataatgcatctgctttcaagtgcctgtgtgaaagctggagagagtgttctggttcatggggcaagtggaggagttggattagcagcatgccaaattgctagagcttatggcttaaagattttgggcactgctggtactgaggaaggacaaaagattgttttgcaaaatggagcccatgaagtgttcaatcacagagaagtgaattacattgataaaattaagaagtatgttggtgagaaaggaattgatataattattgaaatgttagctaatgtaaatcttagtaaagacttgagtcttctgtcacatggaggacgagtgatagttgttggcagcagaggtactattgaaataaacccacgagacaccatggcaaaggagtcgagtataattggagttactctcttttcctcaaccaaggaggaatttcagcaatatgcagcagcccttcaagctggaatggaaattggctggttgaaacctgtgataggttctcaatatccattggagaaggtggccgaggctcatgaaaatatcattcatggtagtggggctactggaaaaatgattcttctcttatgatgattaattctttcatggatttcctatgtaattagaggtactgtctttcccccagttgtacttaccctatcttttctttaattaacattcgattccatgagcttcttatgtgaaaaaataagatttttctttagagagcagaagcagaagagtaaaatttattgtatagctagcaatatttttttatgccatctgtctcaaatcaaagagtcatcatagtaggaaataacatgttagttgtcatttggcatgagtgtgcattccagtaattcttaattgatatttgattaattccatacctttgattaaaacatgctagttcaaaataagactgctcagtttccaagggttttcaagcctacttacctttataaaggttctctagtctctgattagccatgactgtattggactttgaacattttctgaactaaaaacctctattctaaactaatctcatttggatgtgtaagtcttttgtaaaggcaagaataaataatatccaggacaatttattagttttctcagtattttcccaaatattagaatatttacttcattattggttggctgccaatgaccccatatgttctgtgagaatagtagctttatctttgatataatacatagtctccaaataggtaatacttcgcaattgattagattttcagagtagatttagagttatctgtttttctggtgagggtcaaatatttttgttaattaagctcacaaatttgataaattaagaattatctgcatttgtctcgtaacataataatgtgtaataaagtctatagaaaattaaaacctg

SEQ ID NO: 122736 - DNA, 2301 bp, Homo sapiens
  Payload ID: 4054
  Gene Symbol: CRYZ
  Gene Name: crystallin, zeta (quinone reductase)
  Uniprot ID: Q08257
  ENST ID: ENST00000417775
  CDS Start-End: 506-1495
agtaggatgcggccagcgcaggagctggtggtgaaaaactgatctcgcatgttcagaaactgcacaagctctaccacatcctcgtcaacactgcccttccggctgaggtccgctttgctcaaacattgcgccttccatttcctgaactccgcgctgcgatccatgggtgacggactcagggtctgcgctcggctccttcatggtagcctcgtctctccctgggggcagccatattgaagcgagcggtggccgaaaaggtccaaacttcctcttcgttcttaatttgggaaattctagtgccttcgcctaggggtggagagaggcgcacatcctgggtggagcgaggcgcacatcctgggtggagcctgcaaaagttggagaaggtgtggcagtcctcatttctgtggaatctgaagaagcccacgcagattttaattcccactctagattctggcttcatcgttatgaagcatatgatgatcccgtggatagtatctagatcaccatggcgactggacagaagttgatgagagctgttagagtttttgaatttggtgggccagaagtcctgaaattgcgatcagatattgcagtaccgattccaaaagaccatcaggttctaatcaaggtccatgcatgtggtgtcaaccccgtggagacatacattcgctctggtacttatagtagaaaaccactcttaccctatactcctggctcagatgtggctggggtgatagaagctgttggagataatgcatctgctttcaagaaaggtgacagagttttcactagcagcacgatctctgggggttatgcagagtatgctcttgcagcagaccacactgtttacaaactacctgaaaaactggactttaaacaaggagctgccatcggcattccatattttactgcttatcgagctctgatccacagtgcctgtgtgaaagctggagagagtgttctggttcatggggcaagtggaggagttggattagcagcatgccaaattgctagagcttatggcttaaagattttgggcactgctggtactgaggaaggacaaaagattgttttgcaaaatggagcccatgaagtgttcaatcacagagaagtgaattacattgataaaattaagaagtatgttggtgagaaaggaattgatataattattgaaatgttagctaatgtaaatcttagtaaagacttgagtcttctgtcacatggaggacgagtgatagttgttggcagcagaggtactattgaaataaacccacgagacaccatggcaaaggagtcgagtataattggagttactctcttttcctcaaccaaggaggaatttcagcaatatgcagcagcccttcaagctggaatggaaattggctggttgaaacctgtgataggttctcaatatccattggagaaggtggccgaggctcatgaaaatatcattcatggtagtggggctactggaaaaatgattcttctcttatgatgattaattctttcatggatttcctatgtaattagaggtactgtctttcccccagttgtacttaccctatcttttctttaattaacattcgattccatgagcttcttatgtgaaaaaataagatttttctttagagagcagaagcagaagagtaaaatttattgtatagctagcaatatttttttatgccatctgtctcaaatcaaagagtcatcatagtaggaaataacatgttagttgtcatttggcatgagtgtgcattccagtaattcttaattgatatttgattaattccatacctttgattaaaacatgctagttcaaaataagactgctcagtttccaagggttttcaagcctacttacctttataaaggttctctagtctctgattagccatgactgtattggactttgaacattttctgaactaaaaacctctattctaaactaatctcatttggatgtgtaagtcttttgtaaaggcaagaataaataatatccaggacaatttattagttttctcagtattttcccaaatattagaatatttacttcattattggttggctgccaatgaccccatatgttctgtgagaatagtagctttatctttgatataatacatagtctccaaataggtaatacttcgcaattgattagattttcagagtagatttagagttatctgtttttctggtgagggtcaaatatttttgttaattaagctcacaaatttgataaattaagaattatctgcatttgtctcgtaacataataatgtgtaataaagtctatagaaaatt

SEQ ID NO: 122737 - DNA, 677 bp, Homo sapiens
  Payload ID: 4054
  Gene Symbol: CRYZ
  Gene Name: crystallin, zeta (quinone reductase)
  ENST ID: ENST00000441120
  CDS Start-End: 59-677
aagccattcccctccaggggctgcaagttcccatccataaatcagtatctagatcaccatggcgactggacagaagttgatgagagctgttagagtttttgaatttggtgggccagaagtcctgaaattgcgatcagatattgcagtaccgattccaaaagaccatcaggttctaatcaaggtccatgcatgtggtgtcaaccccgtggagacatacattcgctctggtacttatagtagaaaaccactcttaccctatactcctggctcagatgtggctggggtgatagaagctgttggagataatgcatctgctttcaagaaaggtgacagagttttcactagcagcacgatctctgggggttatgcagagtatgctcttgcagcagaccacactgtttacaaactacctgaaaaactggactttaaacaaggagctgccatcggcattccatattttactgcttatcgagctctgatccacagtgcctgtgtgaaagctggagagagtgttctggttcatggggcaagtggaggagttggattagcagcatgccaaattgctagagcttatggcttaaagattttgggcactgctggtactgaggaaggacaaaagattgttttgcaaaatggagcccatgaagtgttcaatcacagagaagtgaattacattg

SEQ ID NO: 122738 - DNA, 1685 bp, Homo sapiens
  Payload ID: 4055
  Gene Symbol: CRYZL1
  Gene Name: crystallin, zeta (quinone reductase)-like 1
  ENST ID: ENST00000290244
  CDS Start-End: 245-1249
tttattggtagtccttggggcggggcctcgcctctttctccgcccccgagcggaacatgacgggagatgtagttccgagaccggttgccatggcgttctggacagcctcgcgagtccgaccccgcccttcaggagtgacgagcggcctgaccaatgggagcagggggcgggctctctgacgaaggactggaaggtggcggtggtgaaggtgcaggccgttggggcggctcagaggcaggtgactatgaaaggcttatatttccaacagagttccacagatgaagaaataacatttgtatttcaagaaaaggaagatcttcctgttacagaggataactttgtgaaacttcaagttaaagcttgtgctctgagccagataaatacaaagcttctggcagaaatgaagatgaaaaaggatttatttcctgttgggagagaaattgctggaattgtattagatggaattttgcccctggactctgaagaccctggactttgtgaagttgttagagtacatgagcattacttggttcataaaccagaaaaggtcacatggacggaagcagcaggaagcattcgggatggagtgcgtgcctatacagctctgcattatctttctcatctctctcctggaaaatcagtgctgataatggatggagcaagtgcatttggtacaatagctattcagttagcacatcatagaggagccaaagtgatttcaacagcatgcagccttgaagataagcagtgccttgaaagattcagacctcccatagcccgagtgattgatgtatctaatgggaaagttcatgttgctgaaagctgtttggaagaaacaggtggcctgggagtagatattgtcctagatgctggagtgagattatatagtaaagatgatgaaccagctgtaaaactacaactactaccacataaacatgatatcatcacacttcttggtgttggaggccactgggtaacaacagaagaaaaccttcagttggatcctccagatagccactgccttttcctcaagggagcaacgttagctttcctgaatgatgaagtttggaatttgtcaaatgtacaacagggaaaatatctttgtatcttaaaggatgtgatggagaagttatcaactggtgttttcagacctcagttggatgaacccattccactgtatgaggcaaaagtttccatggaagctgttcagaaaaatcaaggaagaaaaaagcaagttgttcaattttaattttcttctttctcagacctcagtcggatgaacatattccagtatttgaagccagaattttctttggaaattgttgagaaaaaccaaggaagataaaacaagttgcatttttaagcacgtttctctgctaagacaagatgctcagttgacacatttgaaaagtgtttgaaaaattcttgtgcaaatgatcaagataattctataattaacatcttaagggaatttttctaaaaaccttttcattgtttctatatattttgcccctgctataaaattccttccatgaagaaaactgctgctttcagcaaaagtcacactactcttgataaaagctgttgcaggcctttgctaagctatcaaagtaacgtattaattttgtatcaactccgttctcaacaccttccttaagtctttgctgtcataatttaagcatttg

SEQ ID NO: 122739 - DNA, 2224 bp, Homo sapiens
  Payload ID: 4055
  Gene Symbol: CRYZL1
  Gene Name: crystallin, zeta (quinone reductase)-like 1
  ENST ID: ENST00000361534
  CDS Start-End: 141-1118
gcagggggcgggctctctgacgaaggactggaaggtggcggtggtgaaggtgcaggccgttggggcggctcagaggcagccacttctttcttcctcatcactttgctgttttcggaaagcagttagtagttattcgctgtatgtggcttttgagccagatcggccctcttcattatgctaaacggcggaatcatctggagcgagatgtgactatgaaaggcttatatttccaacagagttccacagatgaagaaataacatttgtatttcaagaaaaggaagatcttcctgttacagaggataactttgtgaaacttcaagttaaagcttgtgctctgagccagataaatacaaagcttctggcagaaatgaagatgaaaaaggatttatttcctgttgggagagaaattgctggaattgtattagatgttggaagcaaggtatcattctttcaaccagatgatgaagtagttggaattttgcccctggactctgaagaccctggactttgtgaagttgttagagtacatgagcattacttggttcataaaccagaaaaggtcacatggacggaagcagcaggaagcattcgggatggagtgcgtgcctatacagctctgcattatctttctcatctctctcctggaaaatcagtgctgataatggatggagcaagtgcatttggtacaatagctattcagttagcacatcatagaggagccaaagtgatttcaacagcatgcagccttgaagataagcagtgccttgaaagattcagacctcccatagcccgagtgattgatgtatctaatgggaaagttcatgttgctgaaagctgtttggaagaaacaggtggcctgggagtagatattgtcctagatgctggagtgagattatatagtaaagatgatgaaccagctgtaaaactacaactactaccacataaacatgatatcatcacacttcttggtgttggaggccactgggtaacaacagaagaaaaccttcagttggatcctccagatagccactgccttttcctcaagggagcaacgttagctttcctgaatgatgaagtttggaatttgtcaaatgtacaacagggaaaatatctttagtattccaagtgccttgcaagtattcatttaaacattaaaacagccttttgagatgtaagtactgttatcatccccatttcacaggtgaagaaacagaagcacagagatgttgatacagactcaaggacgcagcaagtggcggagcaagaatcacactcaggcagtctctctcctttctgaacagagatgagccctaagatacctggaagattttgtttttaacctcacattaaggaaagcacacatcaccttgaaaggttgcacacttactcctatgatggtgccattgcacagaaacatttcagaatacttttctaaattaaagagtttgtggagtgttttataaatatcaatgctaggaaatctttatcaaatgaagataggtttgactttttgaaacaaaagtcattcagagataagtctggtgtgattgaagccaaatcattccagttgagtaaaaataataaaaagtttggaatatacaaacaatttcaaaaagaaaggtgcaaacctctttagagtagggtcaacttaagaattccttttatttctaaaatgactggcttagaggcagcagcacttggtaaaagttttaatgtattggataaaaaaaaagttatcattacttgatagagcatatgtgtgtgtctgaagaaagatttacatagccttacacttctctctactgaatatcatacgttacttttcttaaatgtgtctagtcatatatgtgtgatatgtataaaggccagttccctccaggagcaatgacagtctttattcggagctttaaggtagttatgtaggccgggcatggtggcacatgcctgtaatcccagctactcatgaggctgaggcagaagaatcgcttgaacctgggaggcagaggtttcagtgagccaagattgcactactacactccagcctggtgacagagtgagactccatctcaaaaaaaaaaaaaaaaaaaaaaagttacgtaattagtatactgcatgtgttaagttttaaggagtagatttcaaaaccccttcatgtagtgaatgtatgagtttaaagttatttctgattaaatatttcctattaaatttgaaaattagatttaa

SEQ ID NO: 122740 - DNA, 1482 bp, Homo sapiens
  Payload ID: 4055
  Gene Symbol: CRYZL1
  Gene Name: crystallin, zeta (quinone reductase)-like 1
  ENST ID: ENST00000381540
  CDS Start-End: 74-1042
ctctctgacgaaggactggaaggtggcggtggtgaaggtgcaggccgttggggcggctcagaggcaggtgactatgaaaggcttatatttccaacagagttccacagatgaagaaataacatttgtatttcaagaaaaggaagatcttcctgttacagaggataactttgtgaaacttcaagttaaagcttgtgctctgagccagataaatacaaagcttctggcagaaatgaagatgaaaaaggatttatttcctgttgggagagaaattgctggaattgtattagatgttggaagcaaggtatcattctttcaaccagatgatgaagtagttggaattttgcccctggactctgaagaccctggactttgtgaagttgttagagtacatgagcattacttggttcataaaccagaaaaggtcacatggacggaagcagcaggaagcattcgggatggagtgcgtgcctatacagctctgcattatctttctcatctctctcctggaaaatcagtgctgataatggatggagcaagtgcatttggtacaatagctattcagttagcacatcatagaggagccaaagtgatttcaacagcatgcagccttgaagataagcagtgccttgaaagattcagacctcccatagcccgagtgattgatgtatctaatgggaaagttcatgttgctgaaagctgtttggaagaaacaggtggcctgggagtagatattgtcctagatgctggagtgagattatatagtaaagatgatgaaccagctgtaaaactacaactactaccacataaacatgatatcatcacacttcttggtgttggaggccactgggtaacaacagaagaaaaccttcagttggatcctccagatagccactgccttttcctcaagggagcaacgttagctttcctgaatgatgaagtttggaatttgtcaaatgtacaacagggaaaatatctttctacgtatcttaaaggatgtgatggagaagttatcaactggtgttttcagacctcagttggatgaacccattccactgtatgaggcaaaagtttccatggaagctgttcagaaaaatcaaggaagaaaaaagcaagttgttcaattttaattttcttctttctcagacctcagtcggatgaacatattccagtatttgaagccagaattttctttggaaattgttgagaaaaaccaaggaagataaaacaagttgcatttttaagcacgtttctctgctaagacaagatgctcagttgacacatttgaaaagtgtttgaaaaattcttgtgcaaatgatcaagataattctataattaacatcttaagggaatttttctaaaaaccttttcattgtttctatatattttgcccctgctataaaattccttccatgaagaaaactgctgctttcagcaaaagtcacactactcttgataaaagctgttgcaggcctttgctaagct

SEQ ID NO: 122741 - DNA, 1617 bp, Homo sapiens
  Payload ID: 4055
  Gene Symbol: CRYZL1
  Gene Name: crystallin, zeta (quinone reductase)-like 1
  Uniprot ID: O95825
  ENST ID: ENST00000381554
  CDS Start-End: 87-1136
agcagggggcgggctctctgacgaaggactggaaggtggcggtggtgaaggtgcaggccgttggggcggctcagaggcaggtgactatgaaaggcttatatttccaacagagttccacagatgaagaaataacatttgtatttcaagaaaaggaagatcttcctgttacagaggataactttgtgaaacttcaagttaaagcttgtgctctgagccagataaatacaaagcttctggcagaaatgaagatgaaaaaggatttatttcctgttgggagagaaattgctggaattgtattagatgttggaagcaaggtatcattctttcaaccagatgatgaagtagttggaattttgcccctggactctgaagaccctggactttgtgaagttgttagagtacatgagcattacttggttcataaaccagaaaaggtcacatggacggaagcagcaggaagcattcgggatggagtgcgtgcctatacagctctgcattatctttctcatctctctcctggaaaatcagtgctgataatggatggagcaagtgcatttggtacaatagctattcagttagcacatcatagaggagccaaagtgatttcaacagcatgcagccttgaagataagcagtgccttgaaagattcagacctcccatagcccgagtgattgatgtatctaatgggaaagttcatgttgctgaaagctgtttggaagaaacaggtggcctgggagtagatattgtcctagatgctggagtgagattatatagtaaagatgatgaaccagctgtaaaactacaactactaccacataaacatgatatcatcacacttcttggtgttggaggccactgggtaacaacagaagaaaaccttcagttggatcctccagatagccactgccttttcctcaagggagcaacgttagctttcctgaatgatgaagtttggaatttgtcaaatgtacaacagggaaaatatctttgtatcttaaaggatgtgatggagaagttatcaactggtgttttcagacctcagttggatgaacccattccactgtatgaggcaaaagtttccatggaagctgttcagaaaaatcaaggaagaaaaaagcaagttgttcaattttaattttcttctttctcagacctcagtcggatgaacatattccagtatttgaagccagaattttctttggaaattgttgagaaaaaccaaggaagataaaacaagttgcatttttaagcacgtttctctgctaagacaagatgctcagttgacacatttgaaaagtgtttgaaaaattcttgtgcaaatgatcaagataattctataattaacatcttaagggaatttttctaaaaaccttttcattgtttctatatattttgcccctgctataaaattccttccatgaagaaaactgctgctttcagcaaaagtcacactactcttgataaaagctgttgcaggcctttgctaagctatcaaagtaacgtattaattttgtatcaactccgttctcaacaccttccttaagtctttgctgtcataatttaagcatttgagtatattttgaagtcttaaaagacttagcccataggcacttaaa

SEQ ID NO: 122742 - DNA, 612 bp, Homo sapiens
  Payload ID: 4055
  Gene Symbol: CRYZL1
  Gene Name: crystallin, zeta (quinone reductase)-like 1
  ENST ID: ENST00000399442
  CDS Start-End: 103-177
cggtggtgaaggtgcaggccgttggggcggctcagaggcagccacttctttcttcctcatcactttgctgttttcggaaagcagttagtagttattcgctgtatgtggcttttgagccagatcggccctcttcattatgctaaacggcggaatcatctggagcgagatacccaatgaactacattgagctcaggagagttttatgagcagaagagcaaaaatacacatattggccgagcgtggtggctcacgcctgtaatcccagcactttgggaggcctaggcgggtggatcacttgaggccaggagttcgagaccagcctggccaacatggtgaaaccccgtgtctactaaaaatacagaaattagccgggcatggtggtgcacgcctgtaattccagctactcaggaggctgaggcaggagaattgcttgaacccgggaggcggaggttacagtgagccaagatcacgaccaccacactctagcctgggcaacagagtgagaccctgtctcaaaaaaaaaaaaaaaaatacacatctatatatgctaaaatatggtattttacaaaaaaaaaagtcttccattttatgcataataaagacatgaaatta

SEQ ID NO: 122743 - DNA, 629 bp, Homo sapiens
  Payload ID: 4055
  Gene Symbol: CRYZL1
  Gene Name: crystallin, zeta (quinone reductase)-like 1
  ENST ID: ENST00000426935
  CDS Start-End: 156-629
ctctgacgaaggactggaaggtggcggtggtgaaggtgcaggccgttggggcggctcagaggcaggaagatcttcctgttacagaggataactttgtgaaacttcaagttaaagcttgtgctctgagccagataaatacaaagcttctggcagaaatgaagatgaaaaaggatttatttcctgttgggagagaaattgctggaattgtattagatgttggaagcaaggtatcattctttcaaccagatgatgaagtagttggaattttgcccctggactctgaagaccctggactttgtgaagttgttagagtacatgagcattacttggttcataaaccagaaaaggtcacatggacggaagcagcaggaagcattcgggatggagtgcgtgcctatacagctctgcattatctttctcatctctctcctggaaaatcagtgctgataatggatggagcaagtgcatttggtacaatagctattcagttagcacatcatagaggagccaaagtgatttcaacagcatgcagccttgaagataagcagtgccttgaaagattcagacctcccatagcccgagtgattgatgtatctaatgggaaagttcatgttgctgaaagctgtttg

SEQ ID NO: 122744 - DNA, 627 bp, Homo sapiens
  Payload ID: 4055
  Gene Symbol: CRYZL1
  Gene Name: crystallin, zeta (quinone reductase)-like 1
  ENST ID: ENST00000413017
  CDS Start-End: 49-390
gcggtggtgaaggtgcaggccgttggggcggctcagaggcaggtgactatgaaaggcttatatttccaacagagttccacagatgaagaaataacatttgtatttcaagaaaaggaagatcttcctgttacagaggataactttgtgaaacttcaagttaaagcttgtgctctgagccagataaatacaaagcttctggcagaaatgaagatgaaaaaggatttatttcctgttgggagagaaattgctggaattgtattagatgttggaagcaaggtatcattctttcaaccagatgatgaagtagttgaagtactttcccggctgggtgctgtggctcacgtctgtaatcccagcacgttgggaggccaaggtgggcgaatcacctgaggtcgggagttcgagaccagcctgaccaacatggagaaacctcgtctctactaaaaatacaaaattagccaggcatggtggcacatgcctgtaatcccagctactcaggaggctgaggcaggaaaattgcttaaacccaggaggcagaggttgtggtgagccgagatcacaccattgcactccagcctgggcaagaagaatgaaactccatctcaaaaaaataaagaaagaaagaaa

SEQ ID NO: 122745 - DNA, 535 bp, Homo sapiens
  Payload ID: 4055
  Gene Symbol: CRYZL1
  Gene Name: crystallin, zeta (quinone reductase)-like 1
  ENST ID: ENST00000441940
  CDS Start-End: 1-335
tgagattatatagtaaagatgatgaaccagctgtaaaactacaactactaccacataaacatgatatcatcacacttcttggtgttggaggccactgggtaacaacagaagaaaaccttcagttggatcctccagatagccactgccttttcctcaagggagcaacgttagctttcctgaatgatgaagtttggaatttgtcaaatgtacaacagggaaaatatctttgtatcttaaaggatgtgatggagaagttatcaactggtgttttcagacctcagtcggatgaacatattccagtatttgaagccagaattttctttggaaattgttgagaaaaaccaaggaagataaaacaagttgcatttttaagcacgtttctctgctaagacaagatgctcagttgacacatttgaaaagtgtttgaaaaattcttgtgcaaatgatcaagataattctataattaacatcttaagggaatttttctaaaaaccttttcattgtttctatatattttgcccctgctataaaattc

SEQ ID NO: 122746 - DNA, 824 bp, Homo sapiens
  Payload ID: 4055
  Gene Symbol: CRYZL1
  Gene Name: crystallin, zeta (quinone reductase)-like 1
  ENST ID: ENST00000445393
  CDS Start-End: 57-650
ggaaggtggcggtggtgaaggtgcaggccgttggggcggctcagaggcaggtgactatgaaaggcttatatttccaacagagttccacagatgaagaaataacatttgtatttcaagaaaaggaagatcttcctgttacagaggataactttgtgaaacttcaagttaaagcttgtgctctgagccagataaatacaaagcttctggcagaaatgaagatgaaaaaggatttatttcctgttgggagagaaattgctggaattgtattagatgttcataaaccagaaaaggtcacatggacggaagcagcaggaagcattcgggatggagtgcgtgcctatacagctctgcattatctttctcatctctctcctggaaaatcagtgctgataatggatggagcaagtgcatttggtacaatagctattcagttagcacatcatagaggagccaaagtgatttcaacagcatgcagccttgaagataagcagtgccttgaaagattcagacctcccatagacctcagttggatgaacccattccactgtatgaggcaaaagtttccatggaagctgttcagaaaaatcaaggaagaaaaaagcaagttgttcaattttaattttcttctttctcagacctcagtcggatgaacatattccagtatttgaagccagaattttctttggaaattgttgagaaaaaccaaggaagataaaacaagttgcatttttaagcacgtttctctgctaagacaagatgctcagttgacacatttgaaaagtgtttgaaaaattcttgtgcaaatgatcaagataattctataa

SEQ ID NO: 122747 - DNA, 1935 bp, Homo sapiens
  Payload ID: 4055
  Gene Symbol: CRYZL1
  Gene Name: crystallin, zeta (quinone reductase)-like 1
  ENST ID: ENST00000429827
  CDS Start-End: 68-619
gacgaaggactggaaggtggcggtggtgaaggtgcaggccgttggggcggctcagaggcaggtgactatgaaaggcttatatttccaacagagttccacagatgaagaaataacatttgtatttcaagaaaaggaagatcttcctgttacagaggataactttgtgaaacttcaagttaaagcttgtgctctgagccagataaatacaaagcttctggcagaaatgaagatgaaaaaggatttatttcctgttgggagagaaattgctggaattgtattagatggaattttgcccctggactctgaagaccctggactttgtgaagttgttagagtacatgagcattacttggttcataaaccagaaaaggtcacatggacggaagcagcaggaagcattcgggatggagtgcgtgcctatacagctctgcattatctttctcatctctctcctggaaaatcagtgctgataatggatggagcaagtgcatttggtacaatagctattcagttagcacatcatagaggagccaaagtgatttcaacagcatgcagccttgaagataagcagtgccttgaaagattcagacctcccatagagaacagtacaattgcctgatttcctgtcctttacagcccgagtgattgatgtatctaatgggaaagttcatgttgctgaaagctgtttggaagaaacaggtggcctgggagtagatattgtcctagatgctggagtgagattatatagtaaagatgatgaaccagctgtaaaactacaactactaccacataaacatgatatcatcacacttcttggtgttggaggccactgggtaacaacagaagaaaaccttcagttggatcctccagatagccactgccttttcctcaagggagcaacgttagctttcctgaatgatgaagtttggaatttgtcaaatgtacaacagggaaaatatctttagtattccaagtgccttgcaagtattcatttaaacattaaaacagccttttgagatgtaagtactgttatcatccccatttcacaggtgaagaaacagaagcacagagatgttgatacagactcaaggacgcagcaagtggcggagcaagaatcacactcaggcagtctctctcctttctgaacagagatgagccctaagatacctggaagattttgtttttaacctcacattaaggaaagcacacatcaccttgaaaggttgcacacttactcctatgatggtgccattgcacagaaacatttcagaatacttttctaaattaaagagtttgtggagtgttttataaatatcaatgctaggaaatctttatcaaatgaagataggtttgactttttgaaacaaaagtcattcagagataagtctggtgtgattgaagccaaatcattccagttgagtaaaaataataaaaagtttggaatatacaaacaatttcaaaaagaaaggtgcaaacctctttagagtagggtcaacttaagaattccttttatttctaaaatgactggcttagaggcagcagcacttggtaaaagttttaatgtattggataaaaaaaaagttatcattacttgatagagcatatgtgtgtgtctgaagaaagatttacatagccttacacttctctctactgaatatcatacgttacttttcttaaatgtgtctagtcatatatgtgtgatatgtataaaggccagttccctccaggagcaatgacagtctttattcggagctttaaggtagttatgtaggccgggcatggtggcacatgcctgtaatcccagctactcatgaggctgaggcagaagaatcgcttgaacctgggaggcagaggtttcagtgagccaagattgcactactacactccagcctggtgacagagtgagactccatctcaaaaaaaaaaaaaaaaaaa

SEQ ID NO: 122748 - DNA, 504 bp, Homo sapiens
  Payload ID: 4055
  Gene Symbol: CRYZL1
  Gene Name: crystallin, zeta (quinone reductase)-like 1
  ENST ID: ENST00000417979
  CDS Start-End: 183-504
ggaaggtggcggtggtgaaggtgcaggccgttggggcggctcagaggcagagttccacagatgaagaaataacatttgtatttcaagaaaaggaagatcttcctgttacagaggataactttgtgaaacttcaagttaaagcttgtgctctgagccagataaatacaaagcttctggcagaaatgaagatgaaaaaggatttatttcctgttgggagagaaattgctggaattgtattagatgttggaagcaaggtatcattctttcaaccagatgatgaagtagttggaattttgcccctggactctgaagaccctggactttgtgaagttgttagagtacatgagcattacttggttcataaaccagaaaaggtcacatggacggaagcagcaggaagcattcgggatggagtgcgtgcctatacagctctgcattatctttctcatctctctcctggaaaatcagtgctgataatggatggagcaagtgcatttggtacaa

SEQ ID NO: 122749 - DNA, 607 bp, Homo sapiens
  Payload ID: 4055
  Gene Symbol: CRYZL1
  Gene Name: crystallin, zeta (quinone reductase)-like 1
  ENST ID: ENST00000431177
  CDS Start-End: 64-607
ggtggctcatgcctgtaatcccagcatttcgggaggccgaggcagacggatcacaaggtgactatgaaaggcttatatttccaacagagttccacagatgaagaaataacatttgtatttcaagaaaaggaagatcttcctgttacagaggataactttgtgaaacttcaagttaaagcttgtgctctgagccagataaatacaaagcttctggcagaaatgaagatgaaaaaggatttatttcctgttgggagagaaattgctggaattgtattagatgttggaagcaaggtatcattctttcaaccagatgatgaagtagttggaattttgcccctggactctgaagaccctggactttgtgaagttgttagagtacatgagcattacttggttcataaaccagaaaaggtcacatggacggaagcagcaggaagcattcgggatggagtgcgtgcctatacagctctgcattatctttctcatctctctcctggaaaatcagtgctgataatggatggagcaagtgcatttggtacaatagctattcagttagcacatcatagaggagccaaagtgatttcaacagcatgcagccttgaagata

SEQ ID NO: 122750 - DNA, 595 bp, Homo sapiens
  Payload ID: 4055
  Gene Symbol: CRYZL1
  Gene Name: crystallin, zeta (quinone reductase)-like 1
  ENST ID: ENST00000437996
  CDS Start-End: 1-52
gcagtgccttgaaagattcagacctcccatagagaacagtacaattgcctgatttcctgtcctttacagcccgagtgattgatgtatctaatgggaaagttcatgttgctgaaagctgtttggaagaaacaggtggcctgggagtagatattgtcctagatgctggagtgagattatatagtaaagatgatgaaccagctgtaaaactacaactactaccacataaacatgatatcatcacacttcttggtgttggaggccactgggtaacaacagaagaaaaccttcagttggatcctccagatagccactgccttttcctcaagggagcaacgttagctttcctgaatgatgaagtttggaatttgtcaaatgtacaacagggaaaatatctttgtatcttaaaggatgtgatggagaagttatcaactggtgttttcagacctcagttggatgaacccattccactgtatgaggcaaaagtttccatggaagctgttcagaaaaatcaaggaagaaaaaagcaagttgttcaattttaattttcttctttctcagacctcagtcggatgaacatattccagtatttgaagcc

SEQ ID NO: 122751 - DNA, 620 bp, Homo sapiens
  Payload ID: 4055
  Gene Symbol: CRYZL1
  Gene Name: crystallin, zeta (quinone reductase)-like 1
  ENST ID: ENST00000438788
  CDS Start-End: 562-620
ccgttccacgggattagcaaaactgcctccccgctgacagaactgagaatttctagaggcatttgtttgtatgggatttgctgttattatctaccctcttcattggccttgcctttattatctgtacgttttgatcaagaggagcagcaagagaagaatgccaacagacaagcacaaagaaacgcatctggccggagcctgcatgtatctaaatttccaggttgctgctgccctcagaatagcactgatgatggcaaagttctagaggaaactttcatattgaagaggctataaaaatctctatagcctccaactccacagagaagccgctaatctatttcttccaaagcaaagccttcttgagtctgaatcacaacaaaagattgcccataggaaatgtaatctccgaagttgttttctaatcccaaggcaagcagaagcgcaggaaggtgcggccgattcctcgccggtttcctttttttgggaattcggattgcattcgtgcaagcaagggactgcaattgtgtcttgggtccacaccacaaaaccgtgtcggtgactatgaaaggcttatatttccaacagagttccacagatgaagaaataacatttgtatttca

SEQ ID NO: 122752 - DNA, 408 bp, Homo sapiens
  Payload ID: 4055
  Gene Symbol: CRYZL1
  Gene Name: crystallin, zeta (quinone reductase)-like 1
  ENST ID: ENST00000414079
  CDS Start-End: 1-294
catctctctcctggaaaatcagtgctgataatggatggagcaagtgcatttggtacaatagctattcagttagcacatcatagaggagccaaagtgatttcaacagcatgcagccttgaagataagcagtgccttgaaagattcagacctcccatagcccgagtgattgatgtatctaatgggaaagttcatgttgctgaaagctgtttggaagaaacaggtggcctgggagtagatattgtcctagatgctggaggttatatttttcagcattctagttacatatttacatgatggctgatatgcaaataccgtaattctcacctaccaatcttcactgattttccaacaccctcatgaagatggccagaaaagacacacacacacccctaccacttcaccaccagg

SEQ ID NO: 122753 - DNA, 1026 bp, Homo sapiens
  Payload ID: 4055
  Gene Symbol: CRYZL1
  Gene Name: crystallin, zeta (quinone reductase)-like 1
  ENST ID: ENST00000440526
  CDS Start-End: 1-724
ggatttatttcctgttgggagagaaattgctggaattgtattagatgttggaagcaaggtatcattctttcaaccagatgatgaagtagttggaattttgcccctggactctgaagaccctggactttgtgaagttgttagagtacatgagcattacttggttcataaaccagaaaaggtcacatggacggaagcagcaggaagcattcgggatggagtgcgtgcctatacagctctgcattatctttctcatctctctcctggaaaatcagtgctgataatggatggagcaagtgcatttggtacaatagctattcagttagcacatcatagaggagccaaagtgatttcaacagcatgcagccttgaagataagcagtgccttgaaagattcagacctcccatagcccgagtgattgatgtatctaatgggaaagttcatgttgctgaaagctgtttggaagaaacaggtggcctgggagtagatattgtcctagatgctggagtgagattatatagtaaagatgatgaaccagctgtaaaactacaactactaccacataaacatgatatcatcacacttcttggtgttggaggccactgggtaacaacagaagaaaaccttcaggtgaagaaacagaagcacagagatgttgatacagactcaaggacgcagcaagtggcggagcaagaatcacactcaggcagtctctctcctttctgaacagagatgagccctaagatacctggaagattttgtttttaacctcacattaaggaaagcacacatcaccttgaaaggttgcacacttactcctatgatggtgccattgcacagaaacatttcagaatacttttctaaattaaagagtttgtggagtgttttataaatatcaatgctaggaaatctttatcaaatgaagataggtttgactttttgaaacaaaagtcattcagagataagtctggtgtgattgaagccaaatcattccagttgagtaaaaataataaaaagtttggaatata

SEQ ID NO: 122754 - DNA, 1556 bp, Homo sapiens
  Payload ID: 4055
  Gene Symbol: CRYZL1
  Gene Name: crystallin, zeta (quinone reductase)-like 1
  ENST ID: ENST00000452420
  CDS Start-End: 1-289
tagagtacatgagcattacttggttcataaaccagaaaaggtcacatggacggaagcagcaggaagcattcgggatggagtgcgtgcctatacagctctgcattatctttctcatctctctcctggaaaatcagtgctgataatggatggagcaagtgcatttggtacaatagctattcagttagcacatcatagaggagccaaagtgatttcaacagcatgcagccttgaagataagcagtgccttgaaagattcagacctcccatagagaacagtacaattgcctgatttcctgtcctttacagcccgagtgattgatgtatctaatgggaaagttcatgttgctgaaagctgtttggaagaaacaggtggcctgggagtagatattgtcctagatgctggagtgagattatatagtaaagatgatgaaccagctgtaaaactacaactactaccacataaacatgatatcatcacacttcttggtgttggaggccactgggtaacaacagaagaaaaccttcagttggatcctccagatagccactgccttttcctcaagggagcaacgttagctttcctgaatgatgaagtttggaatttgtcaaatgtacaacagggaaaatatctttagtattccaagtgccttgcaagtattcatttaaacattaaaacagccttttgagatgtaagtactgttatcatccccatttcacaggtgaagaaacagaagcacagagatgttgatacagactcaaggacgcagcaagtggcggagcaagaatcacactcaggcagtctctctcctttctgaacagagatgagccctaagatacctggaagattttgtttttaacctcacattaaggaaagcacacatcaccttgaaagagctaaacttgacgtcctacagaatttctctaacttaacatgttgagtctctgagagtgcaaaacttgaaacaagagaaagtggcctgcctggcatcctctgcttattgaatggttttatttaattctcctttacattgccaccttaacaatccttccagctacgtatcttaaaggatgtgatggagaagttatcaactggtgttttcagacctcagttggatgaacccattccactgtatgaggcaaaagtttccatggaagctgttcagaaaaatcaaggaagaaaaaagcaagttgttcaattttaattttcttctttctcagacctcagtcggatgaacatattccagtatttgaagccagaattttctttggaaattgttgagaaaaaccaaggaagataaaacaagttgcatttttaagcacgtttctctgctaagacaagatgctcagttgacacatttgaaaagtgtttgaaaaattcttgtgcaaatgatcaagataattctataattaacatcttaagggaatttttctaaaaaccttttcattgtttctatatattttgcccctgctataaaattccttccatgaagaaaactgctgctttcagcaaaagtcacactactcttgataaaagctgttgcaggcctttgctaagc

SEQ ID NO: 122755 - DNA, 2558 bp, Homo sapiens
  Payload ID: 4055
  Gene Symbol: CRYZL1
  Gene Name: crystallin, zeta (quinone reductase)-like 1
  Uniprot ID: O95825
  ENST ID: ENST00000420072
  CDS Start-End: 665-1261
actggccccgcccaccgtgcgaacccaaagagggtgagccaaagaaatgtaagacaacagagtgacaagccgaatgagccaatcagcaggggctgtgtgggggcaggattagcactctccccctcctccccatgtaggcgtaacaggagatttatggtctgaggttgcctatcgtggtttatggagattttgttgcacgatttcggtgcatctgctcgttgccgtgagagacactagataggatgcacttaattgacttaattattggaggttttcaaggagagaataatgtggaaaggaaaaaggcgaagcacaacccaaaggggttggccgggcctatggttggaatgaggaagggtgtggtcttcggctaaaatttgcataaaacggaacccatccgggcgattccaacttcgcccatttattggtagtccttggggcggggcctcgcctctttctccgcccccgagcggaacatgacgggagatgtagttccgagaccggttgccatggcgttctggacagcctcgcgagtccgaccccgcccttcaggagtgacgagcggcctgaccaatgggagcagggggcgggctctctgacgaaggactggaaggtggcggtggtgaaggtgcaggccgttggggcggctcagaggcaggtgactatgaaaggcttatatttccaacagagttccacagatgaagaaataacatttgtatttcaagaaaaggaagatcttcctgttacagaggataactttgtgaaacttcaagttaaagcttgtgctctgagccagataaatacaaagcttctggcagaaatgaagatgaaaaaggatttatttcctgttgggagagaaattgctggaattgtattagatgttggaagcaaggtatcattctttcaaccagatgatgaagtagttggaattttgcccctggactctgaagaccctggactttgtgaagttgttagagtacatgagcattacttggttcataaaccagaaaaggtcacatggacggaagcagcaggaagcattcgggatggagtgcgtgcctatacagctctgcattatctttctcatctctctcctggaaaatcagtgctgataatggatggagcaagtgcatttggtacaatagctattcagttagcacatcatagaggagccaaagtgatttcaacagcatgcagccttgaagataagcagtgccttgaaagattcagacctcccatagagaacagtacaattgcctgatttcctgtcctttacagcccgagtgattgatgtatctaatgggaaagttcatgttgctgaaagctgtttggaagaaacaggtggcctgggagtagatattgtcctagatgctggagtgagattatatagtaaagatgatgaaccagctgtaaaactacaactactaccacataaacatgatatcatcacacttcttggtgttggaggccactgggtaacaacagaagaaaaccttcagttggatcctccagatagccactgccttttcctcaagggagcaacgttagctttcctgaatgatgaagtttggaatttgtcaaatgtacaacagggaaaatatctttagtattccaagtgccttgcaagtattcatttaaacattaaaacagccttttgagatgtaagtactgttatcatccccatttcacaggtgaagaaacagaagcacagagatgttgatacagactcaaggacgcagcaagtggcggagcaagaatcacactcaggcagtctctctcctttctgaacagagatgagccctaagatacctggaagattttgtttttaacctcacattaaggaaagcacacatcaccttgaaaggttgcacacttactcctatgatggtgccattgcacagaaacatttcagaatacttttctaaattaaagagtttgtggagtgttttataaatatcaatgctaggaaatctttatcaaatgaagataggtttgactttttgaaacaaaagtcattcagagataagtctggtgtgattgaagccaaatcattccagttgagtaaaaataataaaaagtttggaatatacaaacaatttcaaaaagaaaggtgcaaacctctttagagtagggtcaacttaagaattccttttatttctaaaatgactggcttagaggcagcagcacttggtaaaagttttaatgtattggataaaaaaaaagttatcattacttgatagagcatatgtgtgtgtctgaagaaagatttacatagccttacacttctctctactgaatatcatacgttacttttcttaaatgtgtctagtcatatatgtgtgatatgtataaaggccagttccctccaggagcaatgacagtctttattcggagctttaaggtagttatgtaggccgggcatggtggcacatgcctgtaatcccagctactcatgaggctgaggcagaagaatcgcttgaacctgggaggcagaggtttcagtgagccaagattgcactactacactccagcctggtgacagagtgagactccatctc

SEQ ID NO: 122756 - DNA, 3553 bp, Homo sapiens
  Payload ID: 4056
  Gene Symbol: CSE1L
  Gene Name: CSE1 chromosome segregation 1-like (yeast)
  Uniprot ID: P55060
  ENST ID: ENST00000262982
  CDS Start-End: 124-3039
gtcgcgccattttgccggggtttgaatgtgaggcggagcggcggcaggagcgggtagtgccagctacggtccgcggctggggttccctcctccgtttctgtatccccacgagatcctatagcaatggaactcagcgatgcaaatctgcaaacactaacagaatatttaaagaaaacacttgatcctgatcctgccatccgacgtccagctgagaaatttcttgaatctgttgaaggaaatcagaattatccactgttgcttttgacattactggagaagtcccaggataatgttatcaaagtatgtgcttcagtaacattcaaaaactatattaaaaggaactggagaattgttgaagatgaaccaaacaaaatttgtgaagccgatcgagtggccattaaagccaacatagtgcacttgatgcttagcagcccagagcaaattcagaagcagttaagtgatgcaattagcattattggcagagaagattttccacagaaatggcctgacttgctgacagaaatggtgaatcgctttcagagtggagatttccatgttattaatggagtcctccgtacagcacattcattatttaaaagataccgtcatgaatttaagtcaaacgagttatggactgaaattaagcttgttctggatgcctttgctttgcctttgactaatctttttaaggccactattgaactctgcagtacccatgcaaatgatgcctctgccctgaggattctgttttcttccctgatcctgatctcaaaattgttctatagtttaaactttcaggatctccctgaattttttgaagataatatggaaacttggatgaataattttcatactctcttaacattggataataagcttttacaaactgatgatgaagaggaagccggcttattggagctcttaaaatcccagatttgtgataatgccgcactctatgcacaaaagtacgatgaagaattccagcgatacctgcctcgttttgttacagccatctggaatttactagttacaacgggtcaagaggttaaatatgatttgttggtaagtaatgcaattcaatttctggcttcagtttgtgagagacctcattataagaatctatttgaggaccagaacacgctgacaagtatctgtgaaaaggttattgtgcctaacatggaatttagagctgctgatgaagaagcatttgaagataattctgaggagtacataaggagagatttggaaggatctgatattgatactagacgcagggctgcttgtgatctggtacgaggattatgcaagttttttgagggacctgtgacaggaatcttctctggttatgttaattccatgctgcaggaatacgcaaaaaatccatctgtcaactggaaacacaaagatgcagccatctacctagtgacatctttggcatcaaaagcccaaacacagaagcatggaattacacaagcaaatgaacttgtaaacctaactgagttctttgtgaatcacatcctccctgatttaaaatcagctaatgtgaatgaatttcctgtccttaaagctgacggtatcaaatatattatgatttttagaaatcaagtgccaaaagaacatcttttagtctcgattcctctcttgattaatcatcttcaagctgaaagtattgttgttcatacttacgcagctcatgctcttgaacggctctttactatgcgagggcctaacaatgccactctctttacagctgcagaaatcgcaccgtttgttgagattctgctaacaaaccttttcaaagctctcacacttcctggctcttcagaaaatgaatatattatgaaagctatcatgagaagtttttctctcctacaagaagccataatcccctacatccctactctcatcactcagcttacacagaagctattagctgttagtaagaacccaagcaaacctcactttaatcactacatgtttgaagcaatatgtttatccataagaataacttgcaaagctaaccctgctgctgttgtaaattttgaggaggctttgtttttggtgtttactgaaatcttacaaaatgatgtgcaagaatttattccatacgtctttcaagtgatgtctttgcttctggaaacacacaaaaatgacatcccgtcttcctatatggccttatttcctcatctccttcagccagtgctttgggaaagaacaggaaatattcctgctctagtgaggcttcttcaagcattcttagaacgcggttcaaacacaatagcaagtgctgcagctgacaaaattcctgggttactaggtgtctttcagaagctgattgcatccaaagcaaatgaccaccaaggtttttatcttctaaacagtataatagagcacatgcctcctgaatcagttgaccaatataggaaacaaatcttcattctgctattccagagacttcagaattccaaaacaaccaagtttatcaagagttttttagtctttattaatttgtattgcataaaatatggggcactagcactacaagaaatatttgatggtatacaaccaaaaatgtttggaatggttttggaaaaaattattattcctgaaattcagaaggtatctggaaatgtagagaaaaagatctgtgcggttggcataaccaaattactaacagaatgtcccccaatgatggacactgagtataccaaactgtggactccattattacagtctttgattggtctttttgagttacccgaagatgataccattcctgatgaggaacattttattgacatagaagatacaccaggatatcagactgccttctcacagttggcatttgctgggaaaaaagagcatgatcctgtaggtcaaatggtgaataaccccaaaattcacctggcacagtcacttcacaagttgtctaccgcctgtccaggaagggttccatcaatggtgagcaccagcctgaatgcagaagcgctccagtatctccaagggtaccttcaggcagccagtgtgacactgctttaaactgcatttttctaatgggctaaacccagatggtttcctaggaaatcacaggcttctgagcacagctgcattaaaacaaaggaagttctccttttgaacttgtcacgaattccatcttgtaaaggatattaaatgttgctttaacctgaaccttgagcaaattagttggtttgtgtgatcatacagttatgtgggtggcttctagtttgcaacttcaagggacaagtattaatagttcagtgtatggcgttggtttgtgttgagcgtttgcacggtttggataatcttaaattttgacggacactgtggagactttctgttactaaatccttttgttttgaagctgttgctatttgtatttctcttgtcctttatattttttgtctgtttatttacgcttttattggaaatgtgaataagtaaagaattacttgtgttacttgccaagcagtgcacatttcatagtttcaaatctgtaatcagcaataaaaatcctaaaatatgtacctaagaa

SEQ ID NO: 122757 - DNA, 3459 bp, Homo sapiens
  Payload ID: 4056
  Gene Symbol: CSE1L
  Gene Name: CSE1 chromosome segregation 1-like (yeast)
  Uniprot ID: P55060
  ENST ID: ENST00000396192
  CDS Start-End: 190-2937
agagcattcctggccccgccccctgcagcgggccgctcgctcatgcgctctggcctcaggctcgctgtcgcgccattttgccggggtttgaatgtgaggcggagcggcggcaggagcgggtagtgccagctacggtccgcggctggggttccctcctccgtttctgtatccccacgagatcctatagcaatggaactcagcgatgcaaatctgcaaacactaacagaatatttaaagaaaacacttgatcctgatcctgccatccgacgtccagctgagaaatttcttgaatctgttgaaggaaatcagaattatccactgttgcttttgacattactggagaagtcccaggataatgttatcaaagtatgtgcttcagtaacattcaaaaactatattaaaaggaactggagaattgttgaagatgaaccaaacaaaatttgtgaagccgatcgagtggccattaaagccaacatagtgcacttgatgcttagcagcccagagcaaattcagaagcagttaagtgatgcaattagcattattggcagagaagattttccacagaaatggcctgacttgctgacagaaatggtgaatcgctttcagagtggagatttccatgttattaatggagtcctccgtacagcacattcattatttaaaagataccgtcatgaatttaagtcaaacgagttatggactgaaattaagcttgttctggatgcctttgctttgcctttgactaatctttttaaggccactattgaactctgcagtacccatgcaaatgatgcctctgccctgaggattctgttttcttccctgatcctgatctcaaaattgttctatagtttaaactttcaggatctccctgaattttttgaagataatatggaaacttggatgaataattttcatactctcttaacattggataataagcttttacaaactgatttggtaagtaatgcaattcaatttctggcttcagtttgtgagagacctcattataagaatctatttgaggaccagaacacgctgacaagtatctgtgaaaaggttattgtgcctaacatggaatttagagctgctgatgaagaagcatttgaagataattctgaggagtacataaggagagatttggaaggatctgatattgatactagacgcagggctgcttgtgatctggtacgaggattatgcaagttttttgagggacctgtgacaggaatcttctctggttatgttaattccatgctgcaggaatacgcaaaaaatccatctgtcaactggaaacacaaagatgcagccatctacctagtgacatctttggcatcaaaagcccaaacacagaagcatggaattacacaagcaaatgaacttgtaaacctaactgagttctttgtgaatcacatcctccctgatttaaaatcagctaatgtgaatgaatttcctgtccttaaagctgacggtatcaaatatattatgatttttagaaatcaagtgccaaaagaacatcttttagtctcgattcctctcttgattaatcatcttcaagctgaaagtattgttgttcatacttacgcagctcatgctcttgaacggctctttactatgcgagggcctaacaatgccactctctttacagctgcagaaatcgcaccgtttgttgagattctgctaacaaaccttttcaaagctctcacacttcctggctcttcagaaaatgaatatattatgaaagctatcatgagaagtttttctctcctacaagaagccataatcccctacatccctactctcatcactcagcttacacagaagctattagctgttagtaagaacccaagcaaacctcactttaatcactacatgtttgaagcaatatgtttatccataagaataacttgcaaagctaaccctgctgctgttgtaaattttgaggaggctttgtttttggtgtttactgaaatcttacaaaatgatgtgcaagaatttattccatacgtctttcaagtgatgtctttgcttctggaaacacacaaaaatgacatcccgtcttcctatatggccttatttcctcatctccttcagccagtgctttgggaaagaacaggaaatattcctgctctagtgaggcttcttcaagcattcttagaacgcggttcaaacacaatagcaagtgctgcagctgacaaaattcctgggttactaggtgtctttcagaagctgattgcatccaaagcaaatgaccaccaaggtttttatcttctaaacagtataatagagcacatgcctcctgaatcagttgaccaatataggaaacaaatcttcattctgctattccagagacttcagaattccaaaacaaccaagtttatcaagagttttttagtctttattaatttgtattgcataaaatatggggcactagcactacaagaaatatttgatggtatacaaccaaaaatgtttggaatggttttggaaaaaattattattcctgaaattcagaaggtatctggaaatgtagagaaaaagatctgtgcggttggcataaccaaattactaacagaatgtcccccaatgatggacactgagtataccaaactgtggactccattattacagtctttgattggtctttttgagttacccgaagatgataccattcctgatgaggaacattttattgacatagaagatacaccaggatatcagactgccttctcacagttggcatttgctgggaaaaaagagcatgatcctgtaggtcaaatggtgaataaccccaaaattcacctggcacagtcacttcacaagttgtctaccgcctgtccaggaagggttccatcaatggtgagcaccagcctgaatgcagaagcgctccagtatctccaagggtaccttcaggcagccagtgtgacactgctttaaactgcatttttctaatgggctaaacccagatggtttcctaggaaatcacaggcttctgagcacagctgcattaaaacaaaggaagttctccttttgaacttgtcacgaattccatcttgtaaaggatattaaatgttgctttaacctgaaccttgagcaaattagttggtttgtgtgatcatacagttatgtgggtggcttctagtttgcaacttcaagggacaagtattaatagttcagtgtatggcgttggtttgtgttgagcgtttgcacggtttggataatcttaaattttgacggacactgtggagactttctgttactaaatccttttgttttgaagctgttgctatttgtatttctcttgtcctttatattttttgtctgtttatttacgcttttattggaaatgtgaataagtaaagaattacttgtgttacttgccaagcagtgcacatttcatagtttcaaatctgtaatcagcaataaaaatcctaaaatatgtacctaagaacatcttaa

SEQ ID NO: 122758 - DNA, 2767 bp, Homo sapiens
  Payload ID: 4057
  Gene Symbol: CSK
  Gene Name: c-src tyrosine kinase
  Uniprot ID: P41240
  ENST ID: ENST00000220003
  CDS Start-End: 730-2082
gcaggcgcgctgccgcgggcggaggatccgggccgcgcttcctctcgccaggcctgcgagcttcctcccagcggagccctgggcgagccgaggttggccgccgccgccgccgagcccgctgccgccctcccgctcctgccccacccgcgccttgcccgggggcttctgccggggtggggtccgagccgggcgaccgcccggctgcgccgccgtcggggccgtaacccggcccgccgtccctcccgccccagccagcctctggccgccggagcccgcggggcgtggagcgcgaggagccccgcggccccgatcgagcgtccggggcggcccccggcagccagcgcgacgttccaaaatcgaacctcagtggcggcgctcggaagcggaactctgccggggccgcgccggctacattgtttcctccccccgactccctcccgcccccttcccccgcctttcttccctccgcgacccgggccgtgcgtccgtccccctgcctctgcctggcggtccctcctcccctctccttgcacccatacctctttgtaccgcaccccctggggacccctgcgcccctcccctcccccctgaccgcatggaccgtcccgcaggccgctgatgccgcccgcggcgaggtggcccggaccgcagtgccccaagagagctctaatggtaccaagtgacaggttggctttactgtgactcggggacgccagagctcctgagaagatgtcagcaatacaggccgcctggccatccggtacagaatgtattgccaagtacaacttccacggcactgccgagcaggacctgcccttctgcaaaggagacgtgctcaccattgtggccgtcaccaaggaccccaactggtacaaagccaaaaacaaggtgggccgtgagggcatcatcccagccaactacgtccagaagcgggagggcgtgaaggcgggtaccaaactcagcctcatgccttggttccacggcaagatcacacgggagcaggctgagcggcttctgtacccgccggagacaggcctgttcctggtgcgggagagcaccaactaccccggagactacacgctgtgcgtgagctgcgacggcaaggtggagcactaccgcatcatgtaccatgccagcaagctcagcatcgacgaggaggtgtactttgagaacctcatgcagctggtggagcactacacctcagacgcagatggactctgtacgcgcctcattaaaccaaaggtcatggagggcacagtggcggcccaggatgagttctaccgcagcggctgggccctgaacatgaaggagctgaagctgctgcagaccatcgggaagggggagttcggagacgtgatgctgggcgattaccgagggaacaaagtcgccgtcaagtgcattaagaacgacgccactgcccaggccttcctggctgaagcctcagtcatgacgcaactgcggcatagcaacctggtgcagctcctgggcgtgatcgtggaggagaagggcgggctctacatcgtcactgagtacatggccaaggggagccttgtggactacctgcggtctaggggtcggtcagtgctgggcggagactgtctcctcaagttctcgctagatgtctgcgaggccatggaatacctggagggcaacaatttcgtgcatcgagacctggctgcccgcaatgtgctggtgtctgaggacaacgtggccaaggtcagcgactttggtctcaccaaggaggcgtccagcacccaggacacgggcaagctgccagtcaagtggacagcccctgaggccctgagagagaagaaattctccactaagtctgacgtgtggagtttcggaatccttctctgggaaatctactcctttgggcgagtgccttatccaagaattcccctgaaggacgtcgtccctcgggtggagaagggctacaagatggatgcccccgacggctgcccgcccgcagtctatgaagtcatgaagaactgctggcacctggacgccgccatgcggccctccttcctacagctccgagagcagcttgagcacatcaaaacccacgagctgcacctgtgacggctggcctccgcctgggtcatgggcctgtggggactgaacctggaagatcatggacctggtgcccctgctcactgggcccgagcctgaactgagccccagcgggctggcgggcctttttcctgcgtcccagcctgcacccctccggccccgtctctcttggacccacctgtggggcctggggagcccactgaggggccagggaggaaggaggccacggagcgggaggcagcgccccaccacgtcgggcttccctggcctcccgccactcgccttcttagagttttattcctttccttttttgagattttttttccgtgtgtttattttttattatttttcaagataaggagaaagaaagtacccagcaaatgggcattttacaagaagtacgaatcttatttttcctgtcctgcccgtgagggtgggggggaccgggcccctctctagggacccctcgccccagcctcattccccattctgtgtcccatgtcccgtgtctcctcggtcgccccgtgtttgcgcttgaccatgttgcactgtttgcatgcgcccgaggcagacgtctgtcaggggcttggatttcgtgtgccgctgccacccgcccacccgccttgtgagatggaattgtaataaaccacgccatgaggacaccgccgcccgcctcggcgcttcctccaccgag

SEQ ID NO: 122759 - DNA, 1900 bp, Homo sapiens
  Payload ID: 4057
  Gene Symbol: CSK
  Gene Name: c-src tyrosine kinase
  Uniprot ID: P41240
  ENST ID: ENST00000439220
  CDS Start-End: 179-1531
ccgcgcttcctctcgccaggcctgcgagcttcctcccagcggagccctgggcgagccgaggccgctgatgccgcccgcggcgaggtggcccggaccgcagtgccccaagagagctctaatggtaccaagtgacaggttggctttactgtgactcggggacgccagagctcctgagaagatgtcagcaatacaggccgcctggccatccggtacagaatgtattgccaagtacaacttccacggcactgccgagcaggacctgcccttctgcaaaggagacgtgctcaccattgtggccgtcaccaaggaccccaactggtacaaagccaaaaacaaggtgggccgtgagggcatcatcccagccaactacgtccagaagcgggagggcgtgaaggcgggtaccaaactcagcctcatgccttggttccacggcaagatcacacgggagcaggctgagcggcttctgtacccgccggagacaggcctgttcctggtgcgggagagcaccaactaccccggagactacacgctgtgcgtgagctgcgacggcaaggtggagcactaccgcatcatgtaccatgccagcaagctcagcatcgacgaggaggtgtactttgagaacctcatgcagctggtggagcactacacctcagacgcagatggactctgtacgcgcctcattaaaccaaaggtcatggagggcacagtggcggcccaggatgagttctaccgcagcggctgggccctgaacatgaaggagctgaagctgctgcagaccatcgggaagggggagttcggagacgtgatgctgggcgattaccgagggaacaaagtcgccgtcaagtgcattaagaacgacgccactgcccaggccttcctggctgaagcctcagtcatgacgcaactgcggcatagcaacctggtgcagctcctgggcgtgatcgtggaggagaagggcgggctctacatcgtcactgagtacatggccaaggggagccttgtggactacctgcggtctaggggtcggtcagtgctgggcggagactgtctcctcaagttctcgctagatgtctgcgaggccatggaatacctggagggcaacaatttcgtgcatcgagacctggctgcccgcaatgtgctggtgtctgaggacaacgtggccaaggtcagcgactttggtctcaccaaggaggcgtccagcacccaggacacgggcaagctgccagtcaagtggacagcccctgaggccctgagagagaagaaattctccactaagtctgacgtgtggagtttcggaatccttctctgggaaatctactcctttgggcgagtgccttatccaagaattcccctgaaggacgtcgtccctcgggtggagaagggctacaagatggatgcccccgacggctgcccgcccgcagtctatgaagtcatgaagaactgctggcacctggacgccgccatgcggccctccttcctacagctccgagagcagcttgagcacatcaaaacccacgagctgcacctgtgacggctggcctccgcctgggtcatgggcctgtggggactgaacctggaagatcatggacctggtgcccctgctcactgggcccgagcctgaactgagccccagcgggctggcgggcctttttcctgcgtcccagcctgcacccctccggccccgtctctcttggacccacctgtggggcctggggagcccactgaggggccagggaggaaggaggccacggagcgggaggcagcgccccaccacgtcgggcttccctggcctcccgccactcgccttcttagagttttattcctttccttttttgagattttttttccgtgtgtttattttttattatttttcaagataaggagaaagaaagtacccagc

SEQ ID NO: 122760 - DNA, 578 bp, Homo sapiens
  Payload ID: 4057
  Gene Symbol: CSK
  Gene Name: c-src tyrosine kinase
  ENST ID: ENST00000569915
  CDS Start-End: 385-578
gaacagtagctggaaccaggcctggggctgacggtcaggtgtccattgtcccactagccccctttgctcctttctatcagtcctggaaggccccctgtggccttagggttggtggctccctctgcccctgggggtcctcagccctcatgctcctctacccagtaccgtcagcctgccaggactggagagaatggcccatgtgtcaaatcccagcgcaggacactcttggcacctgttcatgcccagtgaggagccagatctcagcagttggggggcatttcttcacacccctcctcagtcttcatgctcttccccacagctctaatggtaccaagtgacaggttggctttactgtgactcggggacgccagagctcctgagaagatgtcagcaatacaggccgcctggccatccggtacagaatgtattgccaagtacaacttccacggcactgccgagcaggacctgcccttctgcaaaggagacgtgctcaccattgtggccgtcaccaaggaccccaactggtacaaagccaaaaacaaggtgggccgtgagggcatcatcccagccaactacgt

SEQ ID NO: 122761 - DNA, 2443 bp, Homo sapiens
  Payload ID: 4057
  Gene Symbol: CSK
  Gene Name: c-src tyrosine kinase
  Uniprot ID: P41240
  ENST ID: ENST00000567571
  CDS Start-End: 433-1785
attctgcagcccatcctgctggaggagtgtactgagctcccagtccaccctaaaccacaggccacaaccagtgaggttctcactggagcacggggatgtgtgagaggccttggaggcctcggcagccaacacagctggggacccaaggaattctccagagagaggggtctcatgaccccaccagggaggagccgtccaagagagttagcagctcccacttgcaagatgtctgtggcaaggcaggcactgttctggtgctgagagctcaactccagtcctcacagcagcccccagagccaaggagtatcaccagtccattgcacagatggggaagctgggttctagagtcacagccagcagagtaaagctctaatggtaccaagtgacaggttggctttactgtgactcggggacgccagagctcctgagaagatgtcagcaatacaggccgcctggccatccggtacagaatgtattgccaagtacaacttccacggcactgccgagcaggacctgcccttctgcaaaggagacgtgctcaccattgtggccgtcaccaaggaccccaactggtacaaagccaaaaacaaggtgggccgtgagggcatcatcccagccaactacgtccagaagcgggagggcgtgaaggcgggtaccaaactcagcctcatgccttggttccacggcaagatcacacgggagcaggctgagcggcttctgtacccgccggagacaggcctgttcctggtgcgggagagcaccaactaccccggagactacacgctgtgcgtgagctgcgacggcaaggtggagcactaccgcatcatgtaccatgccagcaagctcagcatcgacgaggaggtgtactttgagaacctcatgcagctggtggagcactacacctcagacgcagatggactctgtacgcgcctcattaaaccaaaggtcatggagggcacagtggcggcccaggatgagttctaccgcagcggctgggccctgaacatgaaggagctgaagctgctgcagaccatcgggaagggggagttcggagacgtgatgctgggcgattaccgagggaacaaagtcgccgtcaagtgcattaagaacgacgccactgcccaggccttcctggctgaagcctcagtcatgacgcaactgcggcatagcaacctggtgcagctcctgggcgtgatcgtggaggagaagggcgggctctacatcgtcactgagtacatggccaaggggagccttgtggactacctgcggtctaggggtcggtcagtgctgggcggagactgtctcctcaagttctcgctagatgtctgcgaggccatggaatacctggagggcaacaatttcgtgcatcgagacctggctgcccgcaatgtgctggtgtctgaggacaacgtggccaaggtcagcgactttggtctcaccaaggaggcgtccagcacccaggacacgggcaagctgccagtcaagtggacagcccctgaggccctgagagagaagaaattctccactaagtctgacgtgtggagtttcggaatccttctctgggaaatctactcctttgggcgagtgccttatccaagaattcccctgaaggacgtcgtccctcgggtggagaagggctacaagatggatgcccccgacggctgcccgcccgcagtctatgaagtcatgaagaactgctggcacctggacgccgccatgcggccctccttcctacagctccgagagcagcttgagcacatcaaaacccacgagctgcacctgtgacggctggcctccgcctgggtcatgggcctgtggggactgaacctggaagatcatggacctggtgcccctgctcactgggcccgagcctgaactgagccccagcgggctggcgggcctttttcctgcgtcccagcctgcacccctccggccccgtctctcttggacccacctgtggggcctggggagcccactgaggggccagggaggaaggaggccacggagcgggaggcagcgccccaccacgtcgggcttccctggcctcccgccactcgccttcttagagttttattcctttccttttttgagattttttttccgtgtgtttattttttattatttttcaagataaggagaaagaaagtacccagcaaatgggcattttacaagaagtacgaatcttatttttcctgtcctgcccgtgagggtgggggggaccgggcccctctctagggacccctcgccccagcctcattccccattctgtgtcccatgtcccgtgtctcctcggtcgccccgtgtttgcgcttgaccatgttgcactgtttgcatgcgcccgaggcagacgtctgtcaggggcttggatttcgtgtgccgctgccacccgcccacccgccttgtgagatggaattgtaataaaccacgccatgaggacaccgcc

SEQ ID NO: 122762 - DNA, 556 bp, Homo sapiens
  Payload ID: 4057
  Gene Symbol: CSK
  Gene Name: c-src tyrosine kinase
  ENST ID: ENST00000567123
  CDS Start-End: 352-556
atacctctttgtaccgcaccccctggggacccctgcgcccctcccctcccccctgaccgcatggaccgtcccgcaggccgctgatgccgcccgcggcgaggtggcccggaccgcagtgccccaagagaggccgcctggccatccggtacagaatgtattgccaagtacaacttccacggcactgccgagcaggacctgcccttctgcaaaggagacgtgctcaccattgtggccgtcaccaaggaccccaactggtacaaagccaaaaacaaggtgggccgtgagggcatcatcccagccaactacgtccagaagcgggagggcgtgaaggcgggtaccaaactcagcctcatgccttggttccacggcaagatcacacgggagcaggctgagcggcttctgtacccgccggagacaggcctgttcctggtgcgggagagcaccaactaccccggagactacacgctgtgcgtgagctgcgacggcaaggtggagcactaccgcatcatgtaccatgccagcaagctcagcatcgacgaggaggtgtactttgaga

SEQ ID NO: 122763 - DNA, 534 bp, Homo sapiens
  Payload ID: 4057
  Gene Symbol: CSK
  Gene Name: c-src tyrosine kinase
  ENST ID: ENST00000569462
  CDS Start-End: 203-534
ccgcaccccctggggacccctgcgcccctcccctcccccctgaccgcatggaccgtcccgcaggccgctgatgccgcccgcggcgaggtggcccggaccgcagtgccccaagagagtcttcatgctcttccccacagctctaatggtaccaagtgacaggttggctttactgtgactcggggacgccagagctcctgagaagatgtcagcaatacaggccgcctggccatccggtacagaatgtattgccaagtacaacttccacggcactgccgagcaggacctgcccttctgcaaaggagacgtgctcaccattgtggccgtcaccaaggaccccaactggtacaaagccaaaaacaaggtgggccgtgagggcatcatcccagccaactacgtccagaagcgggagggcgtgaaggcgggtaccaaactcagcctcatgccttggttccacggcaagatcacacgggagcaggctgagcggcttctgtacccgccggagacaggcctgttcctggtgcgggagagcaccaa

SEQ ID NO: 122764 - DNA, 3483 bp, Homo sapiens
  Payload ID: 4058
  Gene Symbol: CSRP2BP
  Gene Name: CSRP2 binding protein
  ENST ID: ENST00000377681
  CDS Start-End: 210-2555
tcactgtccttttaaacttgatcaaataaaggacagtgggtcatataagttactgctttcagggtcccttatatctgaataaaggagtgtgggcagacactttttggaagagtctgtctgggtgatcctggtagaagccccattagggtcactgtccagtgcttagggttgttactgagaagcactgccgagcttgtgagaaggaagggatggatagtagcatccacctgagtagtctgatcagtcggcatgatgacgaagccacgagaacatcgacctcagaaggactggaggaaggtgaagtggagggagagacgctcctgatcgtcgaatccgaggatcaggcatcagtggacttatcgcacgaccagagtggggattccctcaacagtgatgaaggagacgtgtcttggatggaggagcagctgtcctacttctgtgacaagtgccaaaaatggataccagccagtcagctgagggaacagctcagttaccttaagggtgataatttttttaggtttacttgttcggattgctcagcagatggcaaggagcagtatgaaaggctgaagctgacatggcagcaagtcgtcatgttggcaatgtacaacttgtctctggaaggaagtggacgtcaaggttatttcaggtggaaagaagatatctgtgcttttattgagaaacattggacttttttactagggaataggaaaaagacgtctacctggtggagcaccgtggcaggttgcctcagcgtgggaagtcccatgtacttccgttcaggtgctcaggaatttggagagccaggatggtggaaacttgttcataacaagcccccaacgatgaaacctgaaggagagaagttgtctgcctctactttgaaaataaaagcctcaaaaccaactttagatcccatcattactgttgagggacttagaaaacgagcaagtcggaatcctgtggaatctgccatggaattaaaagagaaaaggtctcgaactcaggaagcaaaagacattagaagagcccagaaggaggccgctggctttcttgacaggagcacatcttctacccctgtaaaattcataagccgaggccgcaggccagatgtgattctggaaaaaggcgaagtgattgacttttcctccttgagctcctctgaccgcaccccgctgacaagcccatctccttctccttctctggatttctctgcccctggtacacctgcctctcattctgccacacctagcttgctttcagaagcagatctgattccagatgtgatgcccccacaagccttgtttcatgatgacgatgagatggaaggcgatggagtcatagacccagggatggagtacgtcccaccccctgctgggtcagtagcttctgggccagtggttggggtcagaaagaaggtcagaggccctgaacagataaagcaggaggtagagagtgaggaggaaaaacccgacaggatggatattgacagtgaagacacagattcaaacacatctttgcaaacaagggctagagaaaagaggaagcctcagctggagaaggacacaaagccgaaagagcccaggtatactcccgtgagcatctacgaggaaaagctgctgctcaagaggctggaagcttgtcccggtgctgttgccatgactccggaagctcggagactgaaacgcaaactgattgtcagacaagcgaaaagggataggggattaccactttttgacttggatcaagttgttaatgctgctcttttgttagttgacgggatttatggagccaaagaaggaggaatttccagacttccagctggacaagccacgtacagaaccacctgtcaggacttcagaatccttgaccgataccagacttccttgccgtccaggaagggatttcgacaccagaccaccaagtttttgtatcgcttggtaggatcagaagatatggctgtggaccagagtattgtcagcccttatacctctcggatcttgaaaccttatatcaggcgtgattatgaaacaaagccacccaaactgcagctcctgtcacagattcgttcccacctgcacaggagcgaccctcactggacgccggagcccgacgcacctctcgattactgttatgtgcggccaaatcacatcccaacgatcaactccatgtgtcaggagtttttttggcctggcattgacctgtctgagtgtctgcagtacccagacttcagtgttgttgttctttataaaaaagtcatcattgcctttggcttcatggttcctgatgtgaaatacaatgaagcttacatttcatttctgttcgtccaccctgaatggagaagagcagggattgcaactttcatgatctatcatctgattcagacctgcatgggcaaggacgtaacccttcacgtctcagcaagcaaccccgctatgctactgtaccagaagtttggattcaagactgaagaatatgtattagatttctatgataaatattacccattggagagtacagagtgtaaacacgcattctttctgaggctccggcgctgatgcgaatacagctcacagagaaacgcatgtgctattggagaacaggtctttgtggagatctaaaggcagtgattgatttcacagggagctctaatctctgtgattacatggtccttcaaactcccaaccaaagtgagaaaagcggcatgcagtgaaatgagcagtgagcagccctttagcaaaatcgccctccagtccttcctggagatgccttcagccagcatcccagactccacagttatttatgaatgatgtcgtgattctccctccacctgacagtttgtaagagtgaaagagcatctaacctgatgctcttggagagagataacctgtctgtcataacttaaaggatgagaaaatgtggtgtagctattaaagattcatgcagtcccaaaaggcactgtcctgggatgatgagagattataaggtgatttcataaaaggaatccaaccctgtgcccggccattgatgtgttgtcattgaatccaggaggatttctagggcactgaagttttgttgtttcttttgctgactttggttacagtcagaaaaaataaactagatgtttgtgtctacatgttctacctgttgtacctattagcatcttcctgcagggacttgggcccatggcctgggaggttggtttgggattggggttgttgggcagcctgccattcacctggcctatcctggcccttctcatgcccaagacagttgtttcacaggagtggaagtgtgggtgatgcaagtagaaccctctagatgtaccctgtgtggtctgcaggactggactgtttgctgtgtttgtggatgttggcgatagactgtcaattaggttgtttgtgatccaacaagaacatttccaaaagtatctaggtgttctcaaataaaaagctttctttgcacaacccatggccagagcgtcaa

SEQ ID NO: 122765 - DNA, 3618 bp, Homo sapiens
  Payload ID: 4058
  Gene Symbol: CSRP2BP
  Gene Name: CSRP2 binding protein
  Uniprot ID: Q9H8E8
  ENST ID: ENST00000435364
  CDS Start-End: 342-2690
agaagatgttattggcaaaaggatctcaaaaatcatgacttgaatgtgaaatatctgttggacagacaacacgagtttgtgtgtgtgtgttgatggagagtagcttagtagtatcttcatctttttttttggtcactgtccttttaaacttgatcaaataaaggacagtgggtcatataagttactgctttcagggtcccttatatctgaataaaggagtgtgggcagacactttttggaagagtctgtctgggtgatcctggtagaagccccattagggtcactgtccagtgcttagggttgttactgagaagcactgccgagcttgtgagaaggaagggatggatagtagcatccacctgagtagtctgatcagtcggcatgatgacgaagccacgagaacatcgacctcagaaggactggaggaaggtgaagtggagggagagacgctcctgatcgtcgaatccgaggatcaggcatcagtggacttatcgcacgaccagagtggggattccctcaacagtgatgaaggagacgtgtcttggatggaggagcagctgtcctacttctgtgacaagtgccaaaaatggataccagccagtcagctgagggaacagctcagttaccttaagggtgataatttttttaggtttacttgttcggattgctcagcagatggcaaggagcagtatgaaaggctgaagctgacatggcagcaagtcgtcatgttggcaatgtacaacttgtctctggaaggaagtggacgtcaaggttatttcaggtggaaagaagatatctgtgcttttattgagaaacattggacttttttactagggaataggaaaaagacgtctacctggtggagcaccgtggcaggttgcctcagcgtgggaagtcccatgtacttccgttcaggtgctcaggaatttggagagccaggatggtggaaacttgttcataacaagcccccaacgatgaaacctgaaggagagaagttgtctgcctctactttgaaaataaaagcagcctcaaaaccaactttagatcccatcattactgttgagggacttagaaaacgagcaagtcggaatcctgtggaatctgccatggaattaaaagagaaaaggtctcgaactcaggaagcaaaagacattagaagagcccagaaggaggccgctggctttcttgacaggagcacatcttctacccctgtaaaattcataagccgaggccgcaggccagatgtgattctggaaaaaggcgaagtgattgacttttcctccttgagctcctctgaccgcaccccgctgacaagcccatctccttctccttctctggatttctctgcccctggtacacctgcctctcattctgccacacctagcttgctttcagaagcagatctgattccagatgtgatgcccccacaagccttgtttcatgatgacgatgagatggaaggcgatggagtcatagacccagggatggagtacgtcccaccccctgctgggtcagtagcttctgggccagtggttggggtcagaaagaaggtcagaggccctgaacagataaagcaggaggtagagagtgaggaggaaaaacccgacaggatggatattgacagtgaagacacagattcaaacacatctttgcaaacaagggctagagaaaagaggaagcctcagctggagaaggacacaaagccgaaagagcccaggtatactcccgtgagcatctacgaggaaaagctgctgctcaagaggctggaagcttgtcccggtgctgttgccatgactccggaagctcggagactgaaacgcaaactgattgtcagacaagcgaaaagggataggggattaccactttttgacttggatcaagttgttaatgctgctcttttgttagttgacgggatttatggagccaaagaaggaggaatttccagacttccagctggacaagccacgtacagaaccacctgtcaggacttcagaatccttgaccgataccagacttccttgccgtccaggaagggatttcgacaccagaccaccaagtttttgtatcgcttggtaggatcagaagatatggctgtggaccagagtattgtcagcccttatacctctcggatcttgaaaccttatatcaggcgtgattatgaaacaaagccacccaaactgcagctcctgtcacagattcgttcccacctgcacaggagcgaccctcactggacgccggagcccgacgcacctctcgattactgttatgtgcggccaaatcacatcccaacgatcaactccatgtgtcaggagtttttttggcctggcattgacctgtctgagtgtctgcagtacccagacttcagtgttgttgttctttataaaaaagtcatcattgcctttggcttcatggttcctgatgtgaaatacaatgaagcttacatttcatttctgttcgtccaccctgaatggagaagagcagggattgcaactttcatgatctatcatctgattcagacctgcatgggcaaggacgtaacccttcacgtctcagcaagcaaccccgctatgctactgtaccagaagtttggattcaagactgaagaatatgtattagatttctatgataaatattacccattggagagtacagagtgtaaacacgcattctttctgaggctccggcgctgatgcgaatacagctcacagagaaacgcatgtgctattggagaacaggtctttgtggagatctaaaggcagtgattgatttcacagggagctctaatctctgtgattacatggtccttcaaactcccaaccaaagtgagaaaagcggcatgcagtgaaatgagcagtgagcagccctttagcaaaatcgccctccagtccttcctggagatgccttcagccagcatcccagactccacagttatttatgaatgatgtcgtgattctccctccacctgacagtttgtaagagtgaaagagcatctaacctgatgctcttggagagagataacctgtctgtcataacttaaaggatgagaaaatgtggtgtagctattaaagattcatgcagtcccaaaaggcactgtcctgggatgatgagagattataaggtgatttcataaaaggaatccaaccctgtgcccggccattgatgtgttgtcattgaatccaggaggatttctagggcactgaagttttgttgtttcttttgctgactttggttacagtcagaaaaaataaactagatgtttgtgtctacatgttctacctgttgtacctattagcatcttcctgcagggacttgggcccatggcctgggaggttggtttgggattggggttgttgggcagcctgccattcacctggcctatcctggcccttctcatgcccaagacagttgtttcacaggagtggaagtgtgggtgatgcaagtagaaccctctagatgtaccctgtgtggtctgcaggactggactgtttgctgtgtttgtggatgttggcgatagactgtcaattaggttgtttgtgatccaacaagaacatttccaaaagtatctaggtgttctcaaataaaaagctttctttgcacaacccatggccagagcgtcaa

SEQ ID NO: 122766 - DNA, 949 bp, Homo sapiens
  Payload ID: 4058
  Gene Symbol: CSRP2BP
  Gene Name: CSRP2 binding protein
  ENST ID: ENST00000464792
  CDS Start-End: 781-949
ctctgcccgctcggttcctcagctcctcttcgtgtctttcccccgcggtggcgcggccctgcaccccacgcgtttgcggctgcggccggcggccgctctgctgggctccgggcgctgcagctcccggcgggcgtgtgcagcccgcagattcaggacgacccggctgcccggcttagcgcctttggagctccgcgctgaaggggccttgctccgcacaggcacggcacgcaagcttttggggtgcccagtggctctgttttcaagtcacagccggcccgcagggtgcggacctttccacatctcacttgggccgctagaaaatagaagaggcttcgtgacggagttatcagagacattgagaggcaaattcggaaaaaagaaaacattcgtcttttgggagaacagattattttgactgagcaacttgaagcagaaagagagaagatgttattggcaaaaggatctcaaaaatcatgacttgaatgtgaaatatctgttggacagacaacacgagtttgtgtgtgtgtgttgatggagagtagcttagtagtatcttcatctttttttttggtcactgtccttttaaacttgatcaaataaaggacagtgggtcatataagttactgctttcagggtcccttatatctgaataaaggagtgtgggcagacactttttggaagagtctgtctgggtgatcctggtagaagccccattagggtcactgtccagtgcttagggttgttactgagaagcactgccgagcttgtgagaaggaagggatggatagtagcatccacctgagtagtctgatcagtcggcatgatgacgaagccacgagaacatcgacctcagaaggactggaggaaggtgaagtggagggagagacgctcctgatcgtcgaatccgaggatcaggcatcagtggacttatcgcacgaccagagtgggg

SEQ ID NO: 122767 - DNA, 3152 bp, Homo sapiens
  Payload ID: 4058
  Gene Symbol: CSRP2BP
  Gene Name: CSRP2 binding protein
  Uniprot ID: Q9H8E8
  ENST ID: ENST00000489634
  CDS Start-End: 260-2224
attttgcaattgtgggttggctgaagaaaagaagacaacatgggaaaggaaaatctgggtgataaacggattaaacctttaggttaccgctgctctagataaacccatgatgtgactttttgtttttctcctaggtcagctgagggaacagctcagttaccttaagggtgataatttttttaggtttacttgttcggattgctcagcagatggcaaggagcagtatgaaaggctgaagctgacatggcagcaagtcgtcatgttggcaatgtacaacttgtctctggaaggaagtggacgtcaaggttatttcaggtggaaagaagatatctgtgcttttattgagaaacattggacttttttactagggaataggaaaaagacgtctacctggtggagcaccgtggcaggttgcctcagcgtgggaagtcccatgtacttccgttcaggtgctcaggaatttggagagccaggatggtggaaacttgttcataacaagcccccaacgatgaaacctgaaggagagaagttgtctgcctctactttgaaaataaaagcagcctcaaaaccaactttagatcccatcattactgttgagggacttagaaaacgagcaagtcggaatcctgtggaatctgccatggaattaaaagagaaaaggtctcgaactcaggaagcaaaagacattagaagagcccagaaggaggccgctggctttcttgacaggagcacatcttctacccctgtaaaattcataagccgaggccgcaggccagatgtgattctggaaaaaggcgaagtgattgacttttcctccttgagctcctctgaccgcaccccgctgacaagcccatctccttctccttctctggatttctctgcccctggtacacctgcctctcattctgccacacctagcttgctttcagaagcagatctgattccagatgtgatgcccccacaagccttgtttcatgatgacgatgagatggaaggcgatggagtcatagacccagggatggagtacgtcccaccccctgctgggtcagtagcttctgggccagtggttggggtcagaaagaaggtcagaggccctgaacagataaagcaggaggtagagagtgaggaggaaaaacccgacaggatggatattgacagtgaagacacagattcaaacacatctttgcaaacaagggctagagaaaagaggaagcctcagctggagaaggacacaaagccgaaagagcccaggtatactcccgtgagcatctacgaggaaaagctgctgctcaagaggctggaagcttgtcccggtgctgttgccatgactccggaagctcggagactgaaacgcaaactgattgtcagacaagcgaaaagggataggggattaccactttttgacttggatcaagttgttaatgctgctcttttgttagttgacgggatttatggagccaaagaaggaggaatttccagacttccagctggacaagccacgtacagaaccacctgtcaggacttcagaatccttgaccgataccagacttccttgccgtccaggaagggatttcgacaccagaccaccaagtttttgtatcgcttggtaggatcagaagatatggctgtggaccagagtattgtcagcccttatacctctcggatcttgaaaccttatatcaggcgtgattatgaaacaaagccacccaaactgcagctcctgtcacagattcgttcccacctgcacaggagcgaccctcactggacgccggagcccgacgcacctctcgattactgttatgtgcggccaaatcacatcccaacgatcaactccatgtgtcaggagtttttttggcctggcattgacctgtctgagtgtctgcagtacccagacttcagtgttgttgttctttataaaaaagtcatcattgcctttggcttcatggttcctgatgtgaaatacaatgaagcttacatttcatttctgttcgtccaccctgaatggagaagagcagggattgcaactttcatgatctatcatctgattcagacctgcatgggcaaggacgtaacccttcacgtctcagcaagcaaccccgctatgctactgtaccagaagtttggattcaagactgaagaatatgtattagatttctatgataaatattacccattggagagtacagagtgtaaacacgcattctttctgaggctccggcgctgatgcgaatacagctcacagagaaacgcatgtgctattggagaacaggtctttgtggagatctaaaggcagtgattgatttcacagggagctctaatctctgtgattacatggtccttcaaactcccaaccaaagtgagaaaagcggcatgcagtgaaatgagcagtgagcagccctttagcaaaatcgccctccagtccttcctggagatgccttcagccagcatcccagactccacagttatttatgaatgatgtcgtgattctccctccacctgacagtttgtaagagtgaaagagcatctaacctgatgctcttggagagagataacctgtctgtcataacttaaaggatgagaaaatgtggtgtagctattaaagattcatgcagtcccaaaaggcactgtcctgggatgatgagagattataaggtgatttcataaaaggaatccaaccctgtgcccggccattgatgtgttgtcattgaatccaggaggatttctagggcactgaagttttgttgtttcttttgctgactttggttacagtcagaaaaaataaactagatgtttgtgtctacatgttctacctgttgtacctattagcatcttcctgcagggacttgggcccatggcctgggaggttggtttgggattggggttgttgggcagcctgccattcacctggcctatcctggcccttctcatgcccaagacagttgtttcacaggagtggaagtgtgggtgatgcaagtagaaccctctagatgtaccctgtgtggtctgcaggactggactgtttgctgtgtttgtggatgttggcgatagactgtcaattaggttgtttgtgatccaacaagaacatttccaaaagtatctaggtgttctcaaataaaaagctttctttgcacaacccatggccagagcgtcaa

SEQ ID NO: 122768 - DNA, 2587 bp, Homo sapiens
  Payload ID: 4059
  Gene Symbol: CTAGE15
  Gene Name: CTAGE family, member 15
  Uniprot ID: A4D2H0
  ENST ID: ENST00000420911
  CDS Start-End: 18-2351
agagcagcctcgacgctatggaggagcccggtgctacccctcagccctacctggggctggtcctggaggagctacgcagagttgtggcagcactacctgagagtatgagaccagatgagaatccttatggttttccatcggaactggtggtatgtgcagctgttattggattttttgttgttctcctttttttgtggagaagttttagatcggttaggagtcggctttacgtgggaagagagcaaaaacttggtgcaacgctttctggactaattgaagaaaaatgtaaactacttgaaaagtttagccttattcaaaaagagtatgaaggctatgaagtagagtcatctttagaggatgccagctttgagaaggcggcagcagaagaagcacgaagtttggaggcaacctgtgaaaagctgaacaggtccaattctgaacttgaggatgaaatcctctgtctagaaaaagacttaaaagaagagaaatctaaacattctcaacaagatgaattgatggcggatatttcaaaaagtatacagtctctagaagatgagtcaaaatccctcaaatcacaaatagctgaagccaaaatcatctgcaagacatttaaaatgagtgaagaacgacgggctatagcaataaaagatgctttgaatgaaaattctcaacttcagacaagccataaacagctttttcagcaagaagctgaagtatggaaaggacaagtgagtgaacttaataaacagaaaataacatttgaagactccaaagtacacgcagaacaagttctgaatgataaagaaaatcacatcaagaccctgactggacacttgccaatgatgaaagatcaggctgctgtgcttgaagaagacacaacggatgatgataacctggaattagaagtgaacagtcaatgggaaaatggtgctaacttagatgatcctctgaaaggagctttgaagaaactgattcatgctgctaagttaaatgtttctttaaaaagcttagaaggagaaagaaaccacattattattcagttatctgaagtggacaaaacaaaggaagagcttacagagcatattaaaaatcttcagactcaacaagcatctttgcaatcagaaaacatatattttgaaagtgagaatcagaagcttcaacagaaacttaaaataatgactgaattctatcaagaaaatgaaatgaaactctacaggaaattaacagtggaggaaaattaccgaatagaggaagaagagaagctttctagagtggaagaaaagctcagccgtgccactgaacagctggagacctatagaaagctagccaaagatcttgaagaagaattggagagaactgttcatttttatcaaaagcaggttatttcctacgagaaaagaggacatgataattggttggcagctcggactgctgaaagaaacctcagtgatttaaggaaagaaaatgctcacaacaaacaaaaattaactgaaacagagttgaaatttgaacttttagaaaaagatcctaatgcacttgatgtttcaaatacagcatttggcagagagcatgccccgaatggtcccgcaccattgggtcagcgttcatctgaaacgagagcttttctctctcctcaaactttgttggaggatccactgggactctcacctgtgcttccggagggaggaggaagaggcccaagaggcccagggaatcccctggaccatcagattaccaatgaaagaggagaaccaagctgtgacaggttaaccgatcctcacagggctccttctgacactgggtccctgtcatctccggtggaacaggactgtaagatgatgtttcctccaccaggacaatcatatcctgattcagctcttcctcctcaaagggaagacagattttattctaattctgaaagactgtctggatcagcagaacccagaagttttaaaatgacttctttggataaaatggatgggtcaatgccttcagaaatggaatccagtagaaatgatgccaaagatgatcttggtaatttaaatgtgcctgattcatctctccctgctgaaaatgaagcaactggccctggctttattcctccacctcttgctccagtcagaggaccattgtttccagtggatacaaggggcccgttcatgagaagaggacctcctttccccccacctcctccaggaaccatgtttggagcttctcgaggttattttccaccaagggatttcccaggtccaccacatgctccatttgcaatgagaaacatctacccaccgaggggtttacctccttactttcacccgagacctggattttaccccaaccccgcattctgaaggtagaagcgagttcccttcaggattgattccgcctttaatgctactgaacatccaggaccacaaaagaaacctgacaatattgttgctttcttcaaaagtaattttgactgatctcattttcagtttaagtaactgctattacttaagtgattgcacttttgctcaaattgaagtttaatggaattataattctcaggatagtattttgtaaataaagatgttttaaataggaa

SEQ ID NO: 122769 - DNA, 2588 bp, Homo sapiens
  Payload ID: 4060
  Gene Symbol: CTAGE4
  Gene Name: CTAGE family, member 4
  Uniprot ID: Q8IX94
  ENST ID: ENST00000486333
  CDS Start-End: 39-2372
agtgttactgcggtgaccgccagagcagcctcgacgctatggaggagcctggtgctacccctcagccctacctggggctggtcctggaggagctacgcagagttgtggcagcactacctgagagtatgagaccagatgagaatccttatggttttccatcggaactggtggtatgtgcagctgttattggattttttgttgttctcctttttttgtggagaagttttagatcggttaggagtcggctttacgtgggaagagagcaaaaacttggtgcaacgctttctggactaattgaagaaaaatgtaaactacttgaaaagtttagccttattcaaaaagagtatgaaggctatgaagtagagtcatctttagaggatgccagctttgagaaggcggcagcagaagaagcacgaagtttggaggcaacctgtgaaaagctgaacaggtccaattctgaacttgaggatgaaatcctctgtctagaaaaagacttaaaagaagagaaatctaaacattctcaacaagatgaattgatggcggatatttcaaaaagtatacagtctctagaagatgagtcaaaatccctcaaatcacaaatagctgaagccaaaatcatctgcaagacatttaaaatgagtgaagaacgacgggctatagcaataaaagatgctttgaatgaaaattctcaacttcagacaagccataaacagctttttcagcaagaagctgaagtatggaaaggagaagtgagtgaacttaataaacagaaaataacatttgaagactccaaagtgcacgcagaacaagttctgaatgataaagaaaatcacatcaagaccctgactggacacttgccaatgatgaaagatcaggctgctgtgcttgaagaagacacaacggatgatgataacctggaattagaagtgaacagtcaatgggaaaatggtgctaacttagatgatcctctgaaaggagctttgaagaaactgattcatgctgctaagttaaatgtttctttaaaaagcttagaaggagaaagaaaccacattattattcagttatctgaagtggacaaaacaaaggaagagcttacagagcatattaaaaatcttcagactcaacaagcatctttgcaatcagaaaacatatattttgaaagtgagaatcagaagcttcaacagaaacttaaaataatgactgaattctatcaagaaaatgaaatgaaactctacaggaaattaacagtggaggaaaattaccgaatagaggaagaagagaagctttctagagtggaagaaaagatcagccgtgccactgaagggctggagacctatagaaagctagccaaagatcttgaagaagaattggagagaactgttcatttttatcaaaagcaggttatttcctacgagaaaagaggacatgataattggttggcagctcggactgctgaaagaaacctcagtgatttaaggaaagaaaatgctcacaacaaacaaaaattaactgaaacagagttgaaatttgaacttttagaaaaagatcctaatgcactcgatgtttcaaatacagcatttggcagagagcattccccatgtagtccctcaccattgggtcggccttcatctgaaacgagagcttttccctctcctcaaactttgttggaggatccactcagactctcacctgtgcttccagggggaggaggaagaggcccaagcagcccagggaatcccctggaccatcagattaccaatgaaagaggagaaccaagctatgacaggttaatcgatcctcacagggctccttctgacactgggtccctgtcatctccggtggaacaggaccgtaggatgatgtttcctccaccagggcaatcatatcctgattcaactcttcctccacaaagggaagacagattttattctaattctgaaagactgtctggaccagcagaacccagaagttttaaaatgacttctttggataaaatggataggtcaatgccttcagaaatggaatccagtagaaatgatgccaaagatgatcttggtaatttaaatgtgcctgattcatctctccctgctgaaaatgaagcaactggccctggccttattcctccacctcttgctccaatcagcggtccattgtttccagtggatacaaggggcccgttcatgagaagaggacctcctttccccccacctcctccaggaaccatgtttggagcttctcgaggttattttccaccaagggatttcccaggtccaccacatgctccatttgcaatgagaaacatctatccaccgaggggtttacctccttaccttcatccgagacctggattttaccccaaccccacattctgaaggtagaagcgagttcccttcaggattgattccgccttcaaaggagcctgctactggacatccagaaccacagcaagaaacctgacaatattgttgctttcttcaaaagtaattttgactgatctcattttcagtttaagtaactgctgttacttaagtgattgcacttttctcaaattgaagtttaatggaataatagttctcaggatagtattt
